United States Patent Application Publication US 2014/0325702 A1 - sequence listing, part 19

SEQ ID NO: 21302 - DNA, 1735 bp, Heterodera glycines
ttgtcaggttcctgcgtcttctcgactgtgtccacctttaggttttttctccattttttctttttgccaatgttttctttcagtgccaaaatcggttccctttgtggccatagttttgccgacttttccctctcttctcagccgtcccttcaagaacaattgatcattctaaaggtgccttcctccactttctgatcatttccttttgtttagctgatcgactcactccctgatcagtccttttgcgtgcgtaactttttgaacgatggacaaattgtggtgaattccgtttgtgcggacgaatgcgcgacggaaaaattggaagaggcgacgaaaacgcacggcaatttgccagaaatgaaagtgaaagtgtccggtcggtggcattttatttcatttggcaattttgagtcgattcacagaactgaccgacggagcatgccaacagagcgatttgaacaattgcgacaaaaaggcacaatgtttgccggaaggactgcgctttcggtgccaatgtcttccgggcacaaaagacacttcaccggaggggcaaggccatcgatgcgaagggacggtgcttttacaaacgtaagaaaagtgggggggggagggacttctggcgttgatcggcctgttccgatcattcctttgcgtccgatcacttcgtcgttcctccgactgttcagttgcaccaaattgttcggcgtttgtctgatcgtttggcttctcatgctgctgttgctctgctttcttctgcccattttttcgcttctctgtcttaaatattgctttaaaatcgatccgtttgttctcagaaaccgttttcggcactttttaatgaatttactgaacaaattggtctgatttatcaaacaactctaaaaccattaatagtttgaagtttaagaaagggaagaaatcgccgaaaatagtgccaataataaggacaagtcaaagcgaaatcgagcaaatgcgaagagaaagtgtgaagccgacgtggggagacgaagcaatcactttgaaggttggccatcaaaaacagtagaaggaccgaccgattgatccaaaacacaaagagtgatcaatccgaaaaataaagattaatcagtgaagtgatcagtcggatcagaggggaggggcggatgagagactgcgaatgaatgccatccctggaaaagataccgtcaatgaacaatgggcttcgtcaagcgacaattcattctccataccgcttgatgccatcagactcagaggaatatttaatcgttcaagaggaagagggagaggagcaaaaagggaaagagacagtgagagaaaagggagtggatgagagagcggaggcagaaaagagactggcagggaagcagacagttcgtcatcagacggaacaatcttcaaaatcgacgatgcaaagcagtacagagacgggactgatccttatgccggaagcgaaactcgggtcacttccatcagcagacgcaatgacaacgaaaagcgaggtggtagtggaggaaacaacagaggtagaggtacatgaagagggcgagagagtggaggaggaagagaaacagaggactgagagagaagcacccgatgagagagaggaagagaggccaaagagtgccgcttcacggacgggcacaccgaccatttgggatcagtacaaaatactgggtgatcaattcgcaaaatacggatcacttgaaatagaaagtgagaggggagagggaaaagg

SEQ ID NO: 21303 - DNA, 1355 bp, Heterodera glycines
ttgggatcagtacaaaatactgggtgatcatttcgcaaaatacggatcacttgaaatagaaagtgagaggggagagggaaaagggagagacagagagagaagggtcaataaacatattgcagagagaaaagaaagtgtgacggaatcattggaagaactgatccaaaaacaagaggaagctaaagatggcgaggagagagtgaagcatgccattgctggcagagagacggcagagagaagagggcaagaaggaatagtggaggaaagggggagaatagaagagatggagcagtacagagagaccgataaagaacagcaaaaaaagggagaattaggaaaaaagcaagagaggcacggaatgaagtggggagaattcgaagaggaagaacgagaggaacggaaggaaaaagagggggaaaaaaaggaaaaagagggggaggaggaggaaaaggaggagcagcggggagaggaaaaggacgcaggcaggtccatcccagcggacactttacgcgagggtgccttgagcatcggctttgtgatgccatctcaagtcggtgcccagaggaaagtgctgacccgtgccgctgatcagtctcatgccgccccgccttttccgcaaattaaacgtcgcgcttttggaagtaaaacaaaatcttaacaaaagataaattgaaaaagaacattttagatgaaagattattcgagaaaaaaccagcagaacctaaacaaacatttgtaaagaagccgatcagagggactgattttgtggtggtcaaagggcgagcggaagaagggaaggaagtgagggagagcacgagatcaatgatgggacagaggaagagagacgcatttgtgaggggacagcagagagatgcacagatggaagagactgaacggatgagaggagagtcccaggaagagagggcactgaagagagagtcccaggaagaggggctaaggaagagagagtccgaggaagagagggcacggaaaagagagtcacacgaagagggggtaaggaagagagagtccgaggaagagagggcacggaagagagagttatacgaagagggggtaaggaagagagagtcccaggaagagagggcacggaagagagagtcccaggaagagagggcacgaaagagagagtcccaggaagagagggcacgaaagagagagtcccaggaagagagggcacgaaagagagagtcccaggaagagagggcacgaaagagagagtgccgagtgagtacactcccgatggccttgagtaagggaggacaatcgccgatggaacagctgttggctacaggttaggcgaatttgtttcacatggtgccaaagtggcgttcgat

SEQ ID NO: 21304 - DNA, 2479 bp, Heterodera glycines
cccccccccccctcccccctatgagaggggtgccgccatattagcaccagagaaagcaaccaattcccgtggcgttggcttctgctttgttttcttttgtgccccgtggttcgtccccatttgccgtgccgtggggcatcatttgccctccccccttcgccccctttgctctcggccaacttcaaatgctcggcaattgggtggaaggggaggaggagaggagagccccccagcagttcagtcaattattcctttcaacggccccaatttcccccccccccatttctttgccccatttttgctcacatttccctcccgacattccattcgcttacattaaacattctccggctggcgacgacgacgatgcgatgctttgccatgggaattttttattttcgggcactccgacgcaatggcaataatactttttgggccattgaaattgacggcggagagatttatttcaaaagcgatattttgccctaattagtgcttcagtgaatttgcaaactaacgaatgaatgcttaattagagtttccctaatttattccttttataacaatgtaaaatataaaataaactttgctaatttaattaaaaactcagaaaatcaaatttgactgaattaaccgctgcaaaacataattaaagtgttaatggactcctcggcaacttcaacggcactccaaccgaacttctccgcctcgtcctcctcctcgtggttggccaacaacggtggagcaaccaccaacaaattggatggcatttgcaagcgtctttggtcgtcaaagtgccggaatgggaacggcacaacggccaaggaaaaaagggtgagaagggagcgcggagaataagaagaagggtgtacggtaggaaacccaggggcatacggtgccacctgccaatcagcagaaatgaaataagcacagaattggcctatttttaagacctcggaatccgttttttttgtgaatcgccaatgtctaaaatttcatggtaaaaatcctcttttcctatatttttagttttttgtgcgggggaaggcccaaccgttttttggccaattaggtatctaattaatggtgatttgcattttgcgcacgcagtttcgctgctccgacttcaccattgaccatttgctgttcacagcgccggcggaagggcgacagaatacggcggaacgtaaggaacaaaagcggcagccgaagcggacgaaaacggcgaccaatggcattggcacgggtcaaatgacggcacaaaacaacagcagtccggagcggaaaagccaacggcaacaaacggtgccgaacacggtagagcaacaaacagcaaaatgcccgacatttttgtcctcctcggcgccttcgtcaatttttccgccgatggcgccgccgcctcccttcattttggcaccgccaaattggacgacgatggcaaaaacaatggaggagaaactgaagcagaacaattattggatgctgatgaccgcgacgacgaccactgacgacagaaaactcggtgatgaagccgtgaatttcgaggagtgcaaaagcaacagaaatggcaaaaacggaagcagttttgatggcgagtgcccacggcaattttgcaaagtgagcccagtgccaaatttggcatttctctcggttggcataaatttttgggatttttttttggttcagttaaaaaaacggacacattttcactgcaacatttgtgaccatggattcagctccaaacagcgcatgtccgcccatttgctaaagcattcgtcgaccgccaattccgaagctacaaaattgacacataaaaacggccataaattgtgattttacggagaatggactgacttccccatggattgaatttgcattaaaaataaatgagtttaattgaaattatttatcagaccgaaaaacagaatttaaaatttaaatcctacaacattaaaatgtgtgtgttcgtcaccccttgacaatggccaaaaacgatgcacaaatgaattttgttcatcagtcaactgctcttcggttcaggcgctaaataaaattggactgtaaaattataacttttaataatggaaaatcataatttgtatcctttagttttttagaagaataaaaacaatttctccattttattaaaattatggattgtttaaatttccggaggggagacgaataacgcctgttccataaatgtgcgtccccatttgctttcgttgctcccttcccctcaccctgcttgaagttgtgccatgcactctgcgagtgggcaatgccaacgcggacggagtgcaccatctcatttgggtagcaaaaggcggtcattgtcagcagtccaatcgaaaaataggaacaataaaaatcgtaaaacttaaaaaatggcaatttcatgaaaatttttgaaatccaagccaaaaatattcaaattaaagtgagataaacaaattttaccaaaggataaaatgtgcgg

SEQ ID NO: 21305 - DNA, 1230 bp, Heterodera glycines
  unsure (1)..(1230): unsure at all n locations
atttccgttttttcatgtccgattttgagttagtgggcgaaacgtccgattcagggttagtaggcaaaacgtctgatttgcctcagtaagtataatgtccagtagatgaaagtcgtcgttcctttgtggcccaaccaaataagccagttgacagtataatcatgagctcaaccatgtgtgttcctggccgtctcattcaactaaaagatgaaattaacaagacattggcacaaatattcttaccaggcctggttcctcacgactggacaggaataagacctgtaatttttgatagaaaattaatgatcaatatgggaagagtcatgacctgtgcctaattaaatctaattaagtagtattgattgaagaaaaaacagagatgagtcatcgacagttgctgatgggtgggtgactcatcgcagggactgaaatgggcgcccgttgccttatttaattgtatggtgtcagtcctcgctcgccgcacgcgtcccccactacgggagttggcgcccagcaagcctgttctatatttaggtcgcgtgcgtctgcccattttcccttttttctctaccatgcaatcttttcgctcgcctaccgtatccaaactgcaaggccaaccaatcagcgcttgacaacgtggcgctcatcgtctggggtggtgtttaaaaggaggctctccgaagcagaattttcattcgtcattcactgggaccgcttctattccttcctctcatccctcctcctcccgctcctctgctcccctctaatatacacttccatcacagccctgcctctttttatatatgcttttctctcccatttatttcttatttgcttttctttccattccctcccttaaaatgttatatatttgctttcctctctctcccctcccttcctaaacatgttatgtgtttgctttttcccctcccctcccttttcacttccattgctttaatactcactatcacacttaacatctctctcctttccatcgcatcctttcgctccaattttgctataatgtccttctgcttgctatgcacttgcacaagtttctcatcaatttttaatttagtttcagattttcaaaattttgcttttcaccatttgtcttcgttttattttcgttgtagagagggctcgagaccngcgcattggttagcttctttgtcactctgtcagtgttgtgattgtgtttgtgctgtatcttcatagcatcgcaaaaag

SEQ ID NO: 21306 - DNA, 1171 bp, Heterodera glycines
aaatataatttatataataattaattttaaattttttataaacaattaaatgcaaaaaaaaatgctcaatcgatcggcataatgagcccaagctcgtttattccctacgaactacaccaataacaaacgaagaaacaaaatgattgagcactaattaacgatttttcatttcaggtactgatcagtgatcaaccgatgaacaccaaaaagccgagcgcaatcaaccgggaggcgttgaacgaatcggtaagattttgctaacattgaacacttattaaggctttggaaaattttcaggtttcggcatccccaggacacggcagcaagtcaaaagatttccgcaactgcaacgacatcaaattggccacccgaaaaacaaatgaatgggggaaagcccagctgaagggttgcaccaaagaactgtgcattcgttgtgtgctcgacgcggacatgtactaccgaaccatgcacatttatgacggacatttggccaaaagccgagacgcctgcgaacagatggccaaggagaaggcccagttggcggaagaggtggcacggcacagacgagacagaacggagttgaccacaaaataccaacagttggaagcgctgctgcaccatgaggagcagggacaacagcggcaaatggacgacattctgaaagaaagaaatataaaaatgggagagttgcaggcgaaggtggacgaactcaccggcatcatcgggcagagagatgccaaaatagcggaaatgaccaaccaattcgcaatgacaatgtcaattaagatggagaaagccgaacagaagcctgaagtgccgaaaaaggttcatctgttggcactattgcagtttatacgaccaaaaaaggatttgacaactctaatgcaccataactttttctagaagcatccaaattaaacattcttggtatcattcgatagcctcaagagttctctattagcctgcaaacttccaaagaacttcgttgtgtttcaaaaaatgtgatcataatgttcgaaaattcaacttttcgttgttttctggccataacctttttgaaacaaaatgaaatcctttgtaattttgcaagctaataaaggacattttgggctatcgaacgataccaagaatgttttatttggatgcttcttgaaaaagttatggtgtatta

SEQ ID NO: 21307 - DNA, 3192 bp, Heterodera glycines
  unsure (1)..(3192): unsure at all n locations
tttattgactcgtgtggcataatcatggggacaaaattcgacagcgtactgatccggcgaagggaatgtaaaattattaaaaataaaataaagaatttaaaatttaaaataaaaaataataatttaatttagcaaattccatcgcatcggatacacaaagaaaagtcaatgggaagtgcaaaacatttttgaccatttcaacgacttttacatggaaaatgaacagttaaaggagggcactttcagcagcagaaaatacgatttacgaaaaaacaattgcattgatttttcaaaggaatttgttgaagcgttgttggagggcgacaagcaattaaaagtgggcaaataattaaaataataagcaaaaaattattatttaaattatttagtttatgctcaattcctatcgttcatataagttggcagctacctaaaaatttttggaaatttttgattaaattttatgttttttcgaaaaaattcaaaaatctcgcaatctagcgcgggacccgaaaattttaaaagtgtgattgcataaataaccccccgcgggatcccgtcctgcaagagttccaatcccgaagctggatcagcaaatttgaatttttgattcaattagtgaaccaagacataaccgtaccgatgagtcacaagcccgcgaaaagcggtccgcaattttgcggtccgcataagtatcatgccgaaaataaaaaaaatctatggaccgcttaaaaacccatcggataccgtgtcatttgctagagcaaacattggcccccgcgtgtgctccgacaaccgcccatcaatgacaaatcgtgcggtttttcgagctgtttcatcccaccaaaaatgccagaagatcaacatgacaattaagaaaaagatggatgaaatttacaaaaaaaaagagaattttgctagcatattctttgaatcaaattatacaaattgtcatttgttgcatcattaaaatttttaattcattcatttaacaaaatttattctatagaaaaattagacaacaaaaaattcattccatatatgcaatcaaatatttattaaaaaatgcaaaaatatatttaaatttttattacattgcgtaagtatttttttatgtttcactaacttcaaacctttaatttaaaatagtaaattataaacaagaaaaaaacatagaattttatttgttttttataacttacttctttttattaattaccttaaaacattaattaattctatcaaatcaataattgtcgtttattttacttgtatgcgtttttataaacaaatatttttcataaaatttattattttatgattttgtttattaaaaatgcttatccccacaaaaatgccgttaattaatcttggctttcccattatttgtgctcatttttgccaaattttgtcaaatcctgacgataacagagcaaatgaagatggacgccttttatcattcaaccaaatcggcgaatttattgaggctattaaagagccaaattttaaacaaattatcacttttggacgcccaacagtgccaatcaatgaagtcactgaagaaagcgaagaagcggattggacagacaaattgggtatgatcaatttaaagtgccgatttatccgaactaaaaatttcatgatgtgttgtcctctgttttcggctcggccctttaattttcgtcccaggcatttggccatatcaagaagccaataaaatggcttttttgtcatcatttttacccccattatcctcaaagcataattagattatttcctgtcccctgaattcgtgtccagacatttgcgcctcggacatttgcgcatatgtcaaaaaatcgtgttcaaacttagatttttcaatcatagaggtctttaaactgcattaatttaagaaaacttgttcttttggtttattaggaacagtaatgacgtgttgtttgaaaaatttgttattttttcataaatttgctgacgatcaaattatcgaatacactcactttcaactgcttatttaaaactgtttagtccatctaggattgaaaaaatgtaagtttaaaccgattttggacataggcgcaaatgtctgatgcgcaaatgtccggggcgcaaatgtccggggcgcaaatgtggggtaaccccttagttggatcataaatccaagccataattaggtaactttacttatccatatttggccatttctacctctctgtcccttgccacacagcatttgcattaatggctaaattatgcttaacaaccattacataaaattggttaaaatattttatcctttgtttttaggcaataaaatgattcaggccggtgaacaatatggaacaactaatctgatccgggagatcaattcgcggattaacacagctgaaccaatcatttttgaatatatacgaaacgaaaacagtgtcacatgcgcggatcagcctgacaattgccaagagatggtcaaagtggcaaaagcacagctgagtgtccgactgttgatctccatggccaaacaaattgtccaagaaaaaattttgcaccaaatttacaacaatccgttacaaaaagcccgactttgcaaatggtggtaccggttcaggtagggcgttttaaaggcatttgaaaacagaattaattatcgattaaagtgtccaatgtttcaaaatcataaataattaaaattaaatctaacattgttggtatcatccaatagccctaactgtcctctattagcctagaaaattctgagaaatttcgttaaggggtcagaaaactttaaaaaactggttttcgaaacattttgcgctataactttttttaaattttaaagaaatttataagaattttctaggctaatagaggacatttggagctattgaatgaaaccataatattggatttggttcagaaagaaaaaaagttcttgtccaggcccaaacatgcggggcccaattgaggtaaaccgctcgctaccttgccataatcccaatagcccttccattttgtggatatttcatttttttttctccgctttanatcgttttcaatcgtccgccactggcttaatccttacaagcagatacacagtttcggactcggctgttctctttggntgaggatggcatttgcagtgaaattcatttgggcattttgcaatattttgagaaaactgtaaatgaatttgaa

SEQ ID NO: 21308 - DNA, 2183 bp, Heterodera glycines
  unsure (1)..(2183): unsure at all n locations
aaaattcattgtatctgcaatagttgagggaaaaaatttaaaaaattaattttataaaattaaanntgcataaatttataaatcgtaaagttatttatttaataataattttttcgaaatcattnaaaatacgggcccaattatattttagagatgggtgagtagtaatgtttttaattgctattcactttgtttacatcatttttatttttgtcttgttgggtttgattgctttgcagcattttcgcgatttcctgccaaataaattcacattatgccaacattgatcaattaagatggtttttaattaaagcaaatttgcagaaaaagtaaaaaagaaaaagaaaagcaaagactccagctaaaaatggccagattttaatggacataaatagggatagaaatgcattagcgatacaaaagttttcgaaacaaaatcctacaaaagtagacacataaaaatcttaatttttttaaagtttaagtattttgaacttttaataatatttttaacttacaaaaataaattaaaaatagtagttatacaataatataaaaataattttaataaatcatatttttctgatattaaaatagaaaaaaattaactttgaagtctttcatacataatatttgttgatgggtgtgttatttagatcaaaaaaatttttatgaagaaaaaaagaaagcatgttaatttagttaacgaatgaaaacattttaaatatattaattttaaataatatcttttaacctaaaatatattaattttaaataatatcttttaacctaaaatatattaattttaaataatatcttttaacctacataaattaacactatgaaaatgtaagaaatttcttttttaatatatgaaattatcaaatatttaataaagataacttttttaaagccccagaatcaaagtcaagttgacctaaaaaaggacctaaatggtcgtacctcttttttcaaaagtgcttgtatttatcaaataattttaaaaatggaaataataaatttgttagcacagttttccaaggtgaatgtatcagaatttatgggtttattttttcatagttaaacaaattcttgaattttttcaaataaacaatttaagttcaacaaataatatttggcatttctttttaattaaattctgggaaaatacaaaaacttttcatacaaaaattactttctacatatataacaatatgcgaaaatattgcaattgtttcaatgtaatattattatcaacggtatagatgggcctatgctatttcatgtgattatttctattgtccgttaatgtgatgtggaaaattctacagttgttgaacatttacagtatgagcacttccagcattgtcgcgtacagtaacgctcgatcccacggtagcttaattggtctgtgctattaaaaatgtttacttatttaacgcaccggcttccaagagtcgtactaaaattgtcatttatttttttaatattaaatcaggatcgatcatgaattcttacgttgatcaggtggcaatgtcgatagaggtggagcaccagctaaaattttttaaatttttcaaagaattaaaatgaatttttttgggttttcagattttttgtctatgaaaaatatttgagaatatccatttttataattattaaaaattaccataaaatattccattcacttcagccgatgaaagcacatctaataaataataaaatgtaatttctatcgagtaaaattaaattaaaaaaattattttaaatttgaaattttttataaccaccagtaggaattggcgaaatgttattcgattcatttgcaggaacttaaaatttaagagtaaaaaaaatacgaaaattttgaaccatttaataaatgtccatatgattcccattcgccttcagcttgtgtcgattcaactaaaatttaaattttgtttaaaaaacaattaacagataattatatactgttcatttaaatgttacaaaatttattaaaagcttctaaataaaacaaaccatttgaaggattagcagcagaattcagatgctcatcgcttatgttttctttaaaaaagcaaaaaatttatttttttaatggtaaaatgttattttttcatttattttgaatttaaaaataaggtcatcaaataattttttttattaattttgaaacc

SEQ ID NO: 21309 - DNA, 854 bp, Heterodera glycines
ttaaagagtcgatgcggggggatggaaagtcaaatgtcccccccaggacaaaaactgtggtcggagtgcttttcccattcctccacaacagtttctttattcattggaaatttaaaatggaatataaaacccaacaacactcattcaaattttttccattttttaaatttgtcgcagtttgataagtggagaaaattatgcacgaaagcacataaattatggtcaaattttggggcgaacattttggtggggaatgaacgtgatggaattccgtccaaaagtttagcctcccaagaatttttgcacgctaatgaatatttgggggggggggagagatattccttgtttttagagaatttcagagttcaaagtttccctcaatttgaaaactgtcgatttcagcaaatgccatccgcttccgctgggacggttagcgtcagcaatggcaccaaggccaatggaaaccaaccgaacaaacacatgcaaatgttggctatggccggcccggctccgttcagcgactcgccggaggcgattgccattcgcgacgcggtcgactacacgcaaaagatcacgctggaaatggcatacaacaacacgggtgagcactcggcactgtccgcaatgactcaaataggaggagcctggggttattgatttggaagcggaacctgggctttaaatcatttaaatttacaaaattgaattaaaaaccaataaaaatgatgctgtattattcccctacaaattaaatgcatttgtatgctctggttcaattgtttgaccttcattaaaattagcattttctataaaccagaaccagagttttctcggctttatgattcatccatttt

SEQ ID NO: 21310 - DNA, 1975 bp, Heterodera glycines
  unsure (1)..(1975): unsure at all n locations
aaaaaaaaattccatgatgacgacttttggcaacgcaaggacccttcttttttttacgaaatttttatttaaaaatagatttaaaaaaattcggtctaacattaagcaaaaaagatcatcagaattccctccaatacaaaatcccggggaccgtccaaaagtgaacgagaaaattaaggcaatattttgcataaataaatataaccaaagagagttttttcaacatttataggcctcaaaataccagctgcagaacaaatttgccgcgatcagacagaagggagccaaaatgctgaaggaatggacggaccgatcggacgaatttattcgaaacttcaccagcacgttcaacagcgacggaccggtcattgccaatttgttaaataaaatagtaaatgttttttcaattttcagattggccgttttctgagcagtcgcagtccgacgccggcattggaggagcaggaagaagcggcggcatcggacgacgacgaagacgaagaacacaacgaagcttaattgattcaccaacaaaaaaggtgcttaattgatcatatcaactaaccaaagaggatgagaaatgaatgatattatattatgttatcatattgtccttttgtgattttcttacaatgattgtgccttggcttgatattatgaaagagtaaagttatgataaatttttgaaggattttccgaattgtgattaaaaattgatcgccacacattttttggctttgttctgcagttggttaccatgaaaatatgctctgtaacaaaattataaggtcaagaatttttttggcacttcttaaaataattcggagatgaattttttgataaaatttttcatttcttaggggtctgaaattgaacttttattcacccattatccgacgcgaatattaaagttgcttgaataagcaaaattttattttacaaagtttgaaaatttacttttattatgcaattttttaatacacatattctctgatgatcaatacaataataatataatatactctgctcacaatcagaatttgttctctccaaatccgtttcttaaattggcatttgcctttttctgctttggcataaatggcatatatttgagcaacggaatggcctcaacggttcgctgaagtgggcccgggaaggcgtaaacatctgttgaaaattgtatcaaaattaaattttattttttaaatttatgccgaccccgtccatcggctgacaattcccacacgacgcccctctcgcgaaggccccgctgctgacgcgtggcaccgcccaccgtattgtcaagcacaaagggaacgaaccgacgaacattgttgtggtcaggccggaaacgatgaattcgggccaatgtactgtttaatgaagtcaaggcattaaattcatgatcagagaacccaagcttgaccaaacccattaattttaaaatttccgcactcaccgaacggaattgtttgcaattggtgttcagtacacaaatcctccacctcggtctgatcgaacacattttcaaatgtaatggataagcttgagaatatgagtgaatgaatttggcgctttttgttgttttttanaatcttggtgtgcgacctcaaaacaggaaataatatatttaggtaatttgcaagagtagaaaaaacaaacggcgcgcttcgagagtgaataaaggcatccgagaaatgagagagagtgtttaaaattgcataatgcaatgcttntatactatgagtctagtacacaaagacattcgtatccattaattgcatccgntggtaaccttttttcggtcattttcttgggaataattgattttgactttcattcccttccttttaataaataaaactgattatgtaaactttccaacagccaccccccttccctcccttcccaacaaacataatttttttttttttttttcccccccaacaaaaaaaaaaaaaaaaaaaaaaaaaaa

SEQ ID NO: 21311 - DNA, 1475 bp, Heterodera glycines
gattcgggtctccccataaatctgggcgcatcggctcggggggactgccccgaaaacaaaaaaatcgattttttcaagtgtccgtttggggtactcaaacaattatggggagcaaaaatccaacgcagaattaaagtacaggctatagggaagctattccggaaggattcggtctccccataaatctgggcgcatcggctcggggggactgccccgaaaacaaaaaaatcgattttttcaagtgtccgtttggggtactcaaacaattatggggagcaaaaatccaacgcagaattaaagtacaggctatagggaagctattcccgaaggattcggtctccccataactctgggcgcatcggttcggggggactgccccgaaaacaaaaaaatcgattttttcaagtgtccgtttggggtactcaatcaattatggggagcaaaaatccaccgcagaattaaagtacaggctatagggaagctattcccgaaggattcggtctccccatgaatggggggggggacacgacctggagaccttcttttttttttgctatttaaccaattactttttttccactgctgggtaacaactgcacttttttttcactaaaaatgaccaaattttggccgttttaaggaaaaaaacttgtaaaaatagtggaaaatgtaggtccggcggtgccgataggcgccgccggaaaaatttttttggaaatttgagtgctacttgttacgaaatttgcctattaaactttttaattttcgtttggggggggggaattcgaaaaaaatttccattatttgctggaaaatttttaaaaatttcaaaaaattccacaaatctaaaaataccttaattttcctcaaaaatctgtggccaaccccacctttgtccttcttccatttgtccaagtgttcaggcttcagcacgcgcatgtacacgtgcatttcggtgaacaacggcccattggacggcggctccattttgatggccacggcatgacgagaaccgctctgaatttacagaaaattgagacaaatatatttgaaaaaatctatgaatttcagtgccattaatgggaacatttttcttttgccaataataggtacaaaaagtagaatgataatcctttccatggaatcgaattgaataacgacctcacctgaacgccctcgtatatccgtccgaatccgccctgtccaatctctttgcccacaacgaactcctgcttccgaccgtccacaaatttggtgccacttttgacaagcactgctttgtcgtgcaaccgtggcacttttcttgcgggtgccatttttcttgtacaaatagaatttggcacaaaaaggtaacaaacttttttaaatatttaaaaggaaatatccccaatgataaaaacatatttcaaaaatttgtttagcattgtgacaacatttattgaatgattgaatttggaataaagaaagataaaaac

SEQ ID NO: 21312 - DNA, 1804 bp, Heterodera glycines
  unsure (1)..(1804): unsure at all n locations
agggnncggaccccgngggcggggggggcttnccacgggggcgggggaaggcgggggacagagncgcgggggcggggacgggggcacgaaaannccgccccagcgggggcgggggcgggggtttgatttgaattaactccaaaaattttacaaaaaattaattttttatgaatgatgtgatggctccacattcctttagtcaatgtatcgcctcaattcaattctctttggcataaattaccttagattttgtctaaagaattaccaaattttagagatttttggctaattttttaagaaaaaataggtttttggggggcccgcggtgccgataggccgccaggcagattttgaaatttaagctcgatttctaacagatgtttacaaaaaaaataaaatttttacgataaatttttgtttttttaatatattaaattatcatgatttactcaagcaaaattggaactcagatttgtaacatattttcttgtggcacatttttccaaaaaaaaaacttggtgaatgtgcgagcgtagaggtccggcggtgcagataggcgccgccgggaaaattttttgaaaactgatggatctgttaatagattttgtccaaaaaatgataggtttttgcaatttttagagaatttttttaataagatttacgaatttttgggccctgccatgccgataggcagcgccaggcgaattttaaaattaaaaaaaaataaattaaaaaagaaaccgtcaacctgaatcgaactcacgacagaaagtaatgtcaaggttgattcactaaccactacaccacactacacatcaatgaccaataataaaattaactttaattcataaaaaatttgtcgaaatggttaaaaaaatcaaaattgtataaattttttgccttttatccatgaatatgtcattcttaggggtgtattttcacccccgtgcccccgcgggggcgaaggtcgcgggggcgggggatgcgggggtcagagtcacgggggcggggacgggggtgagccccaaaaacctgtcccgcccccggggacgggggcgggggcggggtccgaaccctactttaaatgtttgtttctttctaattccctttaaaaatgtaaatggtatgcaatggctcgaagatacgcaagcggctcgtgatcgtcaaactgttcgacaattgctcttagattgttatcctgtcgaactggtggtcaaattcgatgttcaaaagtgttcgcaaaaatttctgttaaactccctcccactttccatgtatttttaaaccagggcttccaccatgaacaccaagccagaaaaataagattttaggctcaaaaatatgaacaatttttttaaatcagttagtattaaattttatatttttagtctcccattataatttttaacaattttgggaggaaataagcaaatcgtacatttaaatacaatcggctcaaaaaattagaaaaaatgagggcacacctatgcgaatttatgaaaatattttttatttatcttatggtattcgagagtctcagtgtcatctctcggtcttgagattcgcgaatttccgataccgaaaagcacttaataaattgaaacttaatgagcacttaataaattgaaacttaatgagcacctaataaattgaaacttcatgagaaatttcataaaacaattatgggtactgaagattgaaactccatttttggaaaagttttaaagaaacaattttcatttgcttctcattncatacaaaaagtaactttacctaacaaccaccaaagaaaacaccttgtttt

SEQ ID NO: 21313 - DNA, 1282 bp, Heterodera glycines
cgagaggacgagaggcgagagtttttcaattttctctgcattcttgtttttaatttaaaaaacttcaaaatcgtatattaaattaggggtacgggcctgggtatttgggcaaataccgggtcagggtattgccgggtacagaaagccgggtcagagtcctagtttttaaaccgagtccaagtcatgaaaaatccaaacaaaaatctttaaaattttttcatgaaaattaaaaaatattttcatgaaatatatttattttagaaacaaactttattatttgtccattttttccaccttttttttgcggtgcgttttttaaaacttcggggacagttggggtcgggcggtgccggtaggcgccgccgaaaaaattttgaaaattgtcttcggatttgttaacagattttattcaaaaaatgaccaaaacttgttttttaaattttttgtttttaagtcgctttttttgtggcgctgtttttccaaaaaaaaattttttggaacattgggtgcggggtccggcggtgccgaatcggcaccgccgataggcgccgccggaaaaattctaaaattttgagtgtaatatattaacagaacttgtcaaaaaatgatcaaagttttggttaaatttgcagttttaggctgtttaaaaaaagaaaaaataataatttttaaattgaaatattttttattaattaaaatttcaattgaaaataatttaaagaaattattaaaaaaattctgtaccgttggggaattgaacccaagagaaaaataatgaaaggcagaaggtttagccagcagaccatatttgaattggagctatccaaaaatagagaaaacattaaggaaggaaagaaagagatttaagatttttttttcgcgtaaatttgaaaatttttctggctgctcaaaagttcaatctttaggggtgtattttcaactctcgcctctcgtcccaaaaaacgagaggcgagagacgagaggcgagagtaccaaaaatggcgagagttggcgagaggcgagagacgagaggcgagagttgtcccacccctgctccacatgtattcatcgaataactaggcaataagttctacaattcaatcatgcccttagcaatatctgcaaaaaaaaatatttttttttaattttcgaaaaatgccgtccgtatccgggtcgggttcggggttcgaaactgagtcaaaacatggccggattcgtgctcggcgcctcagattactcctaaaaacaattttctcaaatttttgtaaaaaaaaattttcgg

SEQ ID NO: 21314 - DNA, 732 bp, Heterodera glycines
ataccaatttatgaatggattagtgcacagttaggctccgtttcctatgaatattatgccaaaaagcggctttaccaaaaacaatcgaacaaattttatttatttttcctttttatttttttatttgattttattatcttttaatttttataaccattttattggagacttcaacagtttttttttgaggtttccgtttttcccacctaatcacacaaagatgttactggccaagattttattaatggtcgtatcgtttttctattgctttaaaatcagcgataattgttgatcctgaaaaagccataaaatccgtcatttttttaaattttataaattatccaaaaacaattttgaaaattttataatagagttttctcaatcggcttctcattcataaagccatacaatcccggatggcttagcttttcttctcaatccaattcattctcttctgttccattttggcatttctgtttgtacacacacacattatatttattattttttttaatgacaatgccttagagccgcttaactaattggcaaaagactttatcaaaaaaaaggaaaatttccaagcaaatttgatcttgacaagattatatctcgtagttggagagggggggggggatatccccaatcccctcaccagcacccaccgcttagctttcttgccacggggaaagacttaacaaaacggccaaaaattgttatcccgattcggggggg

SEQ ID NO: 21315 - DNA, 1539 bp, Heterodera glycines
  unsure (1)..(1539): unsure at all n locations
atggcatttttgtcgggagaaaaatgcgcagcatttccaaaagtaataccattagcaaacagcagcccaaggacgtgnacttttggaataaaagcgatngtataagggagggagttactattgagcttgttttaaggtccgcggatgaggtgacatccaatccgctcccacagaattaattgtgtgaggtgctgctgcttaatgggcggccgccggggccgtatggatttgcatgggaaatttattgttttttattattattcagaattaatatgtcgcgaaaatatttggcacaaaattggcccaacatttggcctcgcacttgtgtcctttttcccttcaaacaatttttgttttgaaatttttgagtgtttttcaaatgattaggaggcattaaaaattgggagcacgacaaaacggctttctttctttctcaaaaccaaactttaaataatataatgcaattaatttttgtcgcgaaagaaaaaatccggtaagcttttgtcgtgctatgaatttttaaggccccctaatcatttgaaaaatccttaaattttcaaaataaaaattgcttgagggcaaaaagaacataaacgctgcaatcaagtggtttgagttaggcttggtgtacttgaatttgaaaacaaataccaaaaaaattaggcattaattgattaaaatgaaacaattttttaaattttcatttcattaatttgttttcgacttttacataaaatttcggaaatggtttcaaaaacttttcttcattttaccgtatgacgttcttctgctgtttgcccttttttcctcccaagaaatttaatttttgttacgatattttcaatctcttccaatcggtttagaggcggataggacgctttggcttaagttatcttctgctccccccccccatatccgatgatgaaaaaaacagaaaaatattgtaaacttatttgaaataaatggtgaatttttaaaattggttattaaataaattatgtttaattctagtgccaaaaaacaattattggaccaattttgggaaaaaatccattatttttttggaaaaaaaaaagattttaggctattaattttactcaactaaccaaccaaagaatttgctaagccttttcttataagtctataagcaactttttccgcgcataagcacaacacatgacgcaatgccctattagcctgaccaattttggcactttttgatgctgttggcactcaccattttctgtctttttggctttttggcgatagaggcgggcccactgcatacagtatacctttcgatcctgaaaaaaagggggggggagcaccggcagcagcgggtcggattgtaatgtgctgggagcgcccccagcgccacaaagatgataatatttgctcatcccccggaagaggggagtggttaaaaaggtatcccatccatcccaaatgcatcacaccaggccctaagggttttgggggataggataggatattgggcgaatggggtcccacggcgacgaatcgctttaaatatgggca

SEQ ID NO: 21316 - DNA, 2390 bp, Heterodera glycines
taagcattttgattttgcatttctcatcaactcggccatattttattggtctgatcacttttgttttttcattcactcttcaatcaccgccgcataagcattcgcattcgatcatttcatagttcggtttcatattccgatcactttagcccttttatttggcgttccttaacgtttatgatcattgcgcactcatgagtggggagggggaaacacagtgcacccgttaaagcgttttgattttgcattctgatcaacccggccattttttattggtctgatcacttgttatttcattcactcttcaatcactgctgcaataagcattcacattcgatcacttcagagttcggggagaacacagtgcacctttttttacacgatcactttagggtcttttgcatttctgatccttttactctgtattcgtttcctatgtttattttgcatttctccgtatcattaatacagtttaagcaaaaaagtgttgaattttccagcttaaatttttgccgtaccaattttttacaatgtaaaaacctgtgcgtcgagttcttttgtttggtaaattgggttgtcgagacaatagaaatatttctcgtcgtctttgaatagacttgaatcaggattccgagtctgtatccgggtcctttcctcatcggcccggattcgtgccgcgcttagcctgcacgcctcatcataatcctcgtcattgtcgaacgagtcatccgtaattgggtttttggattatttttcgagacgatttcctgcaagattatttttttataaaacagtttttttatttatttaaagggctaccgtatttcatgatttatttaagaaaaattcagagttattcttggtaatttgtagtattattaaggctacaccctaatttgagttttcgcctacaaagtagggattttttgttgctttgcccctatttttttaaattcattttagctttttaaaaattcctaataatattgaaatactatataaaccaacagtaatgattaatgatgcaattttagtctctaaaaaccgacaaaaaaggtaggttttatgtcctaaataacccctaaaacgggggcgggggtttgtttttaattagctccaaaaaatctcacaaaaaattattttttttgaatgatgtgtttggctccacattcctttattcgatgtatcgcctcgattcaattcttttttggtatacttgcacagatattgtctaaaaatgaccaaatttaaggattataaattatgtcagaatagtcaatttttatgtatgtttttgtctaaatccagggtttctatttcaaaattttcaaaataagaataaaggcgaaaaaataagactatggttaaaaacaagaacattttgcaaaattgtttcaaatatttttacattttattcaaccaaaaatgtattctattattatatctttcatatatttcagtgcattcgggatcactaaatcagatttttaacattttttgccgcacatttccgaaaaacttggtgaatgtgcgaggggagaggtccggtggtgccgattggcgccgcaagcggaaaatttttaagactttataagaattttgttagaaattagccaaattttttagaaatttccctttttagatgaaaataaggtacaaccccaaaaccagaacatttcttagaaataacaacatagaaaaaccctgtattatttggaaaaaaaaataaaatcaaaagaaaacgttaaccggtgtcgaactcataacaaaaagtattgttaatgttgaagcactaaccactaaaccacaaatattttaaaaatatacgcaaatttattttatttcataaaaatttgtaaaagatggttaaaaaattcaaaattgtataattttttgcctttaattccacaatatgccattcttaggggttaaaaaattcaaaattgtataattttttgcctttaattccacaatatgccattcttatacgaaaaacgaacacgaaacgccttaaaacaacaaccctggtgtgtacataaatctgcacatttctgttctgtcatacaaaattaagtattaagcagctattttaattattaaagtttttaatcgatatatttaatcttttttttttaattaaaattgatttccatcaaattaaagaaaataattttttgaaataaaaatgacgaattttaaaatcctcttccacctcctgtccagggatgtacaaacaatatatcgatctatatctatctgtttgtgagctatatctgagatggttataaatcactgcagcagctgatatacacatagtaaaacgaatgtttgtttgtttatttgttcgggccgtccgtcgatgattaattgggggggggggctttttgggg

SEQ ID NO: 21317 - DNA, 3293 bp, Heterodera glycines
  unsure (1)..(3293): unsure at all n locations
taaaaatgcaaaaatgccaaaatatgcatttattctcgaaaacccccaaaaatatgcttttatatgcactaaaaaccttcaccaaatcaaaaaatttacngcagaaatgctatttttgagcncctttcttcatagcatatgagcagaaaaaaaatgcaaaatcatacaacttataaccctagtaattgtgcgggcgaaaataataaaaaaaatcagatttactgggagtttattacatatttcagaatttatagcacataaaaatccaagttctcttcttataaggctcactattatagaccaacaaaattttaaaaaaagtaataacaatcctcgagcagcccataattaattaataagatatttattagggtttttaaaatgaattttttttaatagaaatttatatggaatacacaatttctacggaataaaatttacatgttttacttgggcgaatttaactcgtcaaatcccaatgctcccggtgctggtttattcttgcgaggaatactgaaatcaaatttgccacaactcgatgacacacatgtgtaagttgaaatccgtgagcgaatattaaagtttttactaatttttttctgcggctttaattcaatgaaaaaagtgcataaaaatacatttttagcgcgaaaatgcttaaatgcccctatccgtcccaaggaatccctattttgaacattttggccctaagtaagggcgtgcctatttcggcaccttttggaatttcgcccttatttcggcattttttaaaaatttattactaaaaaggcaataaaaaagcacccataagggcctgcctgttgacctcttgaatttttcaaaattttgttaaaagtaacaaaaattttctgatttttaaaaataacgtaaaaatgaaaaaattaaccgaaaagtcgaattttcggaaagaaaactttttttctttttattcaggaaaaagatgagatttaattcttttgtaattaaaaatcgtgatttagggttcgggaaaagggatttaaatttcgggaaccgggattttcaattcgtgaacgtgctttgtaattggggatttagagttcaggaactgggattttgaattcgggaaacagaatccttagaaatgccgctattaacccaataataactttattgattcattaattgaggtatcgaatgacattatcaaagccccctttggtgtctttgccttacatgtccgacaaattgctcccatttgtgcccaagtcggcaatatattcgcaactttttgtttcaaatcaaacacaaaatgagtggcacgaggacacattccgtctaaaactgaatctagaaggctgtaagcatctgtggaaaacaaagcaaccgcaaatgatgtttaaaattgagaaggtaaaaaaaatatggcataccatttttttgaaaaaccttttttggcgttacttgcaaaatttgtatcttcggaattttattaaagggatacaatttttggtgctaaaattgacaaaacagtaagttttaggttctaaaaatacctaaaaaggtgctaaaatttgagacacataattatataatttaaaattcttgtcaaaaaaattaaataaattttgaagatgaatttttgagaaaatttttcatttcttcggagtaattttttcttttgaccatttattatataccccaaacccgaactttagcaaagtctaaaattcaaatttctcgttttcatttcataaatttacggcttattttaaataatttttcatatttttaagttaattttttaaggtgttgttagcggaatgtcccttctgtctacagtatacggatgacgaagataaattaccacatcgattaaaagcgtgcaacgtaaaaatttttcataatgaacactgaactttttcaaattattaaagaatttagctggcttcttttaaaacaactaaagccgagtcgccttttaaagcatatttttacaactgaagcacacagattaatctgtgacctgggtttcaaaatacaaatctagagaaaattaatccttttaaaatctaagcttaccaaaaacagcctgggtctcgatgcagaaaaaatctcatgtgtggatcctgccagatccagtgtcgatctgtaaccactaaaaggtaactcaaccagtgagacttgaatccaccgcatttcgctatcacaaaatcattaaacttaaataatatttttttatttttagcattttgttcacgatagttgtcttcaaaaaaggtgagtttatgtgagcaggagtgttgaatgtcatgcgtagctcagttggttagagaatccacgggttggaagggtcgtgggttcgttttccaccgcgagtcaatattttatccagcttcatcattacaccaatatgacaagaaggattgtgcactaacggattgtccacttattgtttatatactacggattctccttcactgatggattatccaccaacggattgtccatttatggtttatccactaacggatttgtccatcactgacggattgttcactcatggtttatccactaacggattgtccactgatggtttgtccactgacagattgtcttgaagccccaaaaaacctcgagaacgttcttagcagttttataccatcgcgctcctcacaaaccagtttttttttatttaagtattaaaacaacggataacaagatatgtccagtgtgtcgtgaagacattctgtttctggaatccggtaaaaaagaccaaccagcgcagaccaacaccataaaaaaagtggtatatcggaagatgaaaaaggaaacggttcacgaatttgtcatcagacagccggtcctccaaaatggcgaaggcggtatccgttttacgtacgaattagagctggatgaaaatggcaaaattagtgaaaagaatgtcaatgaccagtcattgaaagtggttgacgaaagagcggtaattatgtttatataatttttaatttaattttaatcattagtaaaatggcattgagtttaaaaaaatttatggactgattcatgatttattgcatttagtgaccatactattaaaaaaaattctaaattaatattttgatagagaacacttagagctatttaatgatatttggttgaatttgagccaatttatgaatttatatgtcttacaatttttgttttcgaaccccttggcggatttaagatatgcccatagtggcggaatctaagaaacaacctaacaccatacatttgtatcagggatgggcctaaattgaaaaataaaaagc

SEQ ID NO: 21318 - DNA, 2559 bp, Heterodera glycines
tttcagttgggtttgtaccgatgtttggatggacattttccgcttttttgaccattctcaactcatcctcaaattggcactgatttcgccccgtttcaatgcgctggtggacacgcattttaatggcagggaattcacagtttggagatgtataacaattgagcaggacactgaggcgaaagtgtcaaaacttcgtgcatttattaatggcaaatttgtgcaatttccattgcctgaccgtccgctgcccaacaaaattcgctttaatgaccttcgaatttggtaatccaaatgcaagcattattaaccgttaaaagcatttcgcgaacaaaaagggcgttataaaaatgccatcaaatgaaaatctttaataaataattatccataagctagctctaaagtaacttaattttaattattattgatttcattcgatagcccaaagtgttttatttcaaaatatttcgttaagtttcaaaattatggccaaacatatttgaaaggttccttgagtacttttggccatgaccttgtccaaacttgacgaaattttttggacttgtgcagaaacatttattgttagtgctatcgaatgatatcaaaaacaattacaaatttagttgcttttgagcaaagttatcggtaatttgtttattaaaaattttcatttgatcctttttaattccttttcagttacattgaccactttgtgctcacttttctcctctccaatgagcacatttggaacaaaaggggcatttctttaaattttcatatattttcacataatgccgatgtcaaacagcaaatttggaatgtttttgccgggcaaatttggcccatttttggagcaaacattcgccagttgatcatttcaagtggcgatttgtacaatttgcatcgtctcatttcgtcaacacttctcaccgatctcaacaagctcagtaccataatttccggttgtctattgcccgacctgcttgatgatgatgggccaaatgcaactgttggccaagcgttggccaaatggttgcacactccgacaaaagatgggcaatcgaagctatttacttacctaaatgatcaactagaaaatttcgactgggtcaacgatttaaaagaagtgtgactaaatttttataaaattttggattgaatgccatttgatttttcgtttctcattgtttagacatttctccgtaccatcacttccgccagctacaaaattcaatttaaaatacggcgttaattgtgccatttgaattggtgaacgaacaaacgcacgaaaagctgacactaaagaaagcaaaggaaagtcaatgggacaaccgatggataattaagcgatgcccaattagagagacggcggcgattaattgggaatacaaaaattgcgaggatttgaacaaaatcatcttttatttgtgtggtgaccataattgccttgggtgagcagctcggcaattgccattgctttaacgaattacaaattttgcacatattttaggccattgcgccctccaccggtagacgaagaagcggatcaaagcaacacaaaagctcttttgagtgccgggccaagcaatcagtgaaaaaagtgaatgcgaaattattgtttcatgagaaatcaggggcagtcacattgatttttggttaatttattgatataattttgattcgaagagatttgccaaattaaaggggccctcagactttgaaagcctcctgacaaataagctgaggccaagtctaacagtggaacctcacgaactgtaatttggtattattggatagaacagggtcgacttctctgttgtgaatttttaatattatcgttgtgtgaaaaaactaaaaagatatgggatttcaaaaaattttaattttttaaccttcttatagattaaatggctcacctaaacacccaaaatcaagtggaaaatcgtttttcgtgcttatctatgtgtaatcaagtgcacagaaatttttagcatttccataaaatgagagccctagtggttaaatataaattgttttgttagattaagggtacacatttttttaaattttaaaatacaaaaatcaaaatatttttttgctaattttcaattttttataaagtgctcaagtttttctagcaatatttatattttgaaaatttaaaattggcgcaggaattgtccattttgtacaagctgtgtcatagcatggccaatgtgctagcgaaacacatccatcaacgttcagacgagcttttcgttgctctcatccaacataggcctaattatgcaatttggtttcaattagccatttttgacaaaatgaaaatgtgctttgctcacccaatgccacgtacaaattaaaggacgacactgttcaaatggtccgccaaatttcgtttttccgcataatcgccttctccacaaaattgggcatcgcgtgataagaaattttgttatacctcttgcacacgtggttgtacgtacctcttccaaccgtggttgtaccacttccgccatggttctacctctaccactcgtgattgtccctcttcccgttgta

SEQ ID NO: 21319 - DNA, 2326 bp, Heterodera glycines
  unsure (1)..(2326): unsure at all n locations
tttccgcggcgctgttgccgancagcatgcgtaccatgcgcggatcttgcgnagcattgccaataaatgttttgtacccaggcggtgccttctccggttggggctcagcaaaatgaaaagtgagtaacgcatccaaatcgctgttctgnatcggacggtacgcgccttgcatcagccggtacacctgctgtccatctccgatgcccagcgtgcccgcgttgcgtaacgcatagtcaatggcttgtcgtttccgctgctctgtgtcacgtaagactgctgctggtactgcagttgctgtcgatgttgatggatgcagttgcacgtccgcttctttccgctgtcctttccttgcggggtcaactgccgccacattttggggtcggtcgtcgttggagctgtcttcgcgctcagtcgtctcagctcctccttttcctccattatcagtgcgtgtcaacaatgagacggcagatgacgatgacgggaagcggctagcttcggcgccatccgtagaggctgatgtcgtacggtgtgtccttttggctggtcgttgtctgcgacgtggaggctgcctcattggtgacgaatcagactgcgacgactgctgttgttgttggtgcggcgccggctgtcttggttgaggttgttgttgttgaattgttcgcgccgcctcggaaagtgcatcgcgcagcagccccttcgaggcttcgtcggtgggcagttgggtgagacgaacaggcgctggacgctcctgctcatcctccagcaattttttgaacctcttgaactcctgttggtagtggatcaaccgttcgtcatcgttcagaaggtgttgtttcgatgccggagatacgccatccgtgctctgggtgacgccgccgctgtgtgcagcgcgcgccatgcgctttgccgtgtgctcaattggcgtcatatgctgcggtaagccgcccctcgcagaggatgcgtcggcaacaggagccgagctcctggccaacaaggagcggtacagttcctccggcactaacagcatgcgggttgtgtgcttcatgtttggatgatgctgtctttgcggctcatgagcttatccgccagcagtggaagcacaacgctggccaccaagccagccaaggccgggacgccgcgcccggtctgctgtctcagcaacagtcgacgtgccccgtgtccgcttctcgcacggcccaacgcacgcacgtgttgggcctgagcgcgcaagtgcttcagatgagtgctcctgagcgggacacgtgcacggagaatatttaacgcactttccaccagacacaacaactgctcactgctcgccccactcaccagctgacgataggcacgtgcgcgtgccgagcgacagttgctcagctgcttgaaaaagctggtgttttgttgaatgcattgacttggtgttggcccttttttcttcgcttgcttttgttgttgttgttgatgctgttgttgtctcttttctagttgtattgtttctggtctgtcagtgttgctgttaccgttgttgtttccactcttatgcttcttccgcattgaacattgctgcccggtctcgtggtgcgtacacaacggtcagctcgcccggatatatatgagctttgaggcgcatctgtggccgggtggtcgggtgcatgtccaccaacagataaccaaacgggtccactgtcgcgtcatcgtaagcctcgaggaagtggcggagctcacccgggaacagctgaacgcccaacgagcgtacctgaagtgcgcccgacggattgcgcagcagcaccagatagtgcgcattgttgcgtgcaatgcgcagctcgcggacgaacaaatgctgcgtgatcaataccacactgacgccccagttgtgtgagccacgtgtgaacaacgtgtccaggaagggagcgcgcatgccaaccatcagatcgtccaacaccagcagcagtcgaccattgcactcgtttgccgcccgcttcactccctcctcgtcaggcagcgcgtggcagacacgaacccatcgaccactattaccaccactgctgctgctgttgctgctgctttttttgacaccattagttgatgttaatctaaaatcctcatttttcattctcctcctttgaccaacttctttatatatgctctcaaatttaatatcacattttttgacaatttttgagccacacatatttaatataaataagtttttatgttgaaactatttattgtttattctctaattatttttatcatggacacgccgtcacatgtatctgatcgcaaggccggcgatggtggtgggtaatgctgatgcaccggcagcatg

SEQ ID NO: 21320 - DNA, 2074 bp, Heterodera glycines
cattattgctcacattttttttcttccaactcatcctcttttcttcgtccgtccgtcccatcattttttttttgtttgtcacgtgtgtgttcttctcgtgtgcataaaaattggtccattcgtgttttatagtggtgagcttttttcggcattgaatgtgatggtctcccgccccccccccctccgcctgcggggataaaaatggcccatccccgcctaaaaatgtggaaatatctgcaggcagcagaggcgcgtttcctatttaattttggatcaactcacgtcccccctcgacttgattgcttgctcgatttttgcgcaatattgaatgcaaaaattctgttttcaattgcataattaaatctcgagtaagaaaatcgagtatgccacactcgattttagcattctgtttaaattaaatctcgagtaaagaaatctagagtgccccactcgattttggcatcatcgagtcgtaattttctattataatcaattcattaagtcgaggaattgatccggaatgaaaaatacacccagtccatccaccactgagctgtgatgatgacaaattgagcatttaaaagcggtgactcttgaacagagagagagtgacgtcatgcatttgtgggataatttattcaattaaacgggagactcaccgccgctttccccgtttcttttcgtgttaggaatgactcacgcactaattaggtcaataatttaattacataaaaaaatgctcccctttgattgaccgattttgataattttttctccttttttctatgcgcgccgcatctcattcaatgaaaaattcttggatttttttcctcattatttttgtaatgctaacaatataattttacatattaaggatggagttccgaggccctaaaaaaatttagaaagtcgaaatttgaaagtgtttcaagaacaggaaaaattatatgggcctcaatttcttaatttatcatattaagaaaggagttccgaggccctaaccctaaaaaaatttcgaaaaccggatcgaaatttgaaagtggtaggcctcaatttctcaatttattggatttcttttttaattcccggcttattatcctacacaaccaaagaaagcatcatcctgttattagccaaattagatttcaaattatcccccccccctccgcccccgctttttgtgctttttgcgtaacattttgtaaattagcgcatttccaatcaccacccaacagcagcgaaaacgaagcgcgcccgcggcctcaagcgacgactttcattattttcatctcgcgcatcaacaggcacagagcattcattcattaattaatcaacaaattttcgccaattcatcaggatgtgttgatgcagcaaacacaacacattcattaatccattgtgtatgtattatttgttattcatgcgtgtgaatcattcattcatgtatttattgcattaataaaatatttttgcttactcatgaattttttttactctttttctctgttttgtactctttttctcatctacatctccgctctctctctctactctctctctctctctctctcactctcccgtccgtttgaaattttctctgtttctctcaccatttaaaattaaaaatgaatcattttcattaaaaaacagtctgaaaatttcagtgtctctctctctctctctctctctgttttctctacgtgttcaaaaagctgaacatgaatttttttttcgcatttttctttaccgctctcttcattttttccattctctcattcctttgttttctcttctttgtggagtcattccgtcctaaaaatatacacgaccaatccaaaaaaataccaaacaatgaaaatgaatgagctgttggctccgtcggaaatttccgcccccccccccttcgacgaggttcccctgacaacacacacaaatcgactcactcacttcaacataacaatgtcataaaaaaaatttaaaagcccatttttcgcgccatttttgtattgttcgctgtttttttgtttgtggcattccgcccaaataatttaattagccattttttacggtgggg

SEQ ID NO: 21321 - DNA, 2099 bp, Heterodera glycines
acaaatgggttgtgctttatacacacttaatatacatataattagatggctaattagataacaaaatacattcatatacaaagtgtaaaaggcgtataggggaagagaaagaaacagagaaataatcagctcactcatttaatttaacacctgaaaatttattaaaatttgttggatgcaattaaaaggagatttgttaaaattttattggttttaataaagcataaatttacaaaaacagtgattaaatttatttgttgtcagcgtgagatttaaaaaaagaaacattaaatggcagtaataaaaaagacagacgcataaacaaaagaatgaatgggaattgattgtcctgtgaaggttttgtcgttgcattaaaatgaaatgcatttttagcacattaaacacaaacaaataaacataagcgataataatcttaaaaagcgaaatgcaaaaaacaaatatcaaaaagtcattaattaattaattgtcgtcaaaatcgttttgagtgttcgtctccatccttccgctggctcagtcctccaagtccgtctcgcggatgggccggcagcgctcgtgttggaaaatggcgtgcgcctcgcgcagcagaaaggcaccgaactcggcgatttgtttgcgcgaccaacgcgaggcgagcccagggaacgagccacgcaccacgttggtcagattgtcaacacctttttgaggggtggcatcaataatatggcaatttgatagttttgccaatagacggggatttggtcccggtatttccgttcccgatatttgtgggacggatcgatcagcaaatagcagaaaaaggacacctaaataggagggacatataaatgggtaataattgccattaaaatgcaaatgagccaatagaatgtggattttaattggtccgatttttgtaagacaaataaatatctaattgtaatttgacactcgaatacgcaattcccagtggacattcttttatgtcatttagtgtctccacaagtcgtgagtcactttttgtttcatatttctacatgattttgaccaatacctctaataaacgattttccagaaattttggagaataacggaaaagtgtggcggttatcgaatgacactaaaataaaattaaaaaccatttttgaaaacccatatttatagttgaaacaagtgaacaaagaggcgaagtcgatgctttgcaaccccctttgtcattagttaattaattgttaattacccaatcaaccactggggagtacggtaaatgtccctcatcactcactaattcccctccgccccaccccaaccacctcctttttggtgggctgcgagtgggcgtattccgtgcgaatttgtgcctcctcccttctgccaatgcgctgactctccgccgcattgccccgttcttcggcgaccaccaaacgctgcagagaatggctgtactctgaacagcagaggaagagacgacgagttaatgccacgcaaaccgaaaccgtagtaattaatgactgacaaatgaacgccctccccaaaaattgaaaaaagacggaacgagtcatttttgggtgcattcattcccctcacccggattttttaaaaaatttaaatttcaaaagaaaaacggcattgaatttgtaggaaaaagggtgctagagcgagagagagagttacttttcccaaatcattggcattgacactcggataaaatacaaaatttcattgatttccaattaaaaattcccgccccttttgttacgttttattgcgtttgggtccctcttctgctgctgttgtcctccttttccgtgccatggcggtgtctccaaatgggccaatttggcctcgtaaatgcgtcggttgcccgcattcattggccccgcaatgcaattgcggcggcgcaaccgctcgcgcagttcgtccagccgaagcatggcgaattggtgccgaagtgcgtccaacacagcctcgtcagagtggcgttgtacaacatcatcgtcatcaccatcatcagcatcgcttggctcaccatcactctataaactcggaaaattcttaaaggttggaaccgcttttccgtatcagataaatttatttag

SEQ ID NO: 21322 - DNA, 2648 bp, Heterodera glycines
ttcccaaattcattttcagttggtctgccatgtttcttctgttggtcggttgtggcaccattctttggttcttttttggacttttcaaaaaacgacgactccctcacaaaaaaatgtaagaaattcaataaaaaaatttgagaatttcataaattcttcaatttttcagttttatctgcagcgattgttggcttttggtgttcgattttcttgcgccttctcagctcggcctcgaaattgcacttatcagccatcgctttgacttttacgtcgacgaacacttcaagacatgcaaatggaaattgaacaaacaatttcttattcaatgggacattgaagaaaatgggaccaagcaaatgcaaattgtcaattccgatggaaatccattgccaatcccgcaaaatccgttgcccaacaaagtcatcggattccgtgacattcagatcatgtaaaaaaaactgatttttttttctctaaattttctgaatttttcagctacatcgatcaaaatgtcgtcgcatttctccgccattttcaccgtcgcattttcgctgtttgtacaatggatttgtacattatcactgaaaatgttcgcattttggactttgttttgctcaacatttggccaatgctccgcgacgccattcgtgttatgtatttgaacaccatcgcttttcgccgtttgcgccaattggccccgtcactgctcagcgattgtccatcacttcgctttgtctcattcaaagatgccattctgcccgcttttccgcccgatgacagtgccaatgcgtcggatggccaaacggtggcaaaatggtcgtttacgccctgcccggatggtcggtccaagtggctcaaatgctttgtgaatgcaccggtggatcagtggtcgtcaatgattgaacagttcaaagcggtgattatcactatttaattggttttttctatgattttttgtccccatttttaggcattttccaatgcttcttcttcggctacttttttcatttcttttcattttccgccgtcttctccgcttgacttcattgtgccatttgatttgatcaacgaagtgactggggagcaattgacacttggacaatcgtcagcaaatgcttgttggctcacccgttgtccaattgcatgggatgagcgaaattgggaaaatatgaggaacgaaatgtatgttcgactgaacccaattgagattcggatcagagacggtggatacggtgatgggtgagcaattttttgaaaagtttcattttgtttatgagtccattcaactattgaacaatgtttttttcagtcttctcctcgacgccgcttctcccgggccgagtgatcattgatcagcagctgcagaaattaattaattggccgattgcaatccgtgattgaaatgatattggggcattatattgtattgtgtataatttgtttgtaggtatttgacctttgcttgctcgcaaatgcatccatttccattgtacatacctatgtatatatatttatgtgaaattcagtgtgggtaatcgttgataaaaatgacatgaacaaaagcgagttgaagcattctttcctttagtgatctcaagcattgtgcaaaaaactgcatagtcctggtcaaaattttaggacccagaagtcctgaaaaaagtgatttgttaatcctgaaaaccggaccgggtcaaaattcttttattctttccggaattttttcaaaggtccgaatttgatacatatctcaatttatgaaccaaaacaaaaattgatcagttctcaaataataattcattccgctggccactgctggtattacataaaatggcattcgcgttaaacgcctcattccttttatacccgacaaatgccgactccgacttttttcccacccccgatggctctgggcgctatgctaatatttgctgtcagggctcccactcgtccttgaatggcaaggacgtccttgaaatcgggtcctctttcttgaaaataaaaaatgtccttggatgccaaggacgtccttggaaatgaacatttggaaaagttttaaaaaattcaaaaaacattgaaatatattaaaatttttcagataatttctttcaacattttttacaatttagggtttttaattaaataaaaaatcaaaaaaatccttttcgcgtttagcagttggaaatttccccgaatccacgcttttttttgttgttgtatgtatggccactgcgataagtgacattaattgtgattacaaatgtttttgttcggccttttttgtgaataattcttggcgcagtctttttttttgtccgttcatttctcgttgttcgatgagtaaaatggaaattgctttttttggttatcattcaaatatatgaaaagtggcgatggatgaatgagatacgatgtgcaaaattttggtattaaattgagcggactcgctcagttcggccgtcacagttcggcccccacggttcggccccagcatgcttttccactacaacttttttatttgttatccaaatctatcaatcttggtatcattcgaaagctcttcagatgatctattagccttacaaaaagcgaaaagtttttcaagcctggaaaaaattttattaataaaaacttgaaaatttcgacttttt

SEQ ID NO: 21323 - DNA, 2664 bp, Heterodera glycines
  unsure (1)..(2664): unsure at all n locations
gctataaaatggcgccaaatttaggcattatatatatttttaatttttctaaaaattttaatggttctgccaatataaaatcaaattaaatatgcttacgaggcgattttttaataatgagatttttacagaaaattttaaagctgttcgttaatttcaattaaatttttttttttaatttttattcgtaatttaatttattttaaatatatttgatttaaaataattttcttttaaaatttattgttaaaagtttctaactaattaatcagtcccttttatttttaattaatgcgtcaccaacaattttttacggcggcgcttttttatgtaaaaggcggtgattgttaattgactggatggagtcatccaactggttaactatataaaatggcttttatgagacagatgaggataaaacatgaattaattattcattttttattttttaattgaaattcaattttttctaattaaattttttcctaattaaaattataattaatttttaagccattctttgtttagctgtatttggttaagaattatatttaatcgtctactaccttttttaataaataaacaatgtaatttataaatgatttttttaaatttaaataaattaaaaatcaaaatgttgggtattttacaattcatattttttgatgttaaaaaatcaattattttacctttgccgttctttattcttaatgacataagcaacaaaggcagctgacttactaaatattttgttaaaaatttttattccgtaaacttgaaatttaatatttcattacttaaatcaataataggaaattcaatctttaaaatttgtgttcaaattttttttgatcaaaaatttaatgttttaattctaaatttattaacaaaataatttaattgggttttaatataaattttcacaaataaataaataataactgttatttctaaattctcaaaataatttagaatttttacagttatttataatgatgatcattaatttcggtcctcataaattttctattttaatcatcggtgtcattactgtccaagtttgccttttctcgtccatttcatcaaattcaattcgttcaaaacgccaatatgttcagcaacaacaacagcaacaacacaatgaagaatattttgtccaacaactaattggtggccaatttcaacaaaattcttatgttgtgccaaatcaacaacagcaacttaatccaaatttggcattacagcaacaacaaattgtgccaattaatggacaaccggtaaatgcttaaacttttaaattatttgcccaaattttagcccattttaattaacttaataaaaaaaattgttttttttttccatttaattataaattttaatttgaaattattattatattttttcttccaactaaatcataaattaaaaataaatttcaattaaagcatttaaactcacagccattgccacagcaacaagaaagtgcacaacaacaaatttcacctattaatggacgacaatctgtatgctaaatgttatatgtaaaaaaataatgaaataattttcagtaagcaataaccaattaaattttatttaattattttaataaacacattaattgttttcttgttcggacaattatgtttcaatacaagagtttgaacaaaagaacgaaaatttaaatgttcgcaattttcagttacaaaatcttattggaacttagttcaggatttttggattcaaaagtcataattgaattcccctctgcagataatatttttgcacaaaaattttaaaaaattataattttttcctgaatttagctaattttttatttatattttggcaccaatcctccaccaacgttcagaacccatcagaaatgtcaaaccaaaacagaatgccaatgccaaacactaacaaaaataatgctaaacggcttacacgttacaatgaacagtatgccaaaattatgttggcattgtccgccggtgcctatttccgctcagcgcattcagccgaagaatgtgtggcgaagtgagcgggatttgtttttcatattttataatagaatttcaaattaatttttaaattaataaaaaactcttaatttataaatcttcaccagaaaaaaagtgaaatttattacaaaaatttattttattataaataaaaaactttataaaattaaattaataaatatgttaaatattataaaattgtcaagaaaattgaagcctggaataaatatttataaaaatagagaataaattacaatcaaattccacttttaacagttggttgccagaaccgaatcaatggcatatttatgcatccataaaccaaacatgtgacattcttgacaacccatgctcatcgtatacagtaagtaacaaatgtaaaattaattattgaattactgtatggttcggattgtcctagctcaatttttaaaatgactgaatggtgattttaaaggacacatgccaagaagcgtcaataaagaggttcaaatacccccctcccccccccccgcacaacctccatcaataaaggggcagcaaaaattccacaccctaccccaccaccaccaccagcagcagcaaaaacatataggggcagctaaaagttgagcaccaaanaggtgcagcaaaaaaaagtcaa

SEQ ID NO: 21324 - DNA, 1538 bp, Heterodera glycines
  unsure (1)..(1538): unsure at all n locations
gttccaattcgcgccgcttctccaactccgtctcttcgtattggcgacgttcacgctcaatacgctcccattccttcagagaggggacaaacgaaagggtcactcatcacacaaacgaaacgaaagaaacgcaacgaaacgccaaaaagaaaaaaagccaaaaagggaaagtaaaaaatgataaaagtaaaagtgaggaagcaaaaaaaactaatgctaagaaaaactatcaagcgtaaaagccgaaaaatatttgaaaaaagaagaaatttaaatttgttctttaatttaaaatttataaaggcaattaattaggtaattagtccactaaatgactttgccaattatcgatcagtcgcgtcattttattttccattttcgctccttttgtgctttcgtttcaacaaaattgcgcttcgtcgccacccccagtcggctaggcggaggacgacgcgtgcccctggcgcgtgccagcagttcgcggaaacccccgcccgcgcttctgttccccgtcgcgggccgcacctcgcggcgtcgtttttcggccgcctcacgctccgcccggtcgcggccgatgcggtccctctccaccctctcgcggtccaacgcttgcgcctccaatgcctgttccattcgttctctctcacgccgtatccgctccaactgctccacctcctgctgctcccatcgccggcgctgctcatccacgcgctttcggcgttcttcttcctcgcgctttcgcctctcttgcccttcgcgcactcgccgctcctcctcttcgacgtttcgcgagtagcgaagccttagggagaaagacattggaggaaaatacccgcatggaaacaaaaagtgccaacatttgcataattaccccatctaaattttgattctttgctaattaagccccagcctcgatcccccccatccttaccaatattcctctggcatttcatccctctgcggtggcaactgttccaacgtcagaaaaggcgccgcaggggacgaacggccaagcggaagcggcgcactgagcgcctcggttgagcgcgtgacgagagtgcgcgtcagcacctacgatggggaggaggtgacccaacaagaaaacagggccaaggcaaaccaccgcacctctttgcggtagtattccgttggtgcggccgttgtcgtccgcgaggagggcagcggcggcaccgtgccgcccgcggctctgccaaacattggggcgaacgcggacgcggaacgttggatgggaatgtcgcggacggaggaccgagggaaattagcggtggaggaggacatcagaaagggcgcgtcatgcagactttggtcatggcgaggcgacgaactgtcgcgggaatatttgtcaaacggcgaattgggctaaacgcggaaagcaatggcattaaatgagtcatcattgaaatgttcgtttatttttaattttcctcttaattcatctaattcccgtagggacattttgtaaaataagcgaagaagaaaattggagcggttgaattgaaagtgagtngggggggggg

SEQ ID NO: 21325 - DNA, 2995 bp, Heterodera glycines
cttttgtccattttctatttaaattatcattcaatttccttttaatccgaacttgtaatggcctttttttcccccaattcaaaaatttttaaaaaatgcgtcggttttccctcacactttctctggcccattcttgttctcttctcatcatgcttttacatcccatccaccggaatgacccctggttgcttttctccgatttcccatgccatccatctgagatgaaggtggaccactgttcattattgcaatgcgcagcttggccgtggaagttcggattggagagacgaagggcgaagccgagagtttggtccattcattcactttcacttcatttttatttaaggatcggggacgatcctaaggaaaggggggagttgtaaggattattcgacgcatttccctcatttaattatttcccattggccattatcaattcaatcacatttatccttttctcacgtttttccttttctcattgtaatgtttctccgcccattctcttcgcattttctccttccccagtgatcagtcagtcagttgtgatggaacagacttcaattattattccgatttctcgcttcgtttaaatccaacatcgaatgaataaatacatctttaacagtcaatgagtcgtttgggggttcggggcttggtcaaaggcgccttggcttttccccattccctcccaaactccatccgggataaacggtgcatagttggtctgggggcacagtgcgcatccctcactggtagcaccggatggttcccattttgggaaacgacgacccatcattgacgacgaagctgagaattgggtaagccggcagaagtttgtgggagatctccctggcctgagggcctgaaacaaagacgtgtacacgcaagtaaagtagtctgacattttaaatttctgtccgggctagtcgaagactaaagggactttaaaaagagaagaggtgagaaaatctgtccgggctagtcgaaaactaaagggacattaaagacgaagagaaaagaggtgagaacatttgtccgggctagcgaaaagctaaagggattttaaaaatgcaaaaaaagaagaaagaaatttgcccgggctagtctaaatgctaaaggggctgactgcatcgaaaattgacaaatttgacaattatttgtaggagagagagagaataaggaaagagagtgaaggaagccaaaaataaccaaaaaaagtcctggtaacaaacgaataaggactaatttataaaaatatttgaacgaatgtgaagcaaaaaaaaaaaaagagagagagagaagaagtgagacaaaaaaatatagaacaattttttttgaggagagtaaaaaggcccgggctgataaccaatcaaaggggcgctattttagctaactaaaaagagggaccaactaaaacatgagaattaggccctatcattttgtttaccgtatgagctacagttttagagttccaaagttcactttatcaattctctttttttttacgccataaaaatattcacgtaatcacgtgccgccgcattttttttcattgggcgagatcattcactttacacatttttgcggcgcctgagaattgttaattgctctcgttaggcggagtttaagcggagatggagcagataaagtcattcctggaaggcactcgtcattcattacccgctgtcattcattaatttttttctctctcaattaatgcataatgggattaccaaataatttttttagcaaaataaaacaaaatcttattacaactgaacgacttcgaatgtctacatcagggggctcgtcaaatgagttcccctttggtacatcccaagccttcgggcaggaaacaaaaatgtttttgagtggaaaggatgatgagtcctcgatttcggctattgataggaaactttggcaaggaaagaccacgataaaaatctctgatttagaaaaagctcaaaatgatatggggaaattagaagatggagtgaacagagcttttcgctgcctgaatcgttccttgaaccaaaaagtcaattgggtgaaagatgtcgtggccaatacaaatgccaactttgagactctgaaagtccaattcgagaccttaaccgaaagagttgatatgttggaccaagacagtgatgggacgaattcaggtgggactgttagtattactaatttgaatagagcgtcgcgtgcgctgtttgtgacgccaatgggcaatgcacagcccaaccaagttgtaccgaaccaagtgccaattcatcaattatcaagcgaagacgaagatgacgggccgactctttttggcctgaacatgctctcgagcggacccacagtggggtcaggtttggaaatgttttgtgaggagtctgtttttgcatttgacgattgggctgaacgtttcaaggattacctgtccgtgtcaggcaaggcttacactgaacaagaaaaagtcacaagactcaaattggctctgagggacactcctcgggcactgtttaaggaattattgccagcacaaacggacactcttgactcagcattgagcgaacttcgacagaaattggactcccctcagcgtcgggaaattgcgaaacgaactttatcgctgtgcaaacaaagggaggatgagacagtggcgcaatttctgagacgcctaactcctttggtggatgcgacaaattcgtcattaaccggtgacattcgtaaagagaaaatttgcgaggaatttttggatagattgaagcctaacattagttttctgatccgtctggtgggtttgtcacgagcaaaagacttggacctggtaagagcacaggcagaggagctggaagctttactgttgatgaacaaaggtgatgaagcatcacgcctctctcaggcagtccatgcgctgagcaatcagtcaccacagtcgaattggtctacagaagcgaacccgaacaatgaccgtgctggacaatggtcgtcaggcaacaatgtacgt

SEQ ID NO: 21326 - DNA, 1733 bp, Heterodera glycines
tgttatgtacagtacccctattttatttcccacacagacagtaataaaaagggcgggataaaggatcagcatttttcgctgatccttttccccgtgggaaacgcaagatcagttggctcatcccggactttccacaccgagcaactccggagaagcaaaatcttctccgtccctttttccgtttttcctttcttcgattcccggacaaaattcattttctggttttcctccccgcgcccttcccggaccttccctcaggattttccctttttggccgtttttcactgaaatatcttggaattcggatcacaatcactttcaccgattttcatattcaatttcaattccatttcacatttaatttcaattccattcctcagtttcaatccgcaaccattttccatttttaaaataaataaatcgatcaagttaattggataatggagaagccaaagaaaaggatgtgggagtgtaaagagtggagaattaatttaaagggaattggacaattaaaatggaatgggaagattgggggaaaatcacaattatcccggggaacccaaattcgggaaaagccctattttcggcccggcacgatccctttctatttacatgaggttacttacatattagatgattgaaaattaaaaacaacagtctacaataaaaatcaaattccctgtagatttacaattttcggtcagtgtttttactaaaattaattaatattattttgataataaatttttttatttgcatatttaaaaaaactctttttttaattgaaaagagcataaaaaactgatactaaaatagcttcttccgggtcttgtatttttccatatttttacgggtttgttgcactaattttgggtacacccccatggcaatcccctttgagtttttggtaaaaattctttttgatcagaactgatctgaatacaaattttttaggtttttggggctgctgatcccgaatccggggccaaaaaggggttaggattcgggatcaatgagtttgggtgcggttgcgaattccccaaaaaatgatcaaataataaatatcgattaataatttcttaacatttcaaccaattccaaatctgatgctcattttattctgcattagaagatgcataaaaagaaaattgggcttaagattaaagaaagcaaaaaaaaggatttacaattttcggtcagtgtttttactaaaattagttaatatcattttgttaataactttttttatttgcatatttttaaaaactctttttttaattgaaaagagcttaaaaaacttatatatatatattaaaagggttgcttcgaattcgatttttagagtgtatttttctttttaagccgattcttagaggtgtatttttcgttttttggaatttctaattagggggtgtattttgcacaatttttagccggttttcgccaataaattactattttttgccattttgttctccatttttcaaaaatcaggtgaaaagattttccgtattatttccaagtccaaccgcgggacaattactgatttacgcagagagaataaaatatcaataaattcatactttgcataataaagcggaaagaattaaatggattaaaatattatggcgcatatgtaatcctgctgtaaactcactgtcattgtctttatctaatcaaggcccgatcattgttaggcattaatcttttttaaactagaaattacaaagaat

SEQ ID NO: 21327 - DNA, 2278 bp, Heterodera glycines
tgcctcgccaaatttttcacataaacattggtgacttcctggacgggtcaccaatttgcttctcacgagcagtgcgtggcacaaattttccaacaaacctaaagcaaaaaagatgggataaatttaatagcacaaaaacaattttaagtggggatcatccttacactttcttcccatccaaaagcatcccgttcactttcgcaattgcactgttcgccgcttcctcagtctcaaaatggatgaacccataccctttgcttcctccctcaatgtcagtggcaatctacaaaagttgttgtggacaataaagacgaaattgtttgaagttaagcaaacacaccttgcagctcagaatgcttccaaacatggaaaaagtgtcgtagatggccttcgtgtcgatttccttgcccaagtttttgatgaaaatgttcccagcacccgagcgacgaatgcttggatcacgttgcgaccacataatgcgaattggcttgttcaggatcatgtcaaagttcatggtgtccaaagcacgttcagcttaacagaataaggggcttatgatggaagcaaaaaaaattattaaaaaaaaaagcagtccaaatgtgttaacttaccatccgccggttgttgaaaattcacataggcatagccaagcgaacgacgagtaattgcatcacgacaaacacgaatggagagcacaggaccagcattgctgaaccgctcaaagagcatggcctcagtgacctggcaataccaaaaaaattaatcggtgtttgaaaaaaaaatttttaatttgatttctcacatccggatgaagatcgccgacatagagagaagccaacggataagatggtgccataacctgcggttgggttgtttgagccgaggctgcgttagcatttggtgcgggagcaacagcagcaactgcctgcgccattttcttttattttcttaaagtgtgaaaatgttggtagagaagaaaacgaaaacaaggaagaaacaaacgattatgacggattaattcgaataactttattaaaacaaaaagaaaaaccaaacccttttatcagagagaaacgcgaggaacaaagttggatgtgtgttttttaggtagttttttgttgttttgtcaatttttttgttgttttataattttgtcgattttttttttgtattttttagatagaataagatgaaagagaaatataccctaaataaactgtttaaattctaattttgtaggtttattgaagccaataacaggggaaaataggcaaataacgctcataggacttccacttaacgtgattacgaaaccaaaaacgctgatgaaaatgaatcaccggacgataaaaaattatacagtaggaaaattcaataaaatgtattcgttgtaaaaatttttaattcaaataaaataaagcgtgcaccgcatcgcaactcgcgaaatactatcattccccagaacttcggcttttatccatgcgtttttaatcttcaatcgtaccaccatttttaccccatcttttcataagccttttgtgcggctgcgatcccggatttgacaaatgtcaaaaattttgatttttaacaaattattggaatttattccgatgcattccttgcacgccaacatttaaaagaatcaacaaaaatgcgaaaatttattcatttttttattttaaatttgggaatcgaaatttttctcaacagtaaaaatgctttatgacaatttataaaaaaaacgatggaacaatttattttttcgtaaatgaaagaatggtcaattggcaaggttttctgttttaggtgttggattgatggggagtaaaagattgaaaaaatcttttttactccaaaaagatggagatttccaagcacaccagcctccgttcagtatttccgataaattttctgttcccgtgtaatgcggatccaaaaccaaaaattggcaatcgccaagccgcacattataatcaacaccgagaattgtgtgtgccaattgaccaccgcctttaaaaatttgttttaagcattaaaacttataagttctgtaaattttaaagaaaattttaaattttgagagtgatggtggtgtccgatgtgccaagttgacgtcaccattaaaaatttatttgtttatcaacttaccataaaagtttcctatgcataaaaaagtgataacttcaaaaatgtgttaggtaaattaaatttttacgtcaaaaattcttttcgtgcgtggaaggagagaccggaattttgaatcgccggtattagaaaa

SEQ ID NO: 21328 - DNA, 997 bp, Heterodera glycines
tcaatgtacttttgaaattttagccatgaacaaccagtttgaaaagaccgatatgcacaaccccaaccaatgtcatcaacattctgttgcccataatggtaataagcgtctttccgcaaacaatcgcatatttatgttttggttgtactgaaagcaaaaaggaataagttttggattcttttatgggtttcggctttttgttcaaatttaggttaccataatttaagaaattcaaaaaaattttttggagaatccatcagaaaaagtggcaattttttccgatggtgtttttttctcactttttactccatcatgcggagaaattattaaaccagccatttccttcgaaaaggactctaatttgtcatcacttgtggcagaaacaatagcatcatcagcagaaatttgttcttcattcataattaacttttaaatttttctcaaaattgtggaatttcaacaccgattaaaaaaatagataaaaattggtttttataaaaccatttaaattattataaaaatgtttaaaacacacagacaaactgtatggatcgttgatttattcaaatagaaaaaattacacattgtaataaaatgaaaaaaaatcgctttctgctgaaataatttatagccaaatacaaatcacaaaacacatcgattcgttcgccacaattaccattcggcctcaccagtacatttttgaaagcaaaaatcttttccacgaatttgcattacctgaaaaaagacaaaaatttacaattatgacatatttggtgaaaaatgtgcaaatttgttaataaaataccccatctttgagagtaaatttccatttgttgcgagctctgtgcacctgaacatgatggaattgcaaaacaatgaggaggaggtattgcatgaaaatgcagaggaggcttcaaaaaggggcataacattttaccaatgcccctcccacgttgagggggtcgaaaaaaaaaattagaaatgggataaaaaaatt

SEQ ID NO: 21329 - DNA, 2397 bp, Heterodera glycines
tcttggcacatccgagcacatcagaaccttccaaatctttggtatgcaattcgcctcaatttaatttaatttttaatttagatagatatttcctttcctaacttgaactggcgttggccttcgcaaattgaattcattcaattgttttattagccatggagaaatgccaatttcgcgccatgagaaagttgaaaatgactcaaagaactgaaaaggcaaaggcaccgtcccttgtgcatttggtgatgcaataattggttcaattaacgaattggcgttggaagttgattccagattttcctcaaccaaattcattacacttaaaaataaatgtttaaatgtgactctcaaaaaaaaaaaattgttccccgggatttttcgggctcactgatcagtgatcacgaatttagggaaaggaatcaattgatgttagagaaaatccagaaaaataggtaagtcaatcttaaagagtggcaccgaaatttcctataccatcgggactgaaatggcagactgaaaaataataataataaaaatctggtggcgaattactgaaatgtgactttagaggttttttacgaatttttttgttgacttttcaactccaaacaaatttgaataattttccgatggaccaatgtctaaccctaggctttttagccatattatatgggaaattgttgggcttttttacgacatcgttctgataatgacgacttcactcgacttgagaacttagccaacgaactggggagggcgccgaatgcgccgggagacagaagaaatcactcgcgaacgagcagttcatcgtcagcagtctcttcggcgtcctccgttggctcggacaatgaacggatcaatcggcggcacaaaaatttacactccgtttgttagggtatttttattcatttaaaaagggattgtgcgttttagagttcgtatgtcaaccaattgtatatgaacgcagcttttggctcgggcgatgagtcatcttcgaccgaaacgaatgctgtggacgaaaagcggaaggtaacggagaatgatgggggagtaaagccaaaacgcgaattgtcaaggctcgcgtccgaggacttctcgagcaaatccccgtggacatttacacggagggagcgaaagggccggcggagtgtgcgatttgcatgggcgactttgaggtgtcactttggtcttcgtttatgatttatggaaagagcatttgctcctcaggagggcgactccattcgctttttgccctgtgtccattcttatcacctccaatgcatcgacggtccgttccaactgtcccacagatgtcacttttcgttttcagattggctcctccgctccttcacttgtccgtcctgcatggaaccggtggactccgcgctgctttccgtcttcacggttaacaccagcaccgacctgaacgccctcaccggcagtgcgtccgcgtgcaattcgataccttcgcggcaacaacagaacacagcgaaagaaggcggagaagtgacaacccaaaacatcaacaaactgtgatcggtgttttttccgcgttttaaatggaataagggagcgaaatggcggcagctgtctccaaacaccgaaattatccccaaatccctttgtatgcatttttcacccattcccatgtagaagtcttccaaatactttaatttcgactttttgactgatgttcctaaaatttttgtatgagcaacatgaatccatcttcgagcacttatcattttgaataaatcctgtaatattactactgactttggatttttctatggaaatacgagtaatatgacaaattcaatagaccaaatttgcagaataattaaaaagagaatgtaatgcctttattttaccaatgccaatgaggcattaattaagaattacagaataaacaaaaaatggtggataaaatgaagcaagtcatcatttctggaaggttttcaaaattagaaagtcggtaggagttcatccccagagtcgcaaatgtgtggtaatgagttgatcaaacgaaaatatgcacaaacactgtgttattcaacagaactttggttcttttgctgttcgcttttcacttcagtttcctcctccccttcgactgtcacttggccattaggttgctgaactgatgataaatcactttcttttgttttctcctcgacagttgagtctaaaaaagtgtgtcataactagggaatccattttcagtttgccatttttggcgcctttttcagaaaaatccttaacaaaaatgaaaaatacacccctaaaaatcgacccgaaaaattttcagaaaatacaccccctaagaaatgggaaaaatttcacaaaaattacccccaaattttatttttttttcttcataaaaattttgatttaaaa

SEQ ID NO: 21330 - DNA, 978 bp, Heterodera glycines
  unsure (1)..(978): unsure at all n locations
ttttcatattgtaaatccatataatatttattgtacttcgattattgctaaatcattngaaacagaatctgttccaaattcgcttccatttattttgacacgcatttccgagagagaagcatttggatggattataatattgcgggcatttgttttatgcttttcattagcaacattgactgttccataagaaatttgtattgaaccttcagatgagagaaaataaaaatattaataaattaaattaataataattaattaaagaattggtttacttgggacagaaattatgccggaaacgcaatgataagctgttaaaatgtatttgtggctgatgattgttccagtgcataatcctaaacaatttaagtcaaattaatgaagatttatttcttaacaaaaccttgtaatgaaagcaaagtgaccatccatggcattgaattggcattttccactggttgtcctttatatatctaaatttgcttatattacactagtacaaattcctccatttttattactttcttaaacaataaattttttgaaaattaaattttattaaaattaaaaattcgtttctttctctcacatggtttgtgccgattttcacatttggcacattgtccaagtcgggctcaaagtcggaaatgccacactgagaaaagtttggtttgtgcgcaaaaattgaatacaaattgttgccggtaaaaacgaaaaataatgtcaaccaaaatttaaccattttgccttttaaaagttttttttattaaagttatataaaaattttattttcattggtatttaatattaatttccaataatgaattttttgtcatcttttatacgaagaaaaattaattaaaaatgaagcaagcgtaaaattattacaaatcgtagaaaaaagaaacaaaagaattttattgaaagcaattttgacttaaactcttttggtgaatacgaaatttttcttttatttat

SEQ ID NO: 21331 - DNA, 1432 bp, Heterodera glycines
atatatattctaaattttgctcataattccttaatgaatgaccaaattatattaaagtttgacttcaaaccgcattcagacaaaaaatagatttttctttcacataagtcgagttgaatagcccagattatacatgttaaattatgaaaaatcagatgtcaaaataattgttgagttgtgcaatcactttgattgcgaacttttcgcccataccaatttgcatcacagagaaatgccgaaaagtcttacaaatttttcaattggacacatttcaacaaacaaaaactgtttccgaaaagtcagtgtttaaatagaattttaagaaattccttgaatttaaacgaatcataagctccgttcactttctatgcacttcacttctccatttgtcgcttcttcaatccaattgcaatcaatttgagcatattgacctgaattaaaagaaaaattataaaaatatagaatatatcgttagggatgataaccaaaataggtggtaggcatcaggctttaaaaaatcccggaaaataggctctaaaagtcttaaatttaggtgtaaaatgtcaaaatctattcaatttataggctctaaaaataaaaaataaaactaaaaataattgctaataactcgaaaagtagcttaagaaccaccaaaaaaaacaacttgtttttcgtgtgttttaggacattgggagttcaggaaaaaaataggctaaaacataaaaatatcatccctaattattatgtttatttgaaaagagtttttttgctccagaagaatgtaaatggtaaatttggtttattttaaatttataaaaaataggaaaagccttgtttttgcaaacattgttatacaaataatattactgatgttgaagtgcagacggcgcagacgcccacttggacccaattattttggccaattttacgcactaatggaccaccgctgtcaccataaaaataatttaaattaaaaaaaaattgtttttatttttcaaattttacactttcgattacgctcggtccaggcacaacacaaatgatctggtaatgcttattatgatgagaagaattttcatcatcttcaattgcaactcttttgactaaatcaatgttttattttcattttttcattattacaatttaaaattacattttttgattgatgcactttgacaattctctggtggactgattttcattttaccgtacatcaattggttgcttggacctggcttactgtctttcaaacagtacggagaagtaataccccaaccagcaacaataaaagtggaatgattattcgagcctgaaaatataagcaaaatgtttttgaatttaaaaatatttaaaattaattagcaaccatattcaattaaacaaatgggacgagcatttgctgtgaatgcaattggcttcttcaactaaaaat

SEQ ID NO: 21332 - DNA, 1339 bp, Heterodera glycines
  unsure (1)..(1339): unsure at all n locations
ggcatcggtctaaacaaaagctgcggcatggcttggggaaattcctcaggggattaatttcgtttgtctaaagaaatgcgcntagtgtcgggcattttgacattaaaatgccattaaggcaccgttgtagccaagatgcacgtggtccttggaaattcctcaggaattaatccctgaatttctccgattttcttaaacccgtaaatcacatnagggaaaacttctaagatcctgatgattaacatgctcatttggttttggcgctagagtgacatttattcgcatagtcttgggaaattactcaacaactattcgatttttcttaattatacgatcatggcaagaaaagcatgatcattaggacacttgttcattaaaatgctattggatatttattcgcgtggtcctggaaaccacttaggaagaattattccgatttttcgaaaccataaagttatcgaaagaaaagcattattgacgggccttttccaattataatgccatttcggcatcggtctaacaaagatgtgcatggctttgggaaattcctcaggaattaaatttcgttgtctaaagaaatgcactagtgtcgggcattttgacattaaaatgccattaaggcaccgttgtagcaatgatgcacgtggtccttggaaattcctcaggaattaatccctgaatttcttctattttcttatcactcacaaatcactgggggaaaattaagatgattctgatgattagcgttcttgttcgattttggcgctagtgcgatatttattctcatggttcttggaaagtactcaggaagtatttcgatttttgtaaataaaccatcagctgatataaagaaaagcattgttgtctgtccttttccaattatattgccatttcggcatcggtctaacaaagctgcgcatggctttgggaaattcctcaggaattaattttcgttgtctaaagaaatgcgctagtgtcgggcattttgacattaaaatgccattaaggcaccgttgtagcaatgatgcacgtggtccttggaaattcctcaggaattaatccctgaatttcttctattttcttatcactcacaaatcactgggggaaaattaatatgttactgatgatttcnnttcttnttccnttttgcctctnctncnntntttnttctcttnnttcttcgtcnnttctccntcnttctttcnntttttctcnnccttctnctnntctntngnnncnccttnttntctntcctttacgaattatcttcccatttcgncatagntctaacaactttgtaagtggctttgggaaattcctctaggaattaattttcgtt

SEQ ID NO: 21333 - DNA, 2242 bp, Heterodera glycines
  unsure (1)..(2242): unsure at all n locations
ttaaaaaattccaaaaattttgaaacgaaaaataaacctcatattcgtgctcagcacctcaaaatagcccagaaaaatatttttcacaccctttttcgatcccaaaaaaatttttgaaaatttctatggggcctagctcgaaaatttttgaaaattttacatcatgtagtacaccattcgatagtatttaaaatgctctacaaaaatgttctaagacaatatttcgctaaaatcaacttctgacgagttatgggcccaggactcaaatgtcccgctgaggccaaaaattttttctatttccggaaaaaaatcgaaattttttcaaaaaaaataccattcgatagagctcgaaaaactatgttttggaagtggtcttcgtttttctgggaaaattcgttaaaaaatcctaaaattcaaaaacccgaaaaccgttttttaggcctagctcgaaaaattttgaaaattttcgaaattttaaaatttggaaaaatcgagctcaccgagctctacaataagtctgctggccaccctgcgctcagatcaaagcctaatgagttattcaacggggactgaactggacaaagttggtactgaaaagttctagaagcacccagcccagggggttagagatagcggcctggaattttttttaacttttagctaacacttcaacttaaaatcctaccagcggaaactttttggtcagggttttagaaaaaaagttaggggccctcaaatgcacgaaaaaatgagaaatcagccgctgggactcagttggccgcgctgaatttttctctatagttttcccggatgctcctcaaaaagttgtaagacccttccactactttcagggcgctcccggccttcggccgggagaaaatggttttagcaacgaaactccttgtcaatataacatatatagtaactagcgggtgttgcatgcgagggtggcgctggggaaagcgcttcgcgcttcttgagcttcgctacctagattagctatctggttgtgaagagattttgaatttttaaagaatttcagtgatttttaggccgcttcgcggcctcgaacgggcgcttcgcgcccgttttttaaatttggttgtgaccagacgtgcgcttcgcgcccgttttttcaaattttgttgagctcaaacgggcgcttcgcgcccgtttttaaattttttttcgcggcctcaaacgggagcttcgcgcccgttttttaaatttttttagctcaaacgggagcttcgcgcccgttttttaaattttgttaagcttgtgcgggctcttcacaaccgtttaccacgggtggcagaggtacaacgatgatttgaagaggtacaatggtgattagaagaggtacaatggtgattagaagaggtacaatggtgatgagaagaggtacaatggtgattagaagaggtacaatggtgattagaagaggtacaatggtgatgagaagggtacaatggtgattagaagaggtacaatggtgattagaagaggtacaatggtgattaaaagaggtacaacagtgatgagaagaggtacaacggtgattaaaatacatgaaattctatcaattaaaaaaaaaaaattaatttaaacttataaaatttattcatcaaaaaaataataatttaaatataattttttatttattaactcaacaaaatattttaaattaattaaaatcattaaaaataacgtaaaaatgcacagaaaaataatgttacaccgcccggattcgaacttcccccccctcaaaatgatgcctcagaatccccaatcacacggggattctgagggcttaacgatgtcagaagtaaaatctgatcacgtattcgtgatcagcggccctaataacccctaaagacatatttttggaagatttttggtgaaaaaatttctcaactcaaaaatcatgtgctcccccctttggacccgaatcccaaaatcacttttatttttataacaattcgcaaaaatgtgataaaaatttaaaataaaatttatattatagagaaaaaaattgtggatttttgtagtattttacttttctcaaatttcttttcagaaggcagttacgaatttttttctgaaaaatctaaaatttccagaatttctggaataacttttttcatattgatgttaganaacctagataaatcccataaaattctcctgatttttctctatttttaaagctttgttgtatgaaaattgacttaccctgagg

SEQ ID NO: 21334 - DNA, 1255 bp, Heterodera glycines
ataaagattgcttcaatataaaattaatttacaattaatctttataatactcggttgtaaattaaatactaatactaaaaatttataggttattagatatagtggcaaaaattgattaaacaataaatgatataataataaaaagcaacaaatataattataatcacatcattatgctaaagaaatcatttaaaatcttttattaatgaaatttattttagtagttaggcgaggaagaagagagtaaagagcgaggaaggagaagaaggagagagtgaaggggagagagattgagagtgcgtgaaggcgagagagagagtaacaatggcgaagcgaatgcaggggggataggtcaacgatggcatcatttattgagggggaagggataaccaaactctagagaatggaaaattgattgccaatgtttgagcatcatatttattctttcaaatttcttataggaatgagtcgggtaaattatgtgtacgctagagggaaacgcacggcatttcaatttgccgttttaaaaattaatgtattttttcgttttgttttcaaataacataaattaattttacagcagtggtcagtgtcgtctttacggcccgtcaaaaggacctcggccattccagaacgcatcgacaaagggttggaaacagtgaacaacaccaggtcgggatggaatgtaaagtgaattttcgttttttttcacatttcttaaatttttaggatgatgttgttgtccgacttgaaaaaatggacgtttcttcccgcgcatgtccaacacaaaaggtgcagagaacagcgccgcaaggatcagcggaacccaatggtttgaaccatggaatgggaagggtttttgaatgatcttaatttttgaaaattcaaaaaattccaggcaccccggaactttagcagccaccaaattcacagcaatgcgcaccagtgaataaaaggaagaggacagcaccttcgaaactgcaacaacaattactaactaatggtttttgatctgaggggagcacaggaacgaaattttaattttagaaaatttgacacttgaagcggcagcggtggatgatcaaactcagcaaaccgtccaaactgagccggaaatggtgagtggtttagagcttgcacaattcatcaaatttgtccctgttttttttcagaacctacaggcggcaccggaggatctgcaaaacgttgtggaccaaaatgagtcggaagtggtgagtggtttagggcttgcaca

SEQ ID NO: 21335 - DNA, 1845 bp, Heterodera glycines
  unsure (1)..(1845): unsure at all n locations
ttttttttacaaacgatgatccattttgttcaacatttaatttattttaattgcacattttcagacacactttttttttaaatttcacatttttcacacacatttaatttcacaagtttaatttttaaaataaattcaaattgtcatttattattgcttacattaagtgggtatttaccaaatgatcggttacagtaataaaagaggattattgctttaaatttgatggagtagtgtaattaaagggaaaatgtataaataagcaaacattacagaaatagttttcaaaattgacggtcagagtgaaaataagcgaatgttgcggaaatagtttcaaaaatgaaggagtactgtaattaaaggaacaatgtgataataagtgaatatttgcggatgtttttgtaatgttttaaaaagggtagagtagttaaataattactaaacaaatgttaataagagtcgaaaattgagaagtactttaattaaaataggaaaacagcggcaaagttttacgaaaaaatagtgcaaaatgagctgtttactgtaaaaatagtaatcaatttaccgttatttatcaacaaccaattgtctcaaaaaattaatgtagcatataataattggttattattttacagtaaggacatttacgggcctgggcagaattttgcaaaaagtaaatgagacagcttctacacaatcccacatgaacactgtccgtaaaactcagcgagattaacggtacacaaacataggcccccgtcatttggataaaaaagctgagccggaaattgaacatcctcatccggatcgccccagcaaaaaacttgcttcgtttcacctccgggttgtaggcccgcctccgctggggtccgagcaaaaaggtcggttccacggcaattgatcaacacacagtcatggcacagctcaaaattgatgacaaatcgatcattttcagtgcgtgtcactttctgttggttcttgtacaggcgactccaatcatcttcaaaatttaattttaatttttctcatattatttaataatatttaccggggcaaagataggtcgagagcataaatttccctttcgccaacttccataactcgcgatcatccacctttcacttcttgatcactgatggcgcctcaaattgctcactctgagggaccgcttctaccatttccttcgcgacattgtcctccactgtttgattgggttggggtaaagagcgggttttcatttttctgttaatccttaaaatgatttgtgaatttgggtgggtaaatcaacttgacttagaatgggagggggggggccaatcgcggatgggcggaggagcataattatcccaataatataaaaagcggtgctcccctttggcaccatttcattttatatgaaatggtgcttgtaattgaattttgtgcacaacttctcggctgtgctcccaaagagctcagggatcggctcaactacccggaggaccgcgcgcgtgttctgacacagctgattggaaaaaaggtccagacaacgtacaaagaccgaaatggaatgcggaaaacctttttcattgggggcatgactgaacggggagcagcctttgtccaagcatatgggcgacttcgacaaccgttcaatgtcaatgttgctgcccatttttacgtccggcaccgcgtgaaactgcattatccatacgcaccatgcataattgaaggctttgcacgtggggaggaccgatactatccattggaactgattgaaatagttacggaaaacgaccacaaagatgcgctatttgggacaattggtcagagaaattgataaaacttccnactcatctgacgcat

SEQ ID NO: 21336 - DNA, 1840 bp, Heterodera glycines
  unsure (1)..(1840): unsure at all n locations
tcaatgtaagccaagcaacnggaggacaaaatcctgacattattaacaattgttaaatttaaatatcattagcacagtgaccaaaaacagtctaaataaattctgatcattgtattacataaaatttttctgtattatttttttttgcaattttaaccctctctcataaagtgatcaaattattttgtattagtggtaattatgctcatcagaaagtctgttcatttcatgggttttgtcttggtaagaaaatcattttgttttttgtgtcttttacattttctccaagtgaacgagcggagagtaatgaggcaaaaacattgggcaatttgcaaatggaaatgttcacacacgcgttgatcagtccagcaatccgatattttttggctaaataaaatcttttagcttagacattttaaaatttgcattaaatacaaaaattaaatcaaaaacattgatttagaaaaaattataaatataataaattaaattaaattaaaattataaacttggaaataaataaagaataaatttgaccagcgtaaagcacttccattgcgttgtgttcattcaacccgcaacattcgttcgtgtaaatgaagcgcaacattgttttgaatgttccaacgtcaacatcgatcacttccactgagctgatcacttcccaagtggctaattgatgcgaaaatatttagcattaattcattcaattttacatattaatttccataccatcttcgctcttcacattgaaagtgttggttgaaaacattttgtcgaaaatgcttgaggcagtcttcagaagaagtttatgtgccggtataagctgaaaaataattttaaatcatttgcaaattttgtattatattttttaatgctcagcatctctgccaaaaactcgcctccttttcgtctcctttcccaaccaaaaagtgcacatccgcgccttccccagtggtcattaaatggcgcattcgctgcaccaaactgtcggcatttgagaacattttaaagaatatgtatgtatgtattatcaaattctagtttttaatggctcaaaaaaactcggtagttgtcatttttggtcaaaatctgttaatgttatttgtgtgttgtgaatcattctttctaccaaaaatgaattattcattaaacggcgacaattaacatgcataaatgataaattggaaatttattgtaatattatgaaaacaaatttttatgaaaaaatggatggggcaaaattggagaggaaaaaaagaacaaaatgagtggggaatggggggattgacctcaccttactatgttagatggaccactgaaaaaaagagggatggatgggtcatcgacggattggaggggcaaagccaagcgaagaaaagaaagcaaagattggcattggcatggcatagtaaagaatggcattggcatggcatggagaatggaacaaaatggaagaaaacgaacaacataaaacgggaaaaagcataaccaacaaaattagggagaaatcgcttaaaatgggcacatatttcgtcaaaaaagaaaatgcgcatcctttttaaatagagcgaacatagaaatatttccaaaatagaattttaaggcttaaaattactttttatttttatttttatacatatgaaatcaaagaaaaaggaaaactaaggacgagaaactgtgaaataaggacgaaccttagaataaggacaaataagacctctgctgttttaaaggacaattgtaaaatcatttcacagaattatataaattcggcaaatgaatgaaggcgctttttaaagttacagcatcaaaaaataagtatatattttaaatataa

SEQ ID NO: 21337 - DNA, 1465 bp, Heterodera glycines
ttgctgtgttatttttccattgctaaaacatgtgtcatttcttttcacattctttttgaatttaaaaaaagcattggctaaaaaggaaatgttatttttcatgctttttgaaataaaaaatttgtcattctgatacatttcctcgtgaattatttaatgaattatcgtgttttaaaatttcaattttaattgataaatattattatttaagcggttttaaaaaaagaatttttcattcctttttcggtgaaaaagcccattttacgtaaggctatttttaggagcacaatttcgagaaaccctagctgcttttgttaagttgcttttcgagttcaaatctaccactaaaaatttttatataaaagtttttgttacaaataatttagaatttttcaataaaaacagccaaaaaaatgttcagaatattaaaccaattagttcatccttgtaaatattaataattttcactaaattagttcatatttttgtatttttagactttaaatgggtcatcataattcagcgacgttcctttttggcttacttttaggtaagaaatttaaaattatttataaaattataaatcaaatattatttttcttttaaaggttattttttgcccgaattggcggcacagcttagcaaagatgagcaggattattgcgtcaaattcagcaacaatcttcgcagcaatgtggccactgggaatcagcagaacaaaggcggcggcaaattgccatcggccacgaatatgttggagttggcatataacgagacaattggccaaactgcgcaagtgagcgacaattttttattgaggccttgtggagatattcgtgctttgtcgtttcttaaattcagccaagggccacgaatgattaaaaaaatgcaacacataaatcacaagtttaagcaaaattttttaaaaaattttgaaaatcaataatctgctagtgaattcctagagctatatatatgtataatgatactataaaatattaattaggtagttgaatttgaatcaaaatgaattgaatgtgttacattttttagtttttatcccttggctgatgggtcgagagtctcgacttaagacgacctttcgatttttttttgtctcagtcctggaattctatgtatacattcctgaaatttgttagtattgactctcatccctgtataatgaaacatttcccacgtaggcatgggccgacaaatgccaattttcgcattccaacacggcagggctgggcgagaacatttactggtccacgaaggaagggttcagcaacagtaaactggggaagttgttcaaaacacaaattatgtaattaaatatttttagccgaagcgttaaacaaagcattcgctttttggtggaacgaagcggtgacaattggcattccggaaaatttggtggtcgatgccaataattacgagccgattgggcactttactcaggtgc

SEQ ID NO: 21338 - DNA, 2137 bp, Heterodera glycines
cggctggtgggagttgcgctgacgaacggccctgtcctttgttggacgatttggcaccgcccggctcttccttccctcactaccctgctcggacttgacgacgacgggagttcacacccgtctcttcggctgctccgactggtgggagaccgaactatttgctgctgcttcgggcactcccgaacttcccccaattgcgacgggaagggaatttgatcgggagggttggggaagacgacgtaggccgccgggaaaggaatggatcaggacaggaatgggcgccctcgtttggccccgcacgataatttgccgaccgtgatggagtgaggagggtctttttccctccttctagtgtcccccgaaaacgaatccgagactccgattccgacacaaaatttattaacgaagcgatcgacgaattaaaaatgcgtaaatggtgaaaaattgatcgaaaagtccagcaaacgaataaacgcgaatggttggggggtgaggaagcgaagagagcgaccccttgggcagggccgcttaaatagacattcgaaaaaatgggcggagtgacagacggcccgataatgcgataagaaaaatgggacaaaaaaatgggcagaaattgtgatgtgaaaagtgtgaacaaagaaatggcgcataaaattaaaatgtaaattggcagatgtgaaaagttaaggaatttgaaaagaaagaactttgtgcaaaattgttttgcacaaagtttgggccggagattagccagccgatgagaaatgaatttgaaaagtgaagtaaaaatgggacaagaagaataggaaaatggtgttggagggtacgaataacgaaaggaaaatgatcgaaatcagcgattgagagattgatgaatcggtagtccgcccgatcgtctcgttgccttcctgcccttctttcggtatttcttcgtctttgagggtccggcccacgggttcgtattcggtaccgagaaaactgagtccccatggcggtcctcttcgtccgtgtcaaattctttcccgattcgctgcccgtccgtgcccttgttgaacgcgagcactcgcgcacgccgtggcgggttggcacccgccttctcgtcgccaatgagaaaattggcgacaagctccttggcgtcaaatgtctttagatctgtagagcatttcattatttagtctctttgctttctatcaatctgttctgcgcgaatttcttcaatctcttctggtttacattcagaatgatgttcggtttctttgccatgtcaggttttccatctctaagtataacgcttggaactttgaaatcaaggattttatttttatattttatagaatggcatttatcacatgaaagataaatggcattttggtactgatttgttttcacatatttagccaagtatcatttatccaattatataaatggattctttaagcttaaccgaatagcatgcttcaagttttaattcaattattggatcagatgaaccctaaataggttcattttttgtgaaattactattaatattttacaaaatatgttttaagggttctcaagctcaaattgattcctttatcttttttatcgagagtgcagatcaggaattgttttgatttctttgtgcttatatttttttttaccaagtcattacttcagcattttcaacaaattgttcgtatctagttgaagttataaatatgaagaataaagaaaataataaataaataaatgcttgagcgtaaaacattgtttcaaaagtcttcattttgtaataaattgaaatttctgattaaaaaaatgaaagaataaaatatttttagaaatattttttacatattatataatacaaataaatatttccataaaataatattctttggataaatctagggaataaattcgtgggcaaagctaaattgttatcaatactaaaatcaattccattcaatattaacaatttttttattagataataaatattccattatgttatagctatttatttgttaattaaagatgggattaccataaaatgttgattgataaaaaatcataggaaaaaccagatttcggatttttgcactttttgtgaagagtcctagcaccgattgtttcgtcactattcagttcgtca

SEQ ID NO: 21339 - DNA, 2478 bp, Heterodera glycines
ttaaatttaatattcttaaccgttttatgtcttactgtgttgggagtgccacggcacagactcggtccaacccggtgcatgccattgtcattgggccaatcgccactcacagcagggccaatcagaaacaaaaaacagtgtaaacagcaaaataaatgacaaaaaaattaatatagtaatagccatgtcaaaatcacggaatttactttccatcgcaatcaaaatcttgaaaaagctgcgaatattccgaaacgaaaatttaacaaaaattgaaaggaaaattagtgtgtttgtaagttttgagtgtaagatttcaggccttgaaccgcatttcattcaaaaattctcgaaaaacaataaatcaacttttttaaaaattttatttctttatacatttacttatctttacgcgagatttgcatattctaaaacaaaattacaaaatataataaaattttttgctcaaagaaattctttttatttcaatcaatgggaaaaatgactttttcatttttcatttattccatttattatattgtgtatattaatcttaataagattttttcttgttttttattaatgcttaactttttattgcttttattggcaataaatgcgactaactttgatgagattgcaatggaagaatccattggagttgatcaaaccgacaaacagcagcagaacaaatccgatgaacacaacaccgcttcttctgcttctgctgatccgtcaccaccaaacatcgaatttgctgaacaaaaagcgcaaaaacaaaaaaacatcagtaaataaaaaataaatatttttaataataattggttgacaaaaaaaacataattttgttaaaagctgctaagatggcatttaaaaccaaaatcaacgattgcttgtcaccgaaaaattgatgcaaaaatttgcaaaaaattgggcatttgtcggggaacaattggacgctggaagaaggaatttgggaaatcaattaagcatttatttttttttattaattaattaattagtgttttaaaataatttcgattttttcagttaaaaagggtcgcactgatgctgaaaaatatgaaattgttaagcaataccataaaattaaagagcaaaagccgaaactgcgaaacattgacatagcggaacaattgaacatctcagagacaagccttcgcaactggagaagagaattaaaaagaagattttagaatttcacactaaactttttccgaattccgatccgatttcgtttttttaaatttatggtaaagattttgctcactgccaaatgcttggagtccaatctcaaaatttggccacgccataaaactgctgaatgacctaatctttttggatcagaaaattgagtgcatcttttagaaagatttcttttaggaaagtcattcaccgtgtggctttgttggtgttgttgttgcgaaaaataaaaacaacccacaaaatgaggctaaaggttctgttctgacggaactgaccacttcctgccgggaagcttttccttctctgctaatggacatttaattatttttttatgtaaatataaaaatttgttgctgtttcgctaacaataataaatgggcgcatcaatgttaaattcgtataactgttggacaaaaaaaaaacacttctaagaattggtgatgctcaagagtctcgagccaaaatttcgcatttatcaaacagcgcttaggtataggcaccgccgatgccccgcgttgaccaaagatttttggaaacatatatagtgcggccggccaaaaattcttgattttacaaaaatgaaaaatatttttaaggaaaagattaaaattaacaataaattaaattactcaatttttttgcaccgagaaaatagccggttcgttccgttaaaatataagtaccggtcccggcttttctggtctcggcgagtcacggtcccggcttttcccagaatttacggtcttgtgcatttctaattttttttttttttttataatttttatgtgactaatctaatcgctctttgatcagaaagcgataggatgagtttttacctccttaacaaaaaatatttggaaaaaagaacctcaaaaatccttatttctattgaactcatcagtttaggttgttcgagataaaaaaaaaaaaaattgcgacgtgggaaacgagagcgaaaatggattcataaaaaagccccgccccctcgctttggctttttaatttccagaaatcactcataatgaaaaattacaagcagatttacgtgggtttattttagtgaatcaataaataagcaattttttattttacgagttttatttcgtaatataatattttccattttcttattggaaagccaattattctaagcggcgctgacattttttactgctcacttttttaggcactaatttcttatcattttaccagggattcgaaatctgaggatttttcctcattttgtggtcttttaga

SEQ ID NO: 21340 - DNA, 1607 bp, Heterodera glycines
  unsure (1)..(1607): unsure at all n locations
atttgcttcagcgtgtcctncgtgacaaattaggccggtggacagtaaaggccgccctttccgacactgccgccgggcaaaatcgaccaaaaggcacatcaaattttgggacaatctgtacaaaaattgggcataattatttaattggccttttaaattgccgaaaagagtatgtaaaaacgagcagaaattttccattttgtggagcaaaaaaaactcaccttgcgcagaattttcgcacaaaaaatccatcgcatcgcaaatgaccacttccaatcggtcggattctgtcggaaagtcgaaaagttttcgtgcaattgccaacacctcggggtcaatttcaaccgcaacaatttcggactgaaagggaaagactatttttagggggggggggggagatttaacgttttataatttggtcaaaaaaagtttaatgaaaataatgcccaattaatatacagaaaataacacagcgaaacaaaaagacaaactaaaacacacacctgcttgaacttgtcgtgcataaacttggccaaaattccacctgataatggcatttttaagttatttttgcaaaagcctatttttccaataccgccaaggccgagcagtgcaatgcgaagcggcgcctccaacgcatccgccaaaccggcagaggacaacgacggcaaaagtgtaaacgcagagagcatcattttgtggtgttggcatgacaaatcggaccacacaatgtgccaacggttgccattttttgactcttaaaaataatgcaaaatgtcagtcacaatataagtaatttttctcagcaaatcccccctttttgctacggcactcacttcgcaccacctccacctcggattggatcagattggcactgtccaggaacaccaaccgccgccgcgtggcgcccccctcgacttcgacctgttcaacggaccatttgccactgatttttgaaaagccgtgcccaatttgatcagtgacatcggcagagccaagcgacagcaaattgatctgaagcgggagacaaagccatggaaaagcgttggtaggcgattctgctgatttaaattttaatttgccattgcttccgtgacaaatcgtcgcttactttttggccggcacacgccttgggcataaagtccaaaatgaacacgttcaattccctctgaatgtcctcaaccgtgccgtatctctgaccacgaaaaaggctgacgaaagagtaaaaaaatgcaaaaaattatctaaaaattgtgttaccgtacgacgacgagtcgatgaagttcgcaattttttctgagaactgtgcggccattttgagttgcgaaaagccaatcattttctctaaaataaaaaattaaatggaattaaaacaacggaatttcaatgagccgttcgctccgccaatagactgtttggatatttaattcacaaaattttgtggctcccaaaattgngacggaatgccaacctgcctaatgncactataaacgcgccataactgcacattgttttcaactgttggtcatcgaccacgaacagnntcgtaacgtttcgcaccgtccaatgcagaattttgatggaagttttggtcgacggggcctctg

SEQ ID NO: 21341 - DNA, 1007 bp, Heterodera glycines
aggaattgggcaaattcgagtccaaattgataatcaccgaccttgaaaatccccggaaactgattttaaacataaaataagcaagttaaattagggaccaccattctttacgattgcctcaaaaactgcttaagaccctcctatgtgtgctttaaaaagtgccaaatcgaagatttattacccaccaaaatgtaacggccaaagggcgcgagacaacggccaatctcacggaacatagaagtgaccaaagcatcgctttcaccgcccctttcgtcggcaccggcggaggacggcaaaagggcatcttaaaaatgagacaaatctggcacaacaaaacattgttgaaaaaagtaacgattggatgattaaatcgcaaaaaggggtccatttccgtggctttttgtgtgcgtttgccacttcgttcgcaaatgccgtgccactcacccaaagtgcccttgtccaacacaacattcgccgacgcgtccggcaatccgagctaaaaatgccaaaataaaaaggataaatttgcaaaataaaatgtgacgtcagcggcagaacgttgctcaaatttgagactcggacgcttctcggagtgtttctttcgctgctgtgcaatcacctgaaattgtgaaaatgagttaagttggaaagtcgcacaattcacaagttccatttttaaagtttttcgtagtgaaaatggatggttcggtgaaagaatttttgcaatttcttatgtttcaatttctaaaaaccttcccgatatcgaccccacttttttaccaaaactttgaattttaaccaaaagttgcaaaaactgcatttctataacaaaaaaaacaaccacaaaatttctgcgttttctaattctcgtttggaccactttgatgtttctttaaaaggtttatcaaaaaattaaaattttcattggatttcatttatcgtatttttccattttacttgtccatcgatgtcaatgctgtgaatgttgcggaaaccgtttcataaag

SEQ ID NO: 21342 - DNA, 1935 bp, Heterodera glycines
cagagcacgacaaatatttcaacaaaaatttttaaaaaattgactagagcaatcgaacgctatcggacgacataatggaaagcgataatagatggagagtatgtataatatatagcaatctattgggttctgttatagttacttttgatgtaaactgtcttgattagaatattcgatgacaaaatggcaaaatatgcatacaacctgcatatgttttttgctgcgatggtcatttataaaacatattgtccgattacatagctttgttttccatctgaatccatatggcgttttgtctttgcgccatcgattttttctcgcttttttttctttttttaccgtccgatgtagtggttacaaaaacgaaaaaattttgcgattttgggcgacttttttaaaaagaatagattttttaggtcaaaatgaccgggcccgggacatggaaaatggactggggcgggtttgcggggccgcgactcacggtccaggtggtttgtaccatgtacaaaatagggactgggatgggattcgcggtaaaatcccggcggggccccggcctcgtccgggctatagtgaaaatattatataagccatttttttgtttcataaatcaagaatttatttgcattttgtccacaaatggccaaatttgaagctttgagtctttttaaacaaattttcattgataaattttgtttaaaatttagaatttattttacagtgaagcttcacataacttgccaacaaaaccctatataacattttccttttttattttttaagaaatgccataaacttattttgtagattcccgtggaagttttcaaatttggcaatatgaaaaaagcactgcacttcctgcggcagtttttgcccaattccttggcccataatggcatggcataccttttcccattcgatgacacgtggatgcaaaatgttgtgaagcagccaactggaagagaacacattcggaagggcatcttcaacggggatgaaaagcacgaactcgaacaaaagttcgggtggaaggcatttgtgggtcattgtcggtagaagcaagggacagtctcgataatgggagtaattagtggctaattagctaatttgtggggaatagttataaagtgtggcggtcagcagagaaatggctggctgtgcttctttctcgcttttcctttcacttctcactctcactgtctcatgttcttttctgctacattctctcgctttccttcgtcgtctgtctgcgttcattttgtcttcctttcgcttacactttttctatgcttctctgtgttctcgaaaaggaaagggaaagatatgagagagagagagatgggagagagagaaaggagagagagagatgggagggagagagagtggagagaaaggagagagagagagagaaaagagagagaggagagaaaggagagagagaggagagagcgaatagagagagagagagtggagagaaaggagagagagagagaaaagagagagagagagtggagagaaaggagagagagagatagaagagagtccaacggcgcgccaacgattcgtcaactcagtcaaattcggacaaattttatatcattcgaaagaatttttggtaaatattaatcatagctcccagactctaaattgctcaaaaccacttttataggttttcttatgcgctgaaaacgactaagcaatcaaaaattttggcgcgcttcaactttaaacctgtttttgaaccggttcaaaattcgaaaaaatgaacaaaataaggctctcctaactttttaaaggatcaaatctatacaaatttggtatcattcgacagctcttgacgcgtaggtatattttttagcctcgaatttagcttattgcgctaaaaaaccgccgcacactcgactacggcggccagtaggtggggcgagactacgg

SEQ ID NO: 21343 - DNA, 1771 bp, Heterodera glycines
gggggcccaaaacgagggcccaaaaacgagggcccaaaaacgggggcccaaacgcgggggcccaaaaactggggcccaaacgcccccgactcgtccaattttgggctctcagtgcaaatggtaacatgtgatttcgtcagaagtgatttcgtcagtgagtgatttcgtcagcagtgatttcgtcagtaagggatttcgtcagtgataataatcattttttatgaaaaaaacatttaatttttcataaaattaaaattcattcgataagtgagggatgcgcactgtgccccccagaccaaccgcaccgtctatcccggattcacgtatggaagcgacctttaccttttcgagtgtgttacgagtagctgattttcgcgtagcccagctgacggaaagtgggcacgtgaaaagcacaaataaaaatggattcggcattgcaaaaatttgagaaatcttatagaggactttgcaaatcgtgaatcgtttaaatatttacgggcctgttcttatggctcgaatttttgaatttttttagctaggtgtacgcttttttaataattaattttcactgacgaaatcactcactgacgaaatcactcactgacgaaatcactcactgacgaaatcacttcactgacgaaatcactcactgacgaaatcaccgggaaccgagtttcaattacgaattaggtaattaattattttttattaaatttttaaaaagaaattatttttttcgaaaaaataaaaattctatttaccacccatgggggataaatggagactggtggattatttttcaaccctctcagaaagctggaatattggagactgagggattaatagagtgggtgataattagagaaaatacggtatgtattgtgttattaacccacagtttactgtacaaaaaattctgtgtagactttaagctgttgattgataccaacaatgttagcaatgacctagtaagaaagaagatggctttagtaaactgagcatggtcattgattggacacataaactaaatttaaagcctcaatttactttaaaatttttatttatgccagttttaccatcaaaatttccgtgcatttttcgcttttatccaaagtgcttgaaacggtgtgaacaaacaactttaagtcgagatcgattaaaaatggaaaattcacgtccgaaaacagtgataaaaaataagaagtccatacaggcaaaatcaaagacatttagcgtttttgcatagaagctcgatgtgaacaaaagaacttaaggcgcaatgccaaataaaaaatgagcaaaaatttccgttgggaataggcaacaaaaataataaaatattgggtcaatatgtaaattcatgcgcattattttgagaatgtatgatgagattacgcctccagagttcgcgccttaatttcgcgagatttgatcaacgtggttctctcgtacccgattgcacaaacggaaaatttataaaaggttgccggaagtaacggaccgatctcgaacacatatgcaggcgtgctgggacgaaagctgtcaccgtggtaaaactggaaaatgggtcaattaataatcatacttttttggtagatataaaaaaagttatagtccaaaaactgaggctggcgcccaaacgaggtgtacccattgcctgtgtggtgaactcaggttaccagagacgttccccagtgggttgggtatataccccctcctataccccttcatactagcaatttttaaggaaatttttttttgcttgaaaaat

SEQ ID NO: 21344 - DNA, 2533 bp, Heterodera glycines
tttaggaaattagcggtgatcaaatcaaaaatggtgcagttcaaaattaattgacaccaaaaagtgattgaattgtaatgttcaagaatttgaaaatttaagtgatctgtagtgaaaagtattttaaaaaataattccaagaaagcctgatcaaatgaaaaattttttttcttattaaaatctgataagtaaatttatatattcaacaaagtgattgagctaattgacgttgaattcattattttttttaattaaattcaaaaatcgtttaaaaagatattgcattaaatcaaatcaaattaaattaattttttttttaattaccgcttggccttgggatccattacggcaaaacgtgtgttcaagacgggtgtccacaggccatgtgtcttcacgctaaggtcggccacaaattttcgtgcaagtgcaatggtcacggattggccctgcgcagtggcataaccgacgcaaaatgtgacgatggcaaatgggaaaaggtactgcttgaacttgacggcgtggtgcaacagcatttttgagatggaaatgtgctaaaaagtgaaatatgtgcagacaatataaatgtgtctgaaagtgccaaaaatactaaaaattcttatggagtggcaaaatattgttagaagttttccacactagctttttattttttgattgaatttaagcaaaattttattgttaaactaaatgatttaaattttaagctaaatgatttaaatttcaaaaatgcccattcatgcataaatttaccaaattgtaataatttgtgcaccaaaatatttgttactgtgcaagaaaatgctaaaaaacatttctaaatttaaaacgaagttttcccgattattttttcttgtttgggtgattaagtgagattttataaaatggttaaatatgcttgttttaaatttcaacttccacattgattttttttatttttagatgaattgaagcaaatttgcaaaatttctacttggtttaaatttcaacttttcgcaaaattttattgacaattaaaaataaaatctataataaaaatttaatagaaaatatcaaaatttatatgcttaaatatataattagaaatgaattttgttggtttatttttgtggatattgtacagatatgactgctgatcaatcaaatttatatagacaaataaattattactgttccgtataaatccagaaatgttcagcttcccactcccgccccctccggggcatttcagtcatttccgtcttgaaacatcaaatcatttacccgcaacaaatttcccacgagactctcgagacgttcaaccgttaatttaattgatgaaaacggaaaatgctccacttttttttgtgtgtcacgagacgtcaaacggaatcaaacacaatgttttcagagttttgctcaaacgcaacattcaatcagcgcaatataattaattagttaattaagtctgcccgacggcggttcgtctgtcgttcggcacggcgattgatcactgatttaattaatttaaacgaatgctgatcactgatccataatctttttttgtaatcaaatgaaggatttagcagcgcagaaacgagattagcaataaaaaaaataaatggcgaattgtgaatgcgttgttgctaattaatgctaaggacccagacataattaagtaaataataaagaaaaatagaaatattttttgcaggataattaactatttttaatttaatttattattttatttaaaaacaaaatattattttttgaatgattttaataaaagaacaattaaatgagtattcaccgtaaattgctaaccaaagtttaaatttgaaattaattttcggtccaattaatgctctgatttttagatttttaaatagggcttgaggatatcattctaaaaattttacaatttatctgaattccgaggcttaaataatatttttgaaaagtaacagcagttttttgaaacaaatctcgttcaaagatatcaaaatctttttaaaaagcaactaaaattttaaattttgagttcatatgagaatttgaattgcatttgtcccaaacaaaaaacattacctttatttccattttaaatttaagaacgcaattttataaaattgtttttcgtgaaaattccggaaattgtgtgggaaaattgtgccatttcctgtagaaaaatcaattataataataacaaatattttatttgtcacaaataataaataatcctacttctcaaaattatataaatattcaattaaaaacaaaagaaaattgcaaatttataataataaaaaaaatgaatgtatcatttttacaaaaattatttttttattcgctattttataaaataatatttgtggcttcagcagatgaacaaagtcaaaggaaccaaataaatgggtgcaagaaaggttttaacataaatttaaattaaaatataaaacgaaattcaccatcttttcctaggcataaaaaactttcaatgataaaaattgaaaattgaaattttaatttatattta

SEQ ID NO: 21345 - DNA, 1641 bp, Heterodera glycines
ttttttctttctcaacaaaaataagcattcttgctattattcgaatgcatttgaaaaacgctattaaactgcaaattttcaaaaaattttattcatgcacaaaaaaatcaggaaaaaagttctaaatattaggtttttgaataactttttttgaaacttaacgaaaattttgaaattttacaaattaataataaacactgagagctatcgaacaacaccaaccaatgcttaatttgatttacaatgaacaaattatggctcaaaaagtcttctgacgacgtttcggccaacgccgttttgtggtgcaccgtaaaaaccaatcctctagtctcgatttagaccatatgatttttaatatggttttacttagggtgtaacataagtttccgcacaatttttttttgacaaattcaaaaattcataactccgtaatttctgcagttattttaataattctttttttattttgttcgtcagaaagtcttctttcatttcatgccattgtttcattttttatttgcttattcaattttttagtattttttcccgaccatgcaaaaattgaaaattggcccactaatttttctcgatttttttatggtcaaaaaagtaacctgatataacaaaaaagaaggttttctgtacaaattagaccagtagaatccgaatatggccttaaatctgacctatcttttaaccctgagcttgtactgctccaactccatgcatgaagttggagctgtacaggtttgttgagaacccagagaccaaatctaaagccatattcggactcagcgtggtcaatttacttagtttaattaaattcggaatttccaaaaccacttttaaaacattttgttatttgatggtcttgaaaaatgccgtttttggagaccatttttagactcggccctccaataattcatttttgaagtaataaaatttttttcttataattttttatagtcctaactttgctctatttactcacgttttctctgcctctgtatctcttttcattttctttaaatcagccatcaaaaatacatacctcgaaaatgaccatttttacattatcaactctaactccttaaatacttttcctaatgggatttatcccttgcccgataaatagcaaactcattctcaataataatgtcagatatttcggatcatgattgtggttttctaaatttatattcataaaaaaattctttaaaaaaagttgtgcggaaacttatgttacaccctaagtaagacaatttttgaaaaatttacacaaaaatataggtaattgtggaattgtttaaatcctcatttatatagggtcggggtcacttcgccgcggcaaactcgccgcggccatctcgccgtgagaaactcgccgcgtggccaactcgccgcggcgctatctcgccgccgcccaactcgccgcggccaactcgccgcgccttgttttttggctatctcgccgccagatttttttcattgaaaggttacctcattattttgatataaaattaaaaaatgcattactttatttcataagaatcattaaaataacaaacactggtccataacacaatttgattcttttcgactttattcgaattcaggctggagttataaataggttgaaat

SEQ ID NO: 21346 - DNA, 1737 bp, Heterodera glycines
  unsure (1)..(1737): unsure at all n locations
tcggaagtataatttttaattattttgaattttnntanataaatttttgnagtgtttaaaaagatttaaatttcatccaccatcacccgccttttttttgtttttctttgccagaggcaccgtttaatctttggttctctggtgcttagctcttgtcctaataggacaaataattagcatggcttctcagaaagaatgttcattaaactgctcataattttcaaagtctcatgatttgtttcacttttttctttctttctcatttcctttttcatttacttaaaaatttactgcttttgtcacacttaccttttttctctcccatccccattctttcccactctttttccccctatctctctctctctctctgttgttgctttctctgtcagtctttctgcccaattgatccaatttctgtctttgatttgagccaatcttctcgatctcttcttctttctcactcctcgcaatctcgcgaagttggaggcacagagaaaaagaaagtgggggggggggcgagggatggccgggcaccacaacacagcctaacccccggctgaatctgctgcaatcggtcggccaatggtatcgaaggagtgtcccttcccctcccctttttgttgttgtttttccatatccctcccctttcccgcgtcattttaataacagtgaaaaaacgactttacattgggaaaggagtgtaataaataattaattactaattacgtcttcactcccatttttaaaatcatttttgatcattctttgctattttagatggccatcgaattgaacaacaacaacgcatgtgcatcaaccgaagaggacacaagcagttcaccgaacgcggccaatttgaccggcacgcccagcggagaggcaatgagcggcgaggaaagcgcacgactcaaacgaaggttatttttgcggatgaaacagttcaatcctaaagaaactcattgagttggccgatgcgtcaataagtaaaacttaaaagaagcttttaaatgtttctgtggtttctgggtggcaatggacccgtaatcagagatgggggggaagcattcctatgaaaaagtgaaaggaaaaaactaatttcctttgattttttcggttgtcataaaaataatacttttgagtcttttatgactttttaatcaaattttcatctctctggacctattacattacaccagagtatggaaaacaattgtgctttttcgcatttaatttctatgcattttcccttttcttaattttttacctgaccatagttttttctgcaaaaaaaaattgaaattttttgttcagttatgttctgcaagaattggtggagtccgagcgcacttacgtccaggacctggcctctatctcaggttctaatcccttcgaatgccggacgaattcggaaatcgcaaaatgcgctcctttcagacggttacatcgcctccctgcgggaaatggaactgagcgacgaggacagagagaaagtgaagatcattttcgccaacatcgagcagattctcgactttcacaaaacattctttttgaaagaaattgaaaagagtttgaacgattacgaagcggcgggcaattccttcattaaatatgtgactcatttgngaatttggacgcattttcgaacattttaaactttaggaacgccgactgcacactttttatgtcnaatattgccaaataagccaaaatctgactttttggtcagccaggact

SEQ ID NO: 21347 - DNA, 1809 bp, Heterodera glycines
ttaattctgcgttggatttttgctccccataattgtttgagtaccccaaacggacactgaaaaaatcgatttttttgtttcggggcagtccccccgaaccgatgcgcccagatttatggggagaccgaatccttcgggaatagcttccctatagcctgtactttaattctgcgttggatttttgctccccataaatgtttgagtaccccaaacggacacttgaaaaaatcgatttttttgtttaataaatatttttttcagaaagtcatgcgcacccgtccgatctggcaagttaagcaacgattgctgactagccaaaaggttcggtgccgtgatgaaacgaaccagcactgcttaccccgcggcacccggcacggtcccccgaaggaatggatttaattaaattctctccttcggggatttttttccattaggtcgtccgttagcgttcgattgctctagtcaatttttcaaaatttttgttgaaatatttgtcgtgctctgaagggcgtgggaggggggggggggcgaaggcccaccacgaggccgcgaagaggccgagtgagtaccttcggtgcaggaaaattattaaattttaaaattttttaattgctttttaaatatgccaaaaaatgtaggcttaacttttttagtgaaaattcgatcactcatattttttgctaattgagcagaagcgtaccaaactttgcagggatactccccggtaaaggactaacttacactgaaatgagcgccgagctagctggctcaaaaaaatttttcgaaaatctgagtctttcgtttttatttatttgcaaaattaattcataaatattttttcagaaagggttctgaaacgcaccaaattttatttacatgttagtttaggcactctgatgctttttctatcaaaaagggagatgaataaaatttttaaaaatttttaattcctttttaaacaggccaaaaagtttaggcttaacttttttttcagaaactgatcagaagcgcaccaaactttgcagggatactgaaaggaagagaaataacctattttaaatattatctagtcagttcatttaaataatttttatccaaaaaatttttttttttgttttcggggcagtccccccgaaccgatgcgcccagatttatggggagaccgaatccttcgggaatagcttccctatagcctgtactttaattctgcgttggatttttgctccccataattgtttgagtaccccaaacggacacttgaaaaaatcgattttttttgttttcggggcagtccccccgaaccgatgcgcccagatttatggggagaccgaatccttcgggaatagcttccctatagcctgtactttaattctgcgttggatttttgctccccataattgtttgagtaccccaaacggacacttgaaaaaatcgatttttttgttttcggggcagtccccccgagccgatgcgcccagatttatggggagaccgaatccttccggaatagcttccctatagcctgtactttaattctgcgttggatttttgctccccataattgtttgagtaccccaaacggacacttgaaaaaatcgatttttttgttttcggggcagtccccccgaaccgatgcgcccagatttatggggagaccgaatccttccggaatagcttccctatagcctgtactttaattctgcgttggatttttgctccccataattgtttgagtaccccaaacggacacttgaaaaaatcgatttttttgttttcggggcagtccccccgaaccgatgcgcccagatt

SEQ ID NO: 21348 - DNA, 2502 bp, Heterodera glycines
aaaaattgtgaagaaattttcaaaacctttttttcttgaaatttttaaaaaagagtaaggtttcctttttccattttatttccgcccattttgaggtgttcgagggatggcgtcttctgatgaatcgccaagcgccccattacagcaaatcgcagcttaacaaggcgttcaatcagctggtcaacttttttaaaaagcatccaccaacacacttcaattctcgaaacatgattctttcttgctgtttcttctcgttgggcctacccccaaacaaattttgggtttttccataaattgggacgccttaattccgcagttgatcaccatttgtttaaaacaccgtccgaatttcaggccaaaaagttgcaccgtcagctcgtcattgagacgggtcgtcgcattgacgggcgcgcgttggacgaattccgtcccattgactgtcgcgtgaatttgtacaaaaagttacacggctcggcactgtttcagcgtggccaatcacaggtttttactgccctcgtcgttgctgtttttggtgtattatgatttttccccgatttaagtgctttccacgggtactttccactccgctccagcggcctttcacccggacgcaattgccgtaaatcctttttttcggaaaataagacaattaactggaattaatgttaaagcaattgctcggtgctcaacgcaagaaaacgtttatgttgcactacgaatttccccaattcgcgacaaatgaatttgaggagagaggcgggaaaatgaacacaaatcaatgagcttttgtactttttgttacaggaagttttgcaaatcggcgcgaaattggccacggattgttggcggagaaggcattgcgccaagtgatgcccgagcaattcccgtacaccgtccgactggcgtgtcaggtcattttgagaccggacagcgggggtcggagaggtcccgatcaatccctagaatttaaaataggctcgggacggatctcgagtcggccagccctgggagtgtcagggatggatttatagcaaaaaagcaatattttagggtaaattaaaaaataatttaaccgattttgtataaaaatgggcccttttggttgtgttctctctctctctcccactttaattggctttttcaggtcctcgagtccaatgggtccacctcaatggcctccgtttgtgccggttctttggcactttttgacgccggcgttcccctcctggccaatcacgtggtgggaaaggaaatggcaaccaaaaaagtttttttcatttttaggccggcctggcacttggacttttcaccgacggagagggaaagcggtgattaattaatatcatttaaaactccaattataacttttttttaaatcgaatcgttttttttcgtttagcaccgagtacactctgatgaccgatttgatgggctacgaggattatgccggcgacatggatctcaaaattgcgggcactcaaacgcgcttcaccgccatgcaaatggacctcaaaatttgcggacttcctttgaggtgacaaataattaacactaaaaatcggaaatccgccttaaaaacccatcggaattgttgccaaattttccatgtatttttagtgttcttcgcgacgctcttctccagggcaaaaagggcattgtccatctgctgggactgatgcgcgacacaatcgcggaaccacggtttgtgcaataattcttaataattttatggtcacaagtttgggttaggtttccccggtcccttttttttttgaaaaatccggaattaaacgtaatgaaaaaattacacaaaactttaagcttaatgtgaatgatttgttccaaaagggccgagttcaaagcgtccgtgcccatcgtcgaaacaatgccattgcccgtctacaaaaagtcgatcattttccggtcgggcggttacaacgccaaactgctcgaggcggagacgggcgtgaaggtgaccggaaatcaaattttaaaaaattatggcgactaagattttaattagttttcattgtttttacgcctccctttccatggttaagataagttcggaagatgaagccaacattttgctgtttgcacccgacaaaaaatgcatggaaaagtgtaaagaaatgttgacaaagtaagcggtggaaaaaggggctccattccaaatgctttatggtattaatatttcacttttgtttcaaagattgctggaggaacgtcaggaggagcattaccaattcggagccatttacaaggcggagattgtgcagataatggagggcggagtgatggtcagttttgtgggggcattgctctccgtccactttaattgctcatcaaatgtgccattttcaatttcgattattttcctattcccaaatataaatgtttcttttttgtttttaggtttctttgcgtgacggtgcccatccgatttggctgcgtaattcggacctttcggcatttggacggaaaaatgcaatttctttgggc

SEQ ID NO: 21349 - DNA, 1367 bp, Heterodera glycines
ttgcctgtattaacagtgaggcgacataccccccccccctttttttgcagaccaacaaaatggtgggtaaactaagggaattggccgatccttaactaacttgtaaggaaactgataagtcatagacatcaatttccagttggaagtatatgagggaaattcagtaaataattttcattttgttatccctaactataaattactcttttttagtcaagcggccgcgctcgcagagaaaatggctcattttacattattgtcgaggagcgaaatcacgctaaccttatggaaaagcttgaagactacgctaagatagaaaaggtgttttaattctgtcttcattaattttctctgtccctttagtttattatggaccattacaattcgggcaatgaaattctgaatgaggctgagataccccaaaatgtcgacgatttggttccaccgtatgtcgttgatttgccttcaggaaaggctcaagtgacacttagcggcgcaattccacttataaatcggttgcattttcacttctttttgcattcctttttctccttccttctcagatattgttccaaattgccttctgatattttcacgcgattagttccccattatgtcgttaattccttacaaaatgccgatggaaagtgttcttattttgcacaacttcttcttccgatcaattcgccgttaaaacaaagtatttgttcggatgcaaattgccaaattggtgaaacaagcgctgtttttgcttcgaagtcattggcactaatgtccgttgcattggaggtgaatgagtcatccaaaagcttaatattgtaagcaaaatattaataaaaagttttaggcgtgtagaaaattgcatcggcaaaaagaactgagtgatcagttgacaccaacgggaaaagaaataattaccaaccttttcggggaattggaagacgaagaggaatacttgccatatttgatcaacaaatgcggaccttcaaagcgacgacgcctttacgaccgaaaggtttggacagacggtggggaaacgttagaaaatgtttaaaaaaactaaccataagtcagtaacaatcaaaaaagctaatttttgaaaagctttttgaattggtttttttgaagaaatccttttatgaaatgcctaatatttttaaaatttaagaattcaaaaaagtaaaaaattttcaatttaagtaaatatggggggggtgtagtgcactcggcggggtttttcacacttaaattttcatatatattttttgttctttctgtttttgctctccctcttttgctagacctttggtcataaaccagttttacattattttagacttccaaatcattgcttgggactttgtcgc

SEQ ID NO: 21350 - DNA, 484 bp, Heterodera glycines
tcataagcggattgtttggtggcaaaatgcaaacaaatttttgtgttattcgaatgcgctaggcgggctcgacatttccaaatgtatcaacaaaggggtctatctacactctctggcaaggtatggccagccaaagcagagtggggcataaacaagaattttttaatctttggtatttcctctattttgtgcctgctctacatttatgtcttgtgccaatatgcctattgcaacagaaatttattcagctttcccgacaaattgttgagataattattctagacgatttttttatatctcaatgcttaactatcgcctttttgtttggcaactggtagaaattggcagtgaaaaaaagtttgtttgtaactatttacaataaaaatttatgtagcatttgtagggcggcaaatagggcacagttccctcgaccaacttttaaaaatagattttaaatttataaatcaaagaaatggacaacctg

SEQ ID NO: 21351 - DNA, 1271 bp, Heterodera glycines
tgagcattgtcggcactgttcgaagcgtccaagacgagtccgctggtatcgccggccgaattatccatggtggtgtcggtgttgagactcttcccaatacagctaaagaaaaggaaatatagtgcatttacgggggtacccccgtaaatgtacaagtagtaaaaaacaaagttaggaaacgcactccgcgcaaagccatgcttcacgttcgatccctttgaggctgctgtagttgcagcagcccctcgctttgaccttgtggtatcagcccgaacagccacaacactggatgccctttcctggaacctaaaaaccgcattcattttttggaattgtgaatttttaaaaagaaaaagcctaacactttgttggtacggcggttcagaacgtcgattgggtagtggcattttcggcacgactttccctgcttgtcgtaagaggcatcagcgtccgaagagctgcatcggccctttcgttgattgtcaggtcgtctgggacattgtcgttggcatcgtcctgctgctgctgctcggtgttgtcggccgcattctcttcctcctcgtcctcttcgctttcgctgctgaggtccgggccaatgtctgcgagaccgagcttcttcagcttagccttaggagcgatctgtttgagctgttgcacttgctgaaaaccattaattaaaaatacaaataaaaggatgtacaaaacgtacatttacattggtacccttgtaaatgtatatttagtacatatttatttatagataattacatggtgcaaaagaagccctgtactaactgtatatttacatgggtactacccttgtaaatgcacattttgtatattaataaggaaaaaaaattacattgtgtagagcagcggcccgagctctcagagcagccaggtcgtcttcggccgcagcaaggtcgtcttcggccgcgccaaggtttttgagcgttgcacggagatcacttttcaatccgttcttacgctttcgaaacttggctttggtgcggtcgagtgcactcctgctcaacaccacctgttggaagacaatgagaaattaaagtcagatcaaagctaaattcaagtccaattgcttacctctcgctgcagcagcccaatgatggcttttgcgcgaaggctgcgcttgacgatcgtgcccatgatctcatgggcgcgtgtcggcgttgacgttcttcaacgtcggagcggtcagaggcttgatcaaatccacgtccgccacatcttcctgtcatataaaaaacgagtaa

SEQ ID NO: 21352 - DNA, 1533 bp, Heterodera glycines
  unsure (1)..(1533): unsure at all n locations
tctctcgctctatataaatgctctatgtgtgaccaaccaaatattgactgtaccgctgctgttctttgccgttctcgtcccgtctgttgtctcacctgccgccattgtgccacccatccaaaatgccattccgccgcccctttcgatttgtcccatttccgtccctccttctcatcctccgaccatttcatcctcccactcttccggcgactcttccctccttcctcccctatatgttcctcctcttccccctcctccaaatttgccaaaatttgggtaggacggcgacggcatttgtccccacacatttcaacacttcctctcataaaactgaaaagcccaaaattttcaaaatgaatgccaagcaaacttgaaaaaaatgcgcgaccgcaggattttctgtccgcgctctccacccctgatgtacacccccaagtattgattagaaaattaaaaaaacatacccttaagaatgggaaaagtttcccactaaattcatttattttcttggtcataatttttggtttttgtaattatgtattactggaaaaatgcattcaaaaactcgaacatatttttcactaatcaatttgattaaatattttttggattttaataaaaaaaaagccttttcggtaataacacaattgatagaaagaatcaatttaatttacattgcgaaattaaattttaatttttcgcgactacgcctttaaacttgagtttatcttaattaaaaaagttaatgaattttttttggcacgcttcaagcatcgctcggttaacacggttttaggtcagcaatttttcagctttgccaatgattcattgtttgagtattattagattaaaaatttattgatgagagtcaaaagacaacaaaccaattcaaagatataaattaggatttagaaaacaagcaaatcacgtaaaccgaggcttagttgcgacggggctcattgttaaaacatcaacagtatttccatgcttatttagcgccacaactgtcaacgcgtaaagggtcgccggcttcagattctttacgactgcggtgtaagattttttcgggagaaacgcgtgctgaaaaacgcggcatttcgcgatttaaaaagtttgtccgtggatgtgccaaatgggttgatccatttaaaccgaggatatttttgcaattgtttttattttttggccttccgcgccgaaatggggagggcggcttcgggctcgaccaccccaacccccccccccctcctttcttcataccgaatttttcagtcattttttgtgtggtgatgcttagcccagtttttttttgctatgcaatgccttcctttttgcttgcactccctgttttgtttactaacttgcggacactttatcgtcttccaaacttcattgacattcttgtactgcacttcatagcactcgatttcaacatcggtaatgctttggcttttccacgcaatggtaatcgtggctttcggtgctttcaatagacttaagcttgcattaancaaaaactgagcaaaagccatt

SEQ ID NO: 21353 - DNA, 1119 bp, Heterodera glycines
  unsure (1)..(1119): unsure at all n locations
gtctgtccttctcgctttctcctcctctgtgccgtcatttcgagcccgccggtgtttgtctatggaaaatcaaataaaagtgtgtgctaaatttntaaaaggcaaagccacaaccctttacataatttgtatattaaatattgacattatttgctgtttccgatgtgggcaaagtgttgctgcaggaaggttcaggcgaacgcgatttgtttcctcgagtcaaccccttatttttaaatacaaagttataaaaacacgaataaacttaccaatttttcaaatatggggtccaatttttcttggatggtaagcgatttctttaccaaatataaaaatcaattccgaaaaatattgaaatatttacttttccttgatttgtgtttgtggcagtgcctcgctccaggcggccaacgcgcacctatgcaaaaaaggaatcgacataacccattgaacaagtcatttggtagggaaaaggagtccattaaaatacctatcaaacccgagtttcttgaactaccatttcctatgttcaaatacaccattcttacatgttagttttttgtttagactcaagtcgaatgcacaataagtgcattaaaacaaaaagctacgaataaaaccactgacaacaagtgcgaatccaacagaagaaaagcccattgacaacaaacctccaaagcgtcgaatttttggttaaattcaaggcgtaactcgtctttcatttcgtccaatttcgttgatatttggtcaaatttcgttgttattttctgctccatctcttctttaaattggtcaaatttctcgattattctttcttccatcgctttctaaaacaaaaacattaaaaattgatttaaactattatataaaacagattcttattaggattattttttgatcatttaacccaaattcaaacaaaaactgtcgtaaaatttaaatgaccattaaataatcggaaacaaataaaaggtaacaaaaacgggtcggggtcgttttggcacgggccgttttcgtacgagcacaagtttttggctataacttttttctttgccaatattagcatgcaaaatttcggaaaatctcgttaaggttcaaaaaagttatggacaagaagaa

SEQ ID NO: 21354 - DNA, 1352 bp, Heterodera glycines
atcaggacaaatcttttatgtttaatataataattaatggatataatcattatctttatataaattatgaaaatataatttaaaatttcataacaaatcagaatagctgatatgaaagaaataataaaattaaaatttcgaaattactgaattatggacattcaaaaatttagtaaataaatctattaattcgaaagaaactaccaaagaaaaaagtttgaattaacaatcaaaaaattctattgtcatattatgtctttatatatgattaaaaattaaagaaaaaaattaataaattgttcgtaattgatgttaaatatagtaataattaaaataaaaaatagagaaaagttataaatatattgtagcgaataaatttgaataaacaagtcccaaaactattacggataacataaaacaaaattaaacaaatcaatacaaatttattttccacatctaaagggctaatgttggcttaactatatttgggtggacgagcacgcgtgctcaaacatcggcaagagaccaatcgaaaccatgagatgtgtataaaatttcaatttttagacaccgatagcctgatccttgtccatcccgatggtcggtgtcatcttaaaactggcccgcacctgggacagtttacggacgagtacccggaccacaaaatcatcgaatttttctaaattataaagtaattgatgcacaacaaataaacaagtgctttaaagtttttgtgcaagaaaattcgagtgatataaacaaaaaagttgcttgaataagacagttcgaatgaatctaaagaaaatttttaattcaaaaaccaataattattaattttcatataataataatataaaaactttttgaatgttagagcaaaaataaatattttaaaaagtcaactagttaattcatatttatatatgcaaaatattatgcaatattaataatattattattaaaacaaagtttaatagaaattatcgaataaaataatttatcaaatgttttttttatagttttagttttttaggcactttatatgttgaaagatatcatttaaaataaacgaagtgataaaaagagagacaaggatattaaatatttgacataaaaatgaaaaaaagtaaaaacctttgatatcctcaaaatgtgccgaaaattttatcatagatcgatttattttagtttaatgaaaagaaaataattatcagatttaagtaatatttttagttcaattaaattttcaatcaaaatgatgtgaatgttgtgattctacccagggagaaattttcacagtagtcgtgaaaatatttcacatagtcgtgaacgagcattgatgatgattttta

SEQ ID NO: 21355 - DNA, 1605 bp, Heterodera glycines
  unsure (1)..(1605): unsure at all n locations
aaattaaaatcgataacccataaaaataatacttttatttcaatatgtaaataaatgacagaatttacatcaattagcaatcaaaaaactacaaaatgaagaatttattatattaataatattgataaataatattaatattttaatcttatttgaatcactcataaaatttcaaaaacatacatattatattaaagggccggtctaaatgggcccgagacctgnatgaaatctttttttcgtaaaattttatttntaaaaaataatgattcaaaatattgtccattatttctggaagcttaaaattatatccatgcttctaaaattatattattaatatatttaacgattaatgactaaagtgaaaacagcattaaatcatatttacaaaaaaaattcttttttctacaccatagaatattattaagccattttgatgcacaataaccaattgttataaaattaccacatataaattttcttttattttgagtaatattaatcaaataaacaaaaaatttagcttcctcactcgggcactgccggcacggaatgacagagatttttaaatagaaaaattaatacttcgcttatcagcttttgtttgaaaaaaaaataaaataaataaaataataaattattagataaaaaattaatgaaataaataaatgtaataaaataaaaaaagataaataactaatagaaagcttatttttttctgaaaattgcatatttccataattaaaaaaaaattcttggttatttttataaaaactgatattgtaaaaaatacgaaaatttgcccattaaggaaaaaataatcagataaacatttgagggataatagagaaattaataaataaaataagcataataaatgatacaaaaaataaaaagagaaaattttttaatttatatttaattatttcttttaataaaacaatttaaattaaaatgaaatttcgaaaataggagaaaataaaaataatttattttaaaaaactaaaaaaatgcacttttgtaaaaacttgtataaaacgaaaagatctaattaaaaaaatgctgtattataacgagaaagaatgtcgcaaacttacctttgaatcataagaacaaacaaagaaatacctaattatattggctttaggaaacatgcttctcaacaattcaccaatgactcagcatttaattctttaaacattaaaattacatattaaaaataaatgaaaacccaaaataaatctttaaatgagtttgggattaaaaaaaactagcaataaataacatatcaaaaatggcaaatattaatgattttaagtgctcaaaaaatgattatattgtttaatgctcaaaaaaaaaaaattataaattatatgacgaatggagcagatccattggtttgccttgtttgtaaaaattgaaatataataatttctatattttttcataaccaaataaaatattaacaatttaattcattaaaacataaaaatcacaacataaaataagtgaaaatctaaagtaaataataaatttaaacgagcttgtgataaaaaataaatagcaataaatagcttatcaaaaacaataatattaattataaaa

SEQ ID NO: 21356 - DNA, 1476 bp, Heterodera glycines
  unsure (1)..(1476): unsure at all n locations
ctgcannggtcctttttccagaaattttcagcggatacccccctccccccccccaaaaaaaatttttgtacatttttgtggtctcacttaattaataaattttgtacagagagagtacaattttatttaattacgttcattagatgtagtaattaattgcgacaatatgttattttacaagcgtttttttatcaattggagaaaaaaaacatgcaaaaataaaaatgggttgtatattttaaaatggtcttatcaatttacaataaaatgggaatgaaatcccattaatttttggtcactattctgacaaaataaattcgtaatttgccaaattaaaaaaaaattcaaaaataatttttcagccgtgccttcctcgatgagcctgttgtggcttggtaaggagaacattccgccttcgtttgagaagcatgaaatattggtgagttgtgagttagtccaattaaaaagaaaataacaattttttttttggtttataattcttacgaaaagtttgaatttttttttaattttgggaaacatagaaaatcatgacaatagggacgaaatttattgtgttatccatggtccactatactaaaaattaaaaaagcttaatccatgcatgtagcgagaaaaaaaaccattttggaggaagaattcagaagttttttgttgcttcaagaaatttaattttggacaatttttcacaaatttttggaaaaaaaatttgaaaaaattttttattattcttttttcctaataattctaaaaatttctaacaataagtttgtaatatttaaaaaacaaaattttttttttgggtgggggagaaatttaatacatccaccaaaaacaaaatagtaataaatcgaaatttttgccgaggtttcaaaaaaaaattttttttttttttttgtagttgaatttttcgtctggcactgacaacagctccaccggcgccgccactgcctcttcgctgaacagttcaaattcatcaacaacaacaacaacaaaaacaagcgccaatgatggagatgaacagcgaaggattaaaaggaccaaaacaatggcaacgacgacgaccaccactgacagtggaaaaagtagcagcaaaagccgaacaacaacaacaacaatcaacacgacgacgacgacgtcgagcagtacaagcagcagcaaaaaattgttggtggtggatgaaaatgcaaaaacgtgtggtggtgttggcattggtgctgatgggtaagaagtggttgttacaaaaaaaatggaaaattggaaaaaaaaaattttttttttgaataaattttttttcgtaaaaaaacttatttaaaagatttgaaaactaaaaaactttttaaaaaaaagttgaaggtggccatataaagctacgaccttctcccgaaaatttttttgaaccatcagaattagtttaaaaaaatttatccgtttttttaaattttaaaatttgatttt

SEQ ID NO: 21357 - DNA, 418 bp, Heterodera glycines
gcattgcaagattgctaagcagttttgcaaaaaaaaaaaaaaatgttttttcattctgtttcggagaatcgttatctgtccaaaaaacgcgagcagtccccccccccctttccccgtaaaacatttgaaaatttttagcaaactttgaaaaaaattttcgattaaatttttttatttgtttgtccccacaggtgtgtggatgtggtcacggagtttgagctgtgcccggccacctttttcctcaccgtttccctcactgaccgcactctgtcccgcgtggactgcccccgggacaaattgcagctgctcggcgccgccgctgtgttgagcgcgtccaaaatgcacgaaattttccctcccaccatcaaggacattgtgcacgccacggacggtccgtctcgcgcgtcatattcaaatt

SEQ ID NO: 21358 - DNA, 2140 bp, Heterodera glycines
  unsure (1)..(2140): unsure at all n locations
cccccccccactaatttcccaccccggggcggtgcaacagagaaggaagatatcccttatctctcatcccatcccatgcttctccccctttttatagcttcccctctcagcccaaacagcccccctaagaaacatttggccaaattttcgctcttgacaaaccgtgtgctttaccccctcccatcctcccatttgacagcttttgtgtggcgccgccgccgcttttcctcctctctcgcagccaaggcttccacccatccctcatttctctcggcttcttcttcttccccttgatccgccgatatccgtctccaatccgcttcttttcaagcagccgccggctgactgacacatgatgcaccgccattcgccgatcgtttggccttccgccgtcgtcgtcgccgccgccggtgcgtccgtttggctctcacttttcactcatttgccgccaccgcctccaccgccacaattcacatttaattttcgctcccatcagttttcattcatttggcacaagcatctcaatctcagattttgaaacccctttcgttttattttttttccgtttttttggcaatcgatttatgcttagttcagccaaccatatgggggttcggtgaaaaattttttcatttaaaaatttgtttgaaatttttcaaaaattgtcttttatttttaaaaggaaaaacataggaaaagtgacgacaaaaatttaaatgttttaactatgtctagtgtagaacataaaaggtaactcgcccggtgggactcgaacccacgaccccagcaatccgtgccgtgctctaaccaactgagctacgggcgcctcttttagaggttcttcaggtcctttatcccactttctcccacactccgttccttctggcatcacactaggccaaaatttcattttgaaaaaatttaaaaatttaacgaaaatgaaatgaataaaatttttgttgaaaattttggcagaggagagatgttttttagttttatattttaatggacattttgtcatttgatgaacaatttattttaattgctttttttggatatttgattctaaaaaaaacaaaattttatttttaaatacaactaaatgatattcattttaccaaaattccgaattaaccaattcaaaactttaacaaaatttttgtcatgactaaaactatttttttgcgtattttaagattttgttgatcgacaaaaagcggcttttgcgccatcggtgccgataggcgccgccgagggaaaaattgagaattttgaccatatttttagcagattttcattaaaaaattcttaatttttggtttttttttgggaaaaaattgattctattttcgttttgatgctctattaaaaacccaaattattaaataattgtcaaacattatgccaatttatcaaaatttaaaaagattctgaggattttccccaaaagcctcaaaaatcctcaaaattctcaaaaaattcacaaaaatcctcaaatcctcattttccaaaaaaaaatcctcattgacctatcaaaaagccacaaaatgaggataaatcctcagatctgggagccctggatatcatagtgcttcaaatatgtttcacattgcaaaactttatcttctcaatattttactcagatccccattcttacaggtgcatatttttttgcctatgccgcgggttgagaaaaatttcgggttcgggtttcgggtcgagtcaaaaaacctcgggatacgggatcaggttggcatcactgttgtgacaacaataatgttggattttgatggaaaaaaagaaattaaaaaaaataatattcaaatgacaaataatttttaaaaacatttgacaaattaaaaatgaaaaaagttaaataaacggcaaattgtaatttgtaaaggaaacaatagaataattttaaattttatttcattataaaaaaatgaaattttattacaatttaataagataaagcatccaacgcacacacgcacaaaaacttcagtgaacatgatgcataatattttaatatcttataatatttccttttcagttttaaatcattagtttctgtttggaatttaaagtttaataaaatttatttactttctcgtatcttctctnttttgactctaga

SEQ ID NO: 21359 - DNA, 2550 bp, Heterodera glycines
  unsure (1)..(2550): unsure at all n locations
atgaagggtagggacagatgggggattttaattgtatttttgaggccggggttgaatactataaaaataaaattattttttaaattatatagaaaatttctaggctggttttaaggttcgctgattacggatctgacatccatttagaccaaatgctaatcccgacccgtattcaaacaaaaacttgaaaattctaaattttaaaaaatcattttatggtgcgaaaatagctcgaatacggattcggggttcgaattggatgtttgattcgtaatcagcgacccctaaaacccactagaaacttttttatatgatttaaaaaatgatttattttttatggtctgtaaaatgcataagtaccaaaattcaagtttccaaaccaccggcccggattttaaattttcgtttttgtcagataattggcagcttaaccaaagtgcataaaagtcccattttaaatgaagagatagaaaattttgactagcatttgtgcaagttttagtcaatcaaacataaagccttaattatgaagagaatattgaaaaataaccacagctttttttaagaatggtctttttaattatgagtaaatttggcgaaaaaataaataaaacgaaatttcgatcactttttcccgatcataacattttgaactctgattcttcacttttcaaatgctgctgctgctgaacgtcgtcgtcatccaacagttcatccccgtcctcggcaccacttccggcttcaacatcgctgacgcatccgtcttcggcacattccccgttgacattgtccatggcattccgtttccgatgcttgtcaaaaaaggcacagcgcgacggttggaagcaaaaggtggccaataaagagacgaaaagcatctcgacacagagcaaaaagcaaatgtaaacagtgggaacaaatgaaaatcatttaaaaatactgtaaaagtgccaacaaataaattgtgccacttttcctcactgctcacattgtgccaccgccgaagagggcaatttggcgggagcatgcgctatgctcggcaccatgtcgagaatgccacataagtcgccgacaaacttttgcacggaccaaaacagttggcagaagtcgacgatacggaagagcagcaaaaaacttgaaaaatcgaanttttcccataattatttcatttgaaaaaatgtgagacgtgccgatattcgtgcaacagcgaagcgccgacgggcacaattacgtaagagccgtaggagccaataaacatggaaatcatagcagcaaaattggatatttggaagtacatgtgtttgcgactgctcagctcctgagtgacagaatgccaaattatgaaacattttacaaaaactgtttgttcaccatgaacacggtgatgttcaaaatttcgagcataattcgtacaaccggcgattggaacacgagcacttcaaaccggcggaaattttgcctgaattttcaacaaaaaaaaattaattaatttttcaattttcgaggagttcgaagatcagagaatgttgggagcacttttctgatcaatttcaaattctctgatagctcagatcacttctctaatcaaaaagtttggtccattctctgatcagttttctctctcaatggtcatgtaaaacgcactctgtcggcagaaaatcctcgaagcagatcaaccaacaagcaaacggataaattctgatcgaaattcgctcgcctttggccatcagtttttcgcacatcgatttgcgagaaccgtgcagctgaaattggcacaaaaatgaggtccaatagcattaatgagttaaactgaccgtgttcatctaacagacgagcacaaaaatgcagatcatgtaatagacgagcgcaagtgcgtacaggaaaagtgccgccatcggcagaaccatgccagtgaagccacaaacgacgatcacctgaagagggggggggggggggggtggtggatagtaattagggtaattaactaattgaggaataattagataagtcactaattgcatgaggcttatttggcgtaaaaaggaggatggaatgaattttttcaaaatttcatcagatttaacgggttttcgtctaaattttgcatagaatgaataaatttttggctgccatgatcaatgatcatgtttcgtttctctcggctaatcaatcggatataatatggaaatggttccaaacgctaaaaatggttttaaaaaggacgccctaaattagttttttttaatatgttttattcaccggtggcattagcaccacccaatagagttcggagcgtattttctcgtcactgatcaaagtgctgacgaaaatcagatggagtaggcttaagcagatgacaatgccggtcattgcagcagcgccggtcatcatccaatgcgaaatgtcaccaatcgctgaaaatgggaggaaatttgaattaccaactcatttcgttcgaatttgggctttgaattagtcgaaatggacgacttttcgttcgaatttgtgtccgggcttttgagttagtcgaaatgggctggcattattcgc

SEQ ID NO: 21360 - DNA, 2451 bp, Heterodera glycines
  unsure (1)..(2451): unsure at all n locations
tttttcctctgttagcagtgagttattnagatattttttatatgggttttcgctgatgagtttgttttcagccaaggtgatggcgtaagatttgagcgaagagaagaagttcaggcagttgctgaataaatatgcgagtgaacaattgcgtttgtcaaacttggtcaaaccatttgaatccttttaattaattttatttttaattgtatgtataaatgaaattaataaaatatattgcactttatgacttcaattaattagattttcttggttttattcccatccatttttttattgtggtgggcggcataacggaaagtatccaatgatttttaatacataagaatcttttttggtgctacgacgttaaaaaagatacaatataacaaaaatgaaaataattaaaaatacagtattcgcatatcaaagatattttaaaaaaagcggacaaccatttaaaccgatggcgccaaaatcaaaattacgaaaaaattttcccaatcccctagggattttttcggaactcgaacagccacacaaatggacgaccgaattcagcctttctgcttaaatgtctcgtcaaaaaagtggacgaacggtggggcgcttcacaattgctaatggtcagtctttggaatgggaaaaggaaagagccaggaaataaacagtttaatattttacctattgtaaacagtcataggaaggaaaatgttgtagcaccatcagatttttccgggtgcactacgttcccccccccccggccacttatttgactctcgacactcatttctctttcgacttcaccactcatttctctctcgatttcatatgcttgatcagatttcataaacctgatgaaatgtaagcatctttgaattcaaaaccgatttaaaattattttccaaatttaggtgcgttaacattaaacatattttggtggtaatactatactattgtatatgaaaactgttttcggtcaagtacaaagattaccagttgatcagatttttattgctttaaattttcaaaaattttggttctcaaaaatagaagtgccaattaatatgtagcattgattgacttactttttcatgtcctttggcttgtatgttccctttttgaacagttccaacgccaacttaaaaaatcgataattgcgttgttttctattcattgtatttcttttattgagtctatttacattataataataccagctttttcttatcttgtttaatttttattttgcatattctgatttaatatatttcccccccataatttgatgtagtcctaaagtcttaaactgtcttaaataggacagcaacaaccatgttatcaatcctatttgaaatttgtttgacttttgactatgcgttgtttattattctataatttttagtgactttttcataaatttagacatttaaccgaaatttactaactatgatttacactttcttctatgctttaccttagtcgtatcaaaatttttgatttcaaagtcgaaactttttcaatgttttaccaagcctttgatttcttcttttcactctccgatttgctcaaaagaataaaaatgagttcgaaatgttgaaaaaaatattttgaaatgatttagtaagtttaaaataaataaaaaattgccaaattttcaatattttcatgcctttttaccatattttcccctattaaattgcgtccgtccgtctttttcattttccttctttttatccgttcgttcattttcatttgcctttttctgacctttcggccattttccctctccaataaatgcgaaaagcaaatactcacaaacagaaaatgataagtgataacaaacatatcaaaacactggccagcaaaatcaacaaataaaaaggcacataaaaatatatgcaaatttatttttgtttttatttggcgatttattggcgagaaattccaatggcatttttctatttttggaattctcccgttttgaagaagcacagcaatggaggaaaggcgtacggcttctgcccccccccccattcccttcccggccatcaattcgcatttgaaggaaaattccaaatttttatttctttaacttctaaatttgtttcacctgttgaaattggacctcacctgccgttgaccgtttggctatgtttttggtttttccgatgaaatcccgtcgtctgagatgagggagttctcccgttgttgttgccgccctcccatttcctaaagcccacccgtgttgctgttgtggtgccattcggatgacagttgcctttggcccatccatccctttaagcggtgtgattggaaagcaaagggaaattgacacatgagaagtgatcgatgagtggggggggggcttttggggcttttggttttatccattgctttgatttggtggtggacactgcaatcactgacagccaaagggaagaagcaaaggat

SEQ ID NO: 21361 - DNA, 1165 bp, Heterodera glycines
cgcatcactcgactcagcaattccttcctcaatgacttcgttgcagaagcggtcaacatcgactggaaaatcgaagtcttcgaataattcgtcaaagattttttgcagttcgacgtcttccccacaagccacagcgccatgagcacctaacgagaagcaatagcgtaacagttttggaaattagttcaaaatgcttggcattgctcactttggccacacatgccatcgcggacgccctcttctccactcgttttggccttccattgccgctgcttctgctggccctgcttgactcccgctcccgctgctggggttcgtgaaaggatgctgctgatcctacagagtctcgctggccaatctgttccgccgctttttccgccggtcgtaccaaaaaggagggcttcatgtcgatggtctgctgatgatggttaagcattcgttgtggccgaaactgccgttgcatttttcgctgtggtgccaaatgactttcctcgtaattgctgggctcatgctaaagaaaatataatgtttttaatagaaatactttttcgttgcaatttttaatgttacttcctaccccatttttgactaatcacctaacaataagccaatttgtggcttttgggctggatttaaaaaaaatatttgaagaaatttttggtccggcgatgcagatatcgaatttgtatgaaatttgttaagaaagccggtaattttataatgttcatagttttcaataaaatgtttctttgttcttttttcggtctaaattttatatttccgtttcgatttttttgagaaaattaatattttcattttttcgaagggaatctttttatttttgcacgcctttggcctaaatatggtcaatcttattctttggtttgaccattggattttctttctctaaactaaccttggagttgtgtcgttcgaatgtgtcagtgttgtcctggtcgggccccgtgcttttttcctttccaaatcgaattatctgattctccgcctccaatcgcgtgttctcccccctcaacagattcacttctcctcgcaatcgtccaatttccaccaaagcgcgtctcaatgactcctccaatcggtgtgtgttcactttctttctgtccacgagctgcctgagcggcaatcctaaatatttgtgagctgt

SEQ ID NO: 21362 - DNA, 984 bp, Heterodera glycines
actcgtcttcttcggactgatcctggcccacccgtcagaggcgttctctgctgacgggacagagggcgatgccttttgtcattgactactggctggacatttgaaaactgttcgccaggtgacagcaccgtagaagtgggtgctaataaaatttgacgagacgaaccgagagccttgaaaccacaaaagataaaaaaattaaaataaaaacaattgtgcaaattactctaataatcaaaaacacacctcctaattcgggaaaaatatacatctaaaatctagtttttgaatccacccctcaaagccaaggatctgacgtcagatttgaatcccaaaataataaatggattaaatgaccaattcattttccacgattaccctttgccagaaagtaacaaacatttcctccatatgtacaatttgtacgtaccattgggtcaatgattcgaccgaccactcgcaacggctgtggtgaggatttcgagatagtcccactcaaaaatggtgtaggccgcggttgtatgtgcagcgctgacagattccttgtggtaataaatgtcccagggcgtgcgctgttgggggtcctccggggcaaaatgtacggactgctgttgtttctggtggccattctgctggaacggttgttttaagttttcctagcactccgccccaccgtagtttttcgtcacttaattgttgcccggtaattccttccttagagtagaaagaccaaacaggttccacattcgcattggcttattttgctttggggttttcaacgacgacgggatcgaatgaggcgaggggaaaaggaagggacacgtcgactaaaagggggaatagaaagagaaagaagttagggaaaaagagtaaagtgggcgtagagagagagagagagagagagaaagagagagaattagagcaataagagaaatggtggaagagcagaaggaaaaatgaatgaaaacagagcgaaaggagaga

SEQ ID NO: 21363 - DNA, 2380 bp, Heterodera glycines
  unsure (1)..(2380): unsure at all n locations
ggggggggggctttttttgtatctttagagaatgaccatttttgaagtcgcaaggtttttgaataaatttaacatattttggtcaatttaggattttaaattttgacttttgtttcgaattcgggttcgcggttcggaattcaccaaanaattttcaaaaaaaaagtcgacattttttgaaaatctcctaaaaatagctcaaaatcgcaaagttcgtcacttttcgttaacaaattgtattaagaaatgcaaaaattttccggcggcgcctatcggcaccgctggaccccctgttccccaaaagtcttttgaacgcaaaaaaaagtggcgtgaaaagcaaaaaaaaaaggtcgtcgcccgggcggaggtacctccccacaccaagccgaaattctgggaccgtccctgctattctacatacttataattgtttacaaaaaagaatctttttaacttttggttaattttcacaacttttttttgcactttttcgtgacttttttgccggtttttgacttttttttcagtcgactttaaatttgatttcttcttaggaaaaaattttttttgaggagggggggcttctaactcaggggtggcttctaggcacggcaactaatatcactgcgactaatgaaagcggcaacgaaatgacacagcaattaatagggctgctaattttatgtaaatacatattttttcctggtttctccatgctctaaatataggaaaaacactttttttttgtgtttgcgaacaaacgttgggacttttatttgcatatttttacatattttgggatttttcattaaatatgtacatatttttatacatattttggctttttcgtacacatttcgcaatttttcgtacatatttttcatttttttttacatattttgaggatttttgagaatttatagaaattttttgtaaaaaattaaaaaatttttttttgaaaatgtatccctaaaaaatcgattttttttcaaaaaatgatatatcaaaaattaatttgtaaaatattcaaatgtgattctaagcctattttggtcgtttttatggcattttgtgcctatttcactttttacgaagaatttttttccaaaaaataaccattaaaaaaattttatttacatattttcctacatatttgaggatttttgtacatatttcatacatattttagcattttttatacatattttatttacataattcgcaaattttcttacataaaattagcagccctagcaattaattatagcggcaactaaatgtcacggcaacaaattggcactgcaactaaatgacacttcgactaattagcgcggcaacgaaatggcacggcaacaaattgcactgcaactaaatgacacagcaacaaattggcacggcaactaaatgacacttcgactaattagcgtggcaacgaaatgacacggcaacaaattggcactgcaactaaatgacacaataattaattatagcggcaactaaatgtcacggcaacaaattgcactgcaactaaatgacacagcaacaaattggcacggcaactaaatgacacttcgactaattagcgtggcaacgaaatgacacggcaacaaattggcactgcaactaaatgacacagcaattaattatagcggcaactaaatgtcacggcaacaaattggcactgcaactaaatgacactgcgagtaattagatcggctactaaatgacaaagcgattagtgatgacaacaacaatagacacgacaacaatttgacactgcaactaaatgacacagcgattaattagagaggcaactaaatgacacgacaacaaattagcacagcaacttaatgagacagcgattaattaactcggcaactgaataattcgcattaataaatagcaacaaattaactaattagttattagtagggctcaaaattatatcgactaaaaacatcaaatatggacataaatatgaactaaaaatgcccgaaatatatgttttaaacccaaaaattctcttaaaaaaagaaaagttcgcaaaaaagggcagatatttataaaatgccaaaatgatcgacataaacataatttttcgtattttggggtgtaatttctaaaattttctaaatattctatctttactaaagtgtctttaaaagcaatgaaaagccagaaattccaccattgttaacattttattattcttttacatcgctctctctgtcttagttatttttcactcttaaaataaaaaatttgttattttcatcaaaatttaattgtcttttgtattgctcatatgtaacaaatcttacatatttagcggactgtccattatgcctttatcgtttactatctcacatcattggctgtc

SEQ ID NO: 21364 - DNA, 946 bp, Heterodera glycines
ccgcaattctaccaaaaacgtgtttagaccgcagtaactcggctcagagtgaagattaagggacgcaaaagagacgatttaaaagcgattcgaaaattctatcgactgatataataacgatgcagtcgcggcgttgacaactgagatggaaccaaaagttccataatatctttccataaggctggaaaggcagaatttgaatggccagtcgatatttacactgagcacccgttgaagcgggtgatgcgaagccatagcaaactgtatttttaaattctggccgcaattctaccaaaaacgtgtttagaccgcagtaactcggctcagagtgaagattaagggacgcaaaagagacgatttaaaagcgattcgaaaattctatcgactgatataataacgatgcagtcgcggcgttgacaactgagatggaaccaaaagttccataatatctttccataaggctggaaaggcagaatttgaatggccagtcgatatttacactgagcacccgttgaagcgggtgatgcgaagccatagcaaactgtatttttaaattctggccgcaattctaccaaaaacgtgtttagaccgcagtaactcggctcagagtgaagattaagggacgcaaaagagacgatttaaaagcgattcgaaaattctatcgactgatataataacgatgcagtcgcggcgttgacaactgagatggaaccaaaagttccataatatctttccataaggctggaaaggcagaatttgaatggccagtctatatttacactgagcacccgttgaagcgggtgatgcgaagccatagcaaactgtatttttaaattctggcagcaattctaccaaaaacgtgtttagaccgcagtaactcggctcagagtgaagattaagggacgcaaaagagacgatttaaaagcgattcgaaaattctatcgac

SEQ ID NO: 21365 - DNA, 3209 bp, Heterodera glycines
  unsure (1)..(3209): unsure at all n locations
tgcttcatcatttgttatccgaattctcaaaaagcgggagaagaagcagtccgatgaaaaaaagtaacatatgcttaataattaattgatagtggctgaaataactgatttttgttctggattttaccagtaggaaaagcattagtgatgcagcaatttgttttaccatcatatgaaattttaagcacgaattggcggacaaaaaatatttgtcattttttaaaataattttttgaaaaaataaatttttaaaaactgtgtgactgttttggaattccgatggctcaaaaaatgtcgaaaatcggcatgctgtcccatccctgatgcgcttttactgatgcattttcgagagccgagttgaatctcagttctcaggatcactaattgatttgatattcttttccgttttttttggtgttttttaagtgcgttcccggcacctttcaacagctcaccggacgacgatttgacggtgaaaattggtgacaaacaggtgaaaaacagaaagaacaacagcaacattaagccccccccctcacttttatttttctccaactgttttttcatggaaacaaatttttgaaacaatttatgcttgcctgccgtagtttaaggcctgttctgccaaatctgtgttcacaaaaatccgtcagtaaatgccaggatgtgtaactgaaaacgggggggggggggggggggggaaaggaaatggaccaagtttattagactcattgaacagaccaattgttggaatttgatcaaatagttgattaaaaaatcctgatcagatcactgatgaaaaattaaaaatttatattaaggacctataattagattaatagtaaatcccggtcagatcactgaaaacccattctgatcagatcgctgtgtccgcccattggctgatgtccgtttccccggtgatcagtcgcatgctcagcgtggagatgaaggagaagcagcagcgaatgatcactttggacgaattgggcgtggacatggaccaattcatggagtttttggaggccatcacttatctgaacggaccttttctgccaaaccgtaattccatgatactgtatttattctactataccccctaaaatatttatatcgtgtttttatggattgaaaatttttaatttatgaaacggattcccaatttttagccaaaaatgtgctgatgctgctcaaattggccgactacttccaggtgagtcttctgatcacttatcacatcctcttttttctgtctgatcattttaatttaaatattaaatatttatgaaaaaataaatctagtattttgaatgagacaacgaaccgttctgtgatttttcgtaaaccaactttgtgtttttataacctttttctacctaactaaaattttttaatttggtaggctaattgggactattaattgccatcaaatgactcaaaacttgctaatgaatttgctatttctaaaaaacgaactgttctgctttgaggtgaccgcgttgaagtcgcgttgcgaaacgcatctgatcaattgcgtggaaatcccactgatcgaccgtttccttctgattgagcgctacggactcgaccatttgaaagtgattattatttaaaatagagttgagcgtgaccgggaattttgggcaaaaccgggaccttttcggatcgaaaaccaggaccgggaaaaaaccgagacttggtactcagttgtccgtgttttggtcccggtcccgctcaactctgatttaaaaaatttaaatttacaatttaaacaaattttaatttatttcccaattttagaattattttttgaatttggatgtcaataaattccgtgcctttttcaaggcgaacaatgaacagttgtttttggttgtcagcaaagaatttttgtgtgttttatttgtccgactttgtggatgaatttgttaaactctgctgattggttccggctttgatcaaattgattttggcatttccataaattttttttacaaaattcatttcgatgataaaaaaatttggttaattttgggcaaagttatgaataattttcggtcaaaaattttccatttgatggttttttgagtaacttcttacaattagcaccaacgataagtacaatacatgtgaatagaccagtgatagattaaatgccatcatttataacggtcagtcacagattatattaaatcttttttcaaatttctttatataaattcattgatttggctcagattcaaccaaattaatatttcattgtatcattcaatagctttaattttctctttcagaatttaattttacaaaatttttttcttaattaaaacaaaattataaagcattgaacatgctatgttttttacaatggtcatatataatagaagagatcggcatggacctgggtccaggcctggatttttcctggatccaggtcccgaggagcctggattttttctggacctggattttcccggatttttgtccaggaaatccaggtccaagtccaggcttttttcaaaataccgatctccaatataaaattataaacatttaaaattttaaagtctttaaagtgcaattgtcccaaaattaatttatattcccataagaattctctatttaacttttttaacgacatttatacaaatgcatcataaatattcactcccataatattcgttgctaaaatattatttaattaagtaaaaatatttttaaattttcataaaatcaacgcacacatattcaatggcaatctttgacgaatttattgttgttgacgaaaaagtgatgagtgaattttctattggcatctattcattccgtgatgtcacccaatttgctgcactgtaattttatttttgtaattttaaaatatacaaagaatttagtcaatttatgattaatgtcaaacactttggcatcatcgaattgaaaatcacggacattggccatgcttttaatccgtcgaattcggaaccattggcacaaattatccattggaaatgggatcaaaatgaagtattaaagaaatgatcaagcgtataatttaattacctaacaaatattattttagacccaaatactncaaaaagggcagtgaagttaatttctacatccatatccacaatgtttctccttcatttgttattcggattcttaaaaagcgggagaaaaagtaaatttgataattaatcacaccgttt

SEQ ID NO: 21366 - DNA, 2964 bp, Heterodera glycines
cgaacaactgactccgatgcgttcattaggctcatcaattagtgcaaaattgacgccaatgcattcatttgatgcattgatgagcgcacaattggcaccgtcgcactcatttgacactgctgccgacctaattggtcataatcactcatttgatcaaatggacagtaaaaaagcgggaaaatcattgatcaatgataagaaacaaaaacatattgaattggaagctgatcaatttgtggcttttatgttgaagaaaatgctgaagaaagtgccagtggaatttaaagaacgattaaaaattgtaagaaaaaattgggaaaaaattaataaattgcggataatttttagtttcaaaaacagaagagaaataggacacttgctgaggaattgagcaatttaacgtcgaaacaaaatctactgatgcttctcgaattgtattatatggcgaattctatgggtgaaatttttctaaaacaaatcgctgcaaatgatcagacggatttaagaagattcggaggaaaaaactctctgatcgattttgaatattacgaagaaacaaaccaaaaattttcaaaaatttaccaaacaattcttataaatgagccaactaaaaaaagtgccaataaaatgtttccctttcggagaacgaaaagcggcaaagccttcttttggttcaattcccataaaacgtttttggtggctaatgaatggcgcgacggggcggagaatattttggaatggaaatttaagggtaaatttgtaatttcatttttaaattgaatcgaatttagtcaaaattgcttctacaaagcttggtaaaataatcagaacaattggccaatttatcaggataaaatgtggcaaatatttgtggaatttggacgaagaaacggatgaaattcaaaactgtgcaaaacaaataaatttcagtgaattaaaccaaattttcttaaagaaatttgccaaaaacaatgaaaatacgttgggtttgcttaatttggtaggaaatttattaaacgtcgaagcattaacaaattcggacacaaatgaaaaggtattaattaataaatatttttaaaattggaattgattcttagggatgcttttttggtttatgtcgctttttgttaatggatttagtgaaaaattctatttttaaggttttctgtttggaaatcttaaatattttggtcattttttggaaaaatctattaaaagaataataataataataaactttttagtaatattaaatttttccggcttactttggcatcatcggctctttgttttccatgctttaaatgctaaattttacaggtttcttctccttacagtgaagacatttttacagaaattgaaagttatgaacaaaaaattcacattctcaacggacttcttaattttggccgtttatttatgaatagttttttggctttagcgatgaaaattacggaagaaaatcgaacaataaattggaaaaacatttcaatcatattcactcggaacaaaaacgccgaagaggaaaattatttgttgaaaaaattaatgatagaaggtaaataaaaaaggaatctatgagtaaatggtaaatttcctcctaattacaataccttccattaaaatgaaaaaaaatattacataaattaatcgccagtaaatcaatttaaaattcttaagctggtttaatggaagaagcaaaggaaaaagtaagaacataatcatcaagaagttaaagagaattcgtcgacaattttttcgttctttcggatttcatttttaaatcgccaaaaacagtaagtaatttacatcgaaattacattgtaaaatttagtgatgtcataaagaattgattcgacggtggttattgttaaaataatcaaaaatttacacgtcaaaaccgcgtcctgattaaaaatattatatttcccaatttttgtcgtaaaaatatattattgagagatttcgtttttttatatacagattgaaattctttggtatcttattcgaaaatctggctggtatttttgtatttggtaattagcctagggaggaggaattcttattaagagagaggttaaaaagtagaatttttgagaattttttaaaggacgttgttaaatcttgaattaggtgaactatagtgaacgccccacttagaaaaggttaaatgatattactaatccagtggcggaaatagctttgaacctagttttaaaccggtttaaaactcgaaaaacgaagaggaattggcactttagcttttttaaaaattcgaaccctgacatttttgttgtcattcgaattcttgacaagctaaacgtaaaaaatcagggtaaagtcgaaccaatgccatctgctgacaatgagagattctgaaccggtttaaaacaaagaaatttagtgcaactaatgccaaatttgaaaataaaaactacctaattgtattgagtagtatttttaaattcgagttacctatgtcaattaagagacaatagtcgaaacggatgccggatattttacctatcagcgaccgcgaaagaaaccatttctgatctctaaataaaaaagagttaaattagggaccctcattataattaattgccgtgtagtttcaattatcagagtgccgaaaatcgcatgtgatctaagcctagaaaaaaatggtgtaagtaaaatcgtaattacgctcaaaaagcttttcaaacaattttagcgcttccaattccttctacaatcgcctttatacatcccattatgagcgctaaaattatcagagtgccgaaaatcgcatgtgatctaagcctagcaaaaaatggtgtaagtaaaatcgtaattacgctcaaaaagctcctcaaacaattttagcgcttccaattccttctacaatcgcctttatacatcccattatgagcgctaaaattatcagagtgccgaaaatcgcatgtgatctaagcctagaaa

SEQ ID NO: 21367 - DNA, 2041 bp, Heterodera glycines
gcgatgctcgctcctcagcactcagctaaacatttttcacaaattcaaaaggtaatgtaattttgaataccaccttaaacgcctcggtaattacggacgatttgatcgtaggttgtgaaacagacgaccaaacaccgatggatgaagaactcgttgacatgacagcagcagcatcgggcaattggggaaagtcaaccgaataatcgagagtctttttctcagtagtcattgcgaattgaagccgtaaaatagaaagaacgattaaaagatgtgtttaattttgctttctatgcttaaaaccggtttaaactctggtatatataaggagattagaggtggtgtgattaaatgatttttttaaaaacaattatacaaaaagttgccatcaaaaatgtattaaattgattaatttttctgaatgatgtaacgcaatgagaagatcaaacttatctgattatttaaccgaaacatttataatgggatgggcatcatacaagcgcaaaggctgccctgttgaggtgggaaaacatgcaaagagagaggcggagaaagggaagggagggaaagccaagaaaaagcatagaaaaggcgaatggttgcagttacattaggtagtttgactactgtgctttttggaagaatttacgcagcgataacatttcaaaagccgactcagtcccagcacaaaatttaaaaaaaacgaaaaatgctttgtttcgtttttagtcgccgcgatgcttccacggagagcattgagaaaataaaaaatattgaaataaaaaatatataatttgctttagttatgacttatcacagaaggccgttttccagaagattaattatatccctttcttttattttccatctctcggaattcgacaaatcagaaaatgatttataacacatcgctttttagcatttatcatttgtgacataatacaattcaaacattgaaactttgcacctcattcatcctctgttagtaaatatttgtttcatgtgtacttctacgtagtcttggaaagcagccgcattttgtggcataatttgcgatcgaatttgcttcattgattctcttaggaggttcatatcggatgctaaaggaaaaacatgtaaaaacgaagctagtttgagataactcacaagtaaatcttttattttgagcgccgattgttctaagctgaaagatgacgagaaatgagaccaattcaattggcaaagacccacctgaagcattaaggaggccaaagaagtgataagctgaagggtccttttattcctcacgctcagttcagtgttgctgacaatgagcgggaagtttggttaaattaataataacaaaaaaacattgtcagagccctccacgccctttttttcgcttacttaccaatgcttcacaatttggtatgccgtcgtgttgcattgctttcgcaaaaattctggtctatccgatggctgtggttcactcaaatgaggtaaaagtgtggcgtaatgggagtgaagggcagcgaaataaatggcggaaaagtctgttgactgactccaaatcaatgaccaactcgagcaaatcggacctagaattagagaaatggtgaaatgacgaaaactgaaaattaaaagctcaaaattgggaaagatgaccttaaattcgtgcgggtaactaattccccaaaagattcattttctccgcataatcattcatcactggttaaattggtgaccaatttttttttgtattcgaccactttgcacaatttcacctgggaaaaggggagaatacccataaatggggatggaaaagaaggacaacagaccaaaattacgagcattcgtacgggaaagtttccaactttttcatcttttggtgaaaatggacgaatttcatgggattttgtatgaactggtcccgattcgttcgtcctttttcggttccacttaccaattgtcactttgttcttcgtcgaatggtgcatattttgaacggcattcattggagagacaacaaatcctccaccaccagcaaacgcgggcatattgacag

SEQ ID NO: 21368 - DNA, 1223 bp, Heterodera glycines
cagcaaacgcgggcatagaccaggcaaattcgaataaaaatgccggttgaccaaaaacgggggcagggggtggcttaacgccgccacgccaaccgcaccattggcacggttttgttcaagaaagtaattgacggaaagcaattcggaaggctggtcgaacatcacttcgtaatcctgaaataagaaacattcgagtttattcagtttctgtccttctcatcacaattgcaccttaatgtaagcggcggggagaatgtcttcctgaaaatgaaaactcgaaaatttatggagaatcatcggcaattaactctatcgaatacaactcggtaaccatcttcggtgatcgcatcaacagtcgcggagtaaattccgtccctcggggttcgtacctgacaaaaaataaataaatactctcaaaagacaattgtaaaggattaccctcgcgtaaattttttgaccgacaattggcggacgcggcaaatgagtgggcaaatcgatgaactcttcgtccaacgaagtgcaagtgccattgtaaatggcacgaatcttttgccttaacaaattgggcttactaatttctaaaattttcaagtggaaacaaaccgttttgcctccagcgcttcgcactcttcgtccaaaaatgtttgagaacagcggcgcggcttgccgatcaaacggcgaatttcacgccactcggccttgcgcagttttgtgcactttaaattgggaaacgattcgcgcatcagctgcgaaaattcattttcggccaaaaacagctgctgatcgacgcccgaatagaaaaactcgcagaaaacaaagcgacgcgcttggggtaatttgagcacattctgaaaaaagaatgggggtaaacggaagagagtcaaagggaaaggaaagagagtcaaagggaaagaaaagagagtcaaagggaaaggaaagagagtcaaagggaaaggaagaccttaagtttgcgcaagttgtttttgagttcagccgacagttcggcgccagcagcgcaacgccgttcccacgaaaagcgattgctttgaaaacgcggcggataccgaagcagagttttgacgggcttacaattagtctcgacctgctaaatagggacgcattccgcaactttttctcatccgttgctttgttttccttccattttccacttacaaattcaccaccctcccctccgccgtcgttttccttctccgctccgatga

SEQ ID NO: 21369 - DNA, 1709 bp, Heterodera glycines
  unsure (1)..(1709): unsure at all n locations
tgctgcttctcccctttttgctgncctgggcgtggaatgagtcaatgtnncnggagaaagggaaaagggaaagaatttctgcngaatttcgcttccgccgncgccnncggggcggggacatgtccgttttttcgcccgcacttcgccagcggcgaaaaagtgcaaaagaataatgggaggtgataaagcacagaattaatacataaataagcacaataaaacaagatgaactcttctgaattaagctgccatggatttgcaaggacagaaaaggaaaacatttattaagcattgccttcggttgtgccgacggaaaacattttgaaaagtgaagaaattattcataatttattagtaaatattaaagtatataaaaacaactgaagtatgttttacacccatcggcatattaccaatttccaagtacttcttgaaataaaaacactttcattttcagcccaaggacgaatgaaaggggccaactccgtccctgccaaatttaagaagccataaatttttttccttttcataaaaaaactaacaaaattgtatcatcgaaagttaaatattgtaataagaagctcaaaaaaagttaacgttatgaaaaccgcaaaaactcagaaagtcgatgtttatttctagtttttgaaattaataattagaagaggttaataaaacttgcaaaaaactttctaatgattctatgattgttgttaggtttgaccagcaaaaaagttatttaaaacttattgtttaattgttcgatttgtatttatttgtaggggttatattctcatttgcatttgttggcccagtcctagggtcttttgtgcttttatctgtcccccctttgctttgccagtgtcaatttgccattataaattggcccttccttcgccctctctcttcactttcttcatttcccccctccttttttcccttttcattttcgcttttgcccttttcactgcgcgaaatcccatcaaaaagcaacaaaaaaaagaagggcaaatgaatgagagtgaaatgggggagtgaattaaaagaatgcgattcgaataaagagagcaaaaatgaggcgagctgattgcgaggagacggacggacccaccgaacgataattcggatggatttggattggattttcggttttcggtgggataacgacgacggactttttacgttgtgggggggggggaaataaaatgcaaacaaaaaacggacgaagaaacaaaagcattttcggtcctaaaaagtttttgttgaacacaaaaaaaaaatgtttgctaaagcataaaaaataatccataagtaatttaattttaactgcaaaatttgaaaaaaaattttattgacaataacaaaaaaatgaacaatttaggataggaaattaaatcaaattaaaatatttaatgttgaaaaacatgaacaaactcaagaaatattaaacatttaaatatttttaaatgaatttattaaaaaatatatttatccattaattgaccattggaaatatttgtaatgtgtgcaatttccgtttctaaaacaattacaaatatttgcaaacgaagcgcctgagggagggggagagtaattagcaggtaataatgggtcgaaggacgtggcaaaaagcaaagacattattttgccaccattgaaattatgtgataattgaggtgtgcgagttattttattagtcagaccgattg

SEQ ID NO: 21370 - DNA, 2206 bp, Heterodera glycines
ctttggtttcttgttttataggatttgcgcacgatccctctaggtcaaagttgcatcgctgccgatttgaccgccaacccttccaagaacagattcactaacattttaccgtacgaccactcgcgcgtgaagctaaagcccatcgacgatgacgacgggtccgattatgtcaatgcctcgtatattccggtacaactcgaaaaggaataattcctttttatctttttcatcttagggattcaattcacgtcgagaattcatcgctgcccaagggcctttgccgtcaagtaaatttattcataaatcattctaagtaatttgataatccttttgcagctcgcgatcacttctggcgcctcatttgggaacatcaagtgccggcagttgtcgcgttgacaaaatgtattgaaaagggacgagacaaatgccaccaatattggcccgacaataatgtacgttttctggcaaatccaaataaatatcagaaataggaaaaattgcagagtcgcagtgttctctacgccgacattgaggtgggcatcagcagaagtgaccacagttcgaatgtatcccatatatgcaggtgacactactgaccgaatccatcgaatatgacgaattcaccatccgcgaactgcggctgaccaacatggccgagccaaaccaaccggcccgaacggtgcagcacttgcactaccaggttgatcaacagccatatagtgatcctctgtttcctttacgcaggcatggcccgattttggcgtgcccgaccatccagccggcatcgttcacctcgcgcgactgttccgcaacaaattgcccccctcgtcttccaacaaaccgaccatagtgcactgttcagcaggtgtaggccgatctggcacgttcatcgcattggatcgactcgtgcaacacattgaatccggacgacccatcgatgtgttcggcactgtttacgaaatgcggctcgagcggtgccatatggtacaaaatgaagtaagggcgagaaaagttcggtgtgaaatagtacaatgctttctctgttcagcaacagtacatcttcattcaccactgtctgcagtatttgctggagaatttctacccctttctgttgtgtccctcctcccaacaactgcagcagcaacagcaacacacagtcggccaccgaccgctgtcctcgccaaatccacacgccccgttcggctcgtccatctcttctcccatctgtgccgactatttcggctgcggttcgtcgtcgtccgttttgtccaacgcaagcagaggggacggcggtggctggtcatcgaaggtgccgatgacttcgagcagtaacaacagcggagccggcatcaattgttattggccgcccacctccgctcaaaataagtcgacggactcttgcgacggaattgtcacgacaataaagcactcaccaccgaagattgaggtgcatcaccctcaaaggaatgacgggtttctggaggacgacgaaggcatcgccgaatctggcctctgattctgaccagaccgaacctgatcggaaaggttgtgatggattattgccaacaaacaaaaagttattcccgatgatctgccataagcattttttgatgagacggaagaaagggtaaagaaactctaacattgaaaaaacatctctcttcggatattttaccaaagccgaatataacaaataattacaataagtcataaaaacaataattaataattcaaaaaaacgtttttgtgtttgcccattatttacttagagaaacccgagttaccctctctttaaaatgcaatacgaatgactatataaattgtcaataccttttcctattttcttatgaatagtataataatcatttacaaaatgcatatatttattttacttacacttaacattgacataataaatgaatgatttttattttggcggtttttaataatgtgtttatttccttgcaattaaccttaaatgcccccctccacctaaaatccaaggcgaaaaagttcattagttaatgcgtttatatcaaattatttaacaaatcaaagcagtccgcttacaatccgtgctgttccgtgtcgttatctccgccccacaccgtttctctgtcccgtccttctcccccttctgtcccgtcaaattcctttggtattttcatattgcgcaatccatttccgctgattggtggcatcaaaa

SEQ ID NO: 21371 - DNA, 2493 bp, Heterodera glycines
  unsure (1)..(2493): unsure at all n locations
aaacgacggaactgacgcggtgcggcagcagcagaaacattgatgcancggcggacaagtacaattttgtctttcgttagctaaggggggggggggcttttggtntacaaaattcaccggatggtatatgaaaaaaaaaacttgttaatttggaaaaaatttgggtcagtgttgcttaataaattctcattatatttaaatcttttcagcaattggcggcaaacaacaatggcggacaacacgcggaagcagcagtaatcgatggcactgggatgcccagcggacaacaaattgaggcggcagcggatgaaaatgacgacacaattgggcaagcggtaatttttcacaagcttttccaaaaaaaattattcctttaatttgaaggggaacaaattgttgcggcgggcggtggccaatcaatgcatttcatcgtccggctcgcgcagcacagtctcgcgcacggcgtcgcccgcactttcttcgacttcgtccaatgcctcccgaagacagaggaagaattacaacaaaagtggacgcgtaccggtaagaaaaaatttgcaaattcaagccaaacacacacacacacacacacattcacttcctagataaatgtgaatgccgattgccccaatgttccgcccggtgtactgccgaacccaaaaactcgccagtaccaggtcaagagcgttttggcgcaattcactcatgcatcggggaggaaatgctatttcttggagtggctcggtgagtttgatgatgaaattgaaagaaaaaatgtgtgaatgaaaaggtggacggatggataaggaaattgaaaatttattgtaaaattccaaacgtgtgccgagttaacctggtttagcttcgccacttttggaacggaataatttgagggtgtgggccgagttaacacagtttagcttcgctacctctcttgctatttcactttaaattttctttttctttttccattaaccaatccattttcttctctcattttttctcgcaattataggctttcgcggtcgcaactcatggtgtttgtcggaggacaccgactgtacagagtacattgaaagatttgggacagtggcaacagtcgacgcggtactctctgcgctattgggcgaaagcgtcccagcttcgatagctgatgagctccaggccaatcctaaatttggacaaggtgtggagagtgaggggaattaaaaattgcataattttttgtcagtgttggcaaagttcgatgacattgaagatgaattcatattgcggacaactaagtataatattttgttcgcaaaagggcttatggaaagcgccgagggccaaggaataattgaggatgtaagcacacaaatgcactttttaatttaaattatatatttcctaaggcgaagagtaaactgggacgcttcgtggcaaagtgtatgagctgatgagtgcactggccggccgaattgaacattttcaccatttaaatttcaccatttaatttcaccaataaaatttcaccatttctcatcatttaaaaataaattttttcgtacatttattcaaaatatatatggaaaaaaaagaattgacaaatatttaatgctgcatgtaaaatgtggtgcacactcgacaatagggacatttatcaggactgggtgaaatttttaagtgaataagcaaacactgacggcacagtcccacatgcccacaggccccaaagaattgagccatccccacaatacacaaacacatccccccaatattcgggtacaacaatgtgtcggggaaatggacaggtgccaaagggttcccccaacgaaatacggctgtcgtttcgctaccagcttgaagtgcggcttccatcgggttgcgcgctgccgttgcattgagctgctgttctctggtcggcggaccaaattcgcggctgatgcgaccgtagggttgtcccatgcgcatcctttcacaattccgttccctcagtttttcgcacaccctgcaccgggccgaatggcactcgccgcatccttcaacagaacaatttggttcaaaaatttttttgacaaaactatattacttgctattccaaacaacgaaggtgcaattgtagatttgcggcgcgacattttatatttttagagggtttgtgtaataagacaatgaatggtccttccactcgctttgtccctatccatgtgccccccccccctcagtgtctttgccagattcaaattcggcaagccaattaatcatttcaccttaaccaacacacaaaaaaggaaattgagggactgtctcaaaaaaatatatgtttattatgcagaataaatatcaaaattatggattgcatcatcaaaatccattattgtcttttggtcaaagttcactttttcttcattggcgccnaaaggtcggttgcgcggcagttggcccacacgcattcctcacacatctncaagccgaaggcaaaaacgtccccctccagcgctcactttctgc

SEQ ID NO: 21372 - DNA, 2566 bp, Heterodera glycines
tctttgcatctttggagcgtcggcacagaacgaagcgcagcaattgcccatctgattattggtaatttgttatttttaaaaattttatatttttttttatttcagacgacgaatccaaatttattgaagtgacaaaggcggccacaaaacttcttcaaaacggtcataaaattcattttacaacaattcaaatagaaattcatgaacaaattcattctcagtgcaaattttgtaaaacattactatgacatttaaagttgtatcgaaattctgacagtcgaaaattttgtttgtttttatttttcaaaagagaattctcgtaagttacgagtcgtaacttttaagaaaggaatgattttctatttccttataaataaacacattctcttttctggtctaaaccttttgttttataatttgaccaggttaattctcaattttcacactaaattctaaatttattaaaataattcaacattaattaaattcaaaatcatattattttaaagcacaatattatttattcattcactttgtccatctccatgtttcattattatatataaaaccaaaatttctttagtcatttgtcctcatcttcccaaactttctggccaatcccaaaataattcctttgctttctctgtccattccgtcaatgcccgtccgtatttcctgatcagaaaaagaatcaagcgacgatgttgcattaattcgtagtcagtgtttgagtgccctttttcgccgttgtgaatttggctttcaaacgttgcgtccaaccaccagcagcgggtcgatgttccgagtcgacataatcttattcatcggattaaaatgtttactcttcttttcgcttacaatcaaaggtccttcgggaattgcattcttgctccgatgtctgaaattcgacgagaggtccttcaggaacccgtcccacagaatcttccgctggattggtcataacatcggcggatgtacgaaaaaaacggattgaattaggcgattgggaagtgcgagacgacgttaatagaacgggcaaattgcgacttcgatgagtcgaagaatggtgccgatgtcgataatcagatgaattggaacggccgagcatttcacgttggaagtttgggtcgcgacggagatacctcagaaactcgcggttttggaccagcaaagcgattttctcgtcattggcacattggtccctcggcggagtggacacactctttcgccgttcatccgtctccgaattatttccttcttcttggccacttcgtcgcaataattcatcgatggttctgctcacatcgccgtcacaattgcgcagcactgactcaacgacggacgaattcaaatttggaaacattgcgttgaattgggccattgcctgcatgaaagtttcgaacagatttcatggcgaatcaccgacgacattaggacaaacctcttcgaattgcagcattttttgcagatagaaaaacggtcgattagggttttaatttatcaatttatttcttgaatgtgtgcaatagagaaatgtgcaaaagcgagatgagctcaatgtggagaaaggagagaataaggtgaagaagggagaacgacgacggcagacattagaaattgcaccactctctgccctttctaacgtttctcatccttctctctctctcgcttttctctccttcttttcccccacttcttttcccccacggcgactttttacatagatgtcccccccccagccaatgcttcagtaaactgttgaggggctgcttaattgagtaaaataaaataaaaacctttgaattatcttttttattgttgtttgtgctttttaaaatggaaaatttagttttgaaaccggtttttagcataggcgcaaaaaaaactcattttcaaccttatttattaggaaaaaatcaaaaaaaattttagtaggctatcatttgatgttgaccaaaaaaaaaaaattataccaacttgatcaacactttttcatggtgatcggggcatttttgtttctgaagaaaagtcataaatcgaaaaaatatttagcgctacttcgaatttttcgagtcactatgggtcaaatgcaaattatttgagtaaattattttaaaaacaagatgattgagttatcctttattaaaatggaaaaaaaacgaaattgtactcgaaataattttgagaaatcagaaattatacaaattaattgtgtatttatttgcgaaaaagaaaaatgaagaaatgaactaacggaaaataattaaagggaagggataaaactaataataagaacctaaaattttaatgttaatgaggaatggtatccatacatgcacaagggggtcctccgacacccccccccccccccctctcgctcgtcgtaagaggcctcggacacccccacttcgttcgtcgaaagttttttgggaaaaacgcgccgcaaaaaaaggtgctttgaacagcaaaaaagaggtctgaatagcagaaaaaaaggtcgacaccggagaaaaatttggacaccttcgtatgcaaaatcggccccgagataccccccccccccccc

SEQ ID NO: 21373 - DNA, 2944 bp, Heterodera glycines
atttaataaaaaaaatttccttatttattacattttaaatcatgttgacctcttccacgttgttgtacctcttctgatcactgttgtacctcttctaatctctgttgtacctcttataatctctgttgcacctcttctaatcactgttgtacctcttataatctctgttgcacctcttctaatcactgttccaacaaaaattagaaagggcgcgaagcggccttaatagcccaacaaatttagaaacgggcgcgaagcgcccgtataagcccaacaaaatttaaaaaacgggcgcaaagcgctcgttcgaggccgcgaagcggcctaaaagtcccagatatttttttaaaaattccaaatctccacaaccagagctaatctaggtagcgaagctcccaaagcgcgaagcgcttttttccagctaaatagccgacggttcacgcacccgctagtttaaaacatatatatgaacatatttggcattttttagcacatataaatacgggacctgctaattaacgatgactctctttatgggaattgtagacatttttaaaaatattatttatacaattcgccaaaagaaatgtttattttcaccatattttgtccacggatggtttttatttatttgtgcttaaagatccaaaaagaaaagataacgggaaaagaaaaatgttaaaatttatatctaaaatggattcttcaaaacaaaaaataaagtttattagaataaaatggatttataataattcaaagaactattatcataaagaaaatattaaaaaacaaaaaataagaaatgaaaatgtagatttacataaattctgaacaaaatcatattcttaatcagaaaattaaaggcacttatcaaattttaatattataattagtaaataaaatttcaaattgatagggcttaattaacttaaattcaaatgaaaattgtttggtcaaagaaacacagattacaagcgttaattgaataaaaataacaaatcaaatgaaattttgaacttcaaaattggattatttcaaaaattgattaacaataaaattaaattaaatctaatataaatgaatattttttaaagaagacaaaaaaaacttattaaataaagaccatgaaatttaggtcaaataaaaatataaacattaagcatatttagtcgaattcgatcaacaaacaataataattatatgagaattatacaatagtttattttttaaagcaagtaatatatatttcaattgtttgaaaatgaatgtttatgaaattttttaactgtacctaaaaataaatttgtataattttttaaaaacaacaccaataaatatgagtaattaaaaaaaatagtgtagtaaattaatatacaaaaaatatatacttatcgatatgatctactaaaaatcaaactgtttcttcgacttatgagcaagttcattaaaaaataaatatactttgaatcaagttggcaaatattatctaacaaaataaaacaaactaactagtgagttgccaccaattagttctataaagattattataaataaactcaaaaaattttctcaacgaaattcgcacaacaaaagtttaaaaaatttatttgaaaattaaagcgaaaaaatatgataataatgaataatagtaacaaacatttgaatggagcaattaaaaatttttaaaacgcaaaccatctgcaaacaattataattaacctttaattactctaaaaataaaaatatacaaaaaattcaaatataaaattcaacggttaaaaacataaatttgcatgcgcaatataagtttgttctaaaacaattttattaaagatatgtttggcaccacattcttttagtcgatgtatcgcctcgattcaattcccttttgcataaattgcaacgaacatacattcttcgactgtaaaggttttcaaaaaagctccaacctttagaatttagggtcagggttcgggggttttaaattttccatatttaaaaaaatttatcaagcaaaaaatttaaaaaagtcatttgttaacagaatttcaccaaaaactgccaaatttttgcgatttttagccatgcgacgacctttttttctgggaatgagcttcatttgtaggaaaaagactcaaaaagtgtgttgaaatttatttaatatagtctaaatttccatttggaaaaattcattagttcaattttttacttaaaaaattttttaaataaaaataatcaaatttataattctttggggggggggtaggggtgttcggtgccgataggcgccgccgggcgaattttgaaacttatgctctctttttaacagatattcaccaaaaatttttttagatttttccgataaatttttgttcttccaatcggttttttgtaaaaatgttttaaaatatttaaatttttatgatttacttaaggaaaattgaattgttaattacaacgaaattttcatccggcggtgccatcagaatttttttgataaattgttcaatttgttaacaaattatgccaagatgggtgttttgttattaatcgtaaaaaataaatcaaatagaaacgtcaaccggcaccgaactcataaattttgacttttgtcccagaaaatattaactacatatttcagaatatcgcctcaataaaaatcatgacccttcaaatgaatataatatgagataattaaaggaaaagtggaaaaactttttataaaaaatgaaaaaccatttcataattttacatggtatgaattgaggtattttaaaataattaaaaattctaatctgtgatttaattaaataaatataattattctaattgtaaacaatttttaatataattttataaataaaacatacgcattttattaatagagataaaataaatattaaaatgcaaaatttataaagaaatattttatcattttaataat

SEQ ID NO: 21374 - DNA, 776 bp, Heterodera glycines
ctccctttcttcccctcttccttctctctctttccttctctctcatcctcatcatcttccttacaccctccctttcttcccctcttccttctctctctttccttctctctcattctcatcatcttccttgctctctttctcaccatccctttctctctctctcttcttctctctcatcctcatcatcttcctctctctctttctcaccatccctttctctctctcctcttcttctctctcatcctcatcatcttcctctctctctttctcaccgtccctttctctctttccttctctctcattctcatcatcttccttgctctctttctcaccatccctttctctctctctcttcttctctctcatcctcatcatcttcctctctctctttctcaccgtccctttctctctttccttctctctcattctcatcatcttccttgctctctttctcaccatccctttctctctctctcttcttctctctcatcctcatcatcttcctctctctctttctcaccatccctttctctctctctcttcttccctctcatcctcatcatcttcctctctctctttctcaccatccctttctctctctttccttctctctcatcctcatcatcttccttacactctccctttcttcccctcttccttctctctctttccttctctctcattctcatcatcttccttgctctctttctcaccatccctttctctctctctcttcttctctctcatcctcatcatcttcctctctctctttctca

SEQ ID NO: 21375 - DNA, 1241 bp, Heterodera glycines
  unsure (1)..(1241): unsure at all n locations
acttgggaaagaagaggaaataaatttntgagaatattttccgttttgactgagttcaatggggggaagcgatgagaagcgcacaaacaatagaaacagtgatttacgattcgctaaaattgctgctaatttgcgaatgaatgcccggcacttttgccacaatctctcggccttttcattctgtcctttccctcgctctctctttctctctctcctctctatctctttgcctttagtccgtccgtttcaccgtttcgatgcgtttgtgtacaatggcacgtcctcctcctcttcatcttcctcctcctcctcctcttccctctcttcctcttcctcctcttcctttccatcccttccgtctccccgtcctttcctccgctttttccgctcactttgcccgtaactttcgtctctgtcgccctcctccatttgaatacctccaacacaccgattggcttccgtgttgttcagcatccttaaaagtgtgtgccgttccgttgcttttcgcttctcacctgaccgcgtcccacattgtctccggaaggggcaaatccctcgtctcgggaaggaaataaatgagcacaccggcgaacagtgagaagatgcaaaagatggccattgggacggtgggcaaagtgacgtcggaaagaatggcgatgtaaccggaggcagcggagccgaagcgggccatcattgagcaagtgccgacggcactgttgcggatcaccgtggggtacagctcggaggtgaagctgaacgaagggacggcacggaaaggcaattcaatcagtgggggagtaaacgtacatgtagagaatgttgaaagccccctgaatgcacactttgccagccaacatgaaaagcagcgagaaggtcatctcctcgcgcagggaaaggcacatcgcgacgaaaattaaagtgccggcggaaatcaaagtgatcacttgggaactaatggacgaaggggggggggcaatggcatggttttgcaaaatggactaaatttgtaccgttttcgaccggaatggagcaaaaaaacacaagcctgaagaggaaaatgcaatttggacaacttaaatgagtgctaaaccaaccatcagagtcggcaattcaatggcaccggcgatggcattgttcaggaaaaagttgccgacaaacattgctcggccaggggttgactggaaaaggccaaattaggggcaaagggccaattaatggggcggaattggacggagagggaa

SEQ ID NO: 21376 - DNA, 3151 bp, Heterodera glycines
atttccatcaaatattaatttatgttttattcttttgtcttacaccatgcactaaaattattaaaaagtcattgataaaatatctcaccctactttcaaaaattaaaaattctgttctttaccttttgatgcctttacgcttcggttgcacaatggcgtcgtccccgacgtcattttgttgtgccggcatcggaccaacgcagggcgcaaattcgcgctcaagcaacatgtccaacccgtggtaatccaacacggttggcatctgtcaataatgacatacacagttgaaatagaaaaaaaaattaaaaaagttttttatttttttgaattatttataaaaatgaaaattgcagtttgagtgccaattttgtttccaacattctcaacgcaataaattaatttaaaaaaaattctaatttttgccaattttctgccatcgctcaaagattctttgatggaatttgtgttttaatttcaattttactataattaatttaaaaaagtgctttttacttccgtaaatttattttcaaatttcaatttgctagtattctgaatgtgagcattattccaattcaatagttttttatttaaaaaaaatgaaaaatttcatatttttttcttgtcattttaaacggtacatttcaaatattgtaaaacgtattttttaactgacccccaattcgtacgaaaccaattgcttcggttgtcctcgccttggacgtcgcgggtcatcaccaacaagatggacacgcaaagcgggatcctcctaaaaaatgtgtcaataatagcaaaatatatataatgagcaatatattgtatttatatcattatttacacttatttgcttttcaatttaatcggaatttcaaaaaaaaaacaaaaaaattttttttgaatttttattttttcaaacgaaaattttaaataaaaattgttgctaaataatgtatgggtggaccagggatggcacggaatttcgatttccgatatttttgaaatcggaatcccgaaaaattcttgggccttggagtttaggtttacgaaaattttttggggcctcggaatgcaatccctgatgggaccgggaggtgatgccatgtcccattatattttcttaccagtgaagctgcagcccctttgctggcaccggacggctcgaatttgttgcccgtgtcaaatgagtcgaccaggcaggagaacagtgcgctggaatgtgcagccacaaagtcggcccaaccatgctgtgccagctcagccatcaagtccatgtagcactggagaatgtccccactttggcacgcaatgccaacaaaattgagctaaaatatttttaaaaaatatataattttgccgggtgaactatttcccactccctgcccagtatcgtttcccgccgaaaatttttttgaaaaaaatttcagtggaaaattttcagtgatttttgaaaaattttaaactattttcatggaaataataatttgttttaatgcttttatgcatttataatttttttttcaacagggtcaaactcgaaatggagcatagtgttggtaccaaatttatccaaaaataaaaattgctcattctcagctaccttggaggcaccggcgaatggtccagccaatgtgtgatcacagcagcagccaactttgtctcaccgtacctgtgttaaaaatctcttcaaaaatgtgataaaatttcacaaaagctaaacaccaaataaacccaaagaaatgcaacccatttttgtcccaaattgcgagtgatattttgaattttcgacgactttttgttagaattcgagtccgggattcgaaattggtgaaaataaatgttggattcgtgatcagagcgacccagaaaaacacccataaatataagcaacatgtcaaaagccctgaatttaacctgtccccgtacaccagcggatgcgtgaagagaacggaacaatggccgtcttcagtggacaagtccaacacgttacggtagcacatggccaagtcgaactccaccaactcgtccaggtcgaccacatcgccttggacaggtcggggcaaaatggcgtgagcaatttctgaaaaaaggaaagattgaatcgcaaacgaaatggaaaaagataaaaagagaaaaatatgaaaattttttaaataaattaattctcaaaaattttctccggcagatgaccaccaaagcttctaattttcctttaaaaattgctcaaaatcgcaaataggtctttacatggcaagacccctgctcaaaaaatttgtttgaacccccccccccccttttttcatgtagggttacgatattttactttttttatataggtagttcctaataaaatattttctctattttaaaatctgtcggctacttttgaagttggtcaagccgtaagagttggacagacgacagttgccgatgccaatgaattggtattgggcacagaagtccttcaactgagggccggccaaatcgtggacacgcaggaaagtttcatcgcctaaaattggaaaaaaaaattaaaaagaagaacggactggcaaaaccgatccggcgctttttggaaaaacccggattgaccggcttttgatagacccacgggggggggggggtcatcgtttttttttgagtgtcaaattctgaatgaatggacatcatgttaggctgacctgacagaatatcgctggcacaaaagttgaccaacacatcggcactcatccgttccaggccaccgacggcattggcaccagtcgttccaccgtcctcgccacaaccacctccgtcgccaacgccgttctcatccgggcgcgtgctgcacaacaatcgcagtcggccatccatgaacgtctccaccagcacttgctgctgtcgttgttgatcatgctaaaattgaaatttaaaaaaatttgatgaaactggaaatttaaattttgaccccataattacaattcaaccacctgcaacgcctgtgcacttgtgcatggcaaatcggcgtcatattgcgacgattgagcaaacagcatgccttaaacaaaaaaacagaattaaaaatttgtaagtcagatcaaaaaaccttaaccgaacagatagcttatatgcccgtgatttttgagttaaatcttgaaaaaataaaacagatttt

SEQ ID NO: 21377 - DNA, 2073 bp, Heterodera glycines
  unsure (1)..(2073): unsure at all n locations
ccccccccttgtgccccccaattgtgccatttttccctttgcattccnncctcacattttgtccccattgtcacaatttccccccattgtatttctcacacatttcttatgtatgggtttaattacccaagtttgagctataaacttgtggaatattttggtgcaatttcttgggcggcaaatttgggcaattggcggcagcgaaaaacggacaaatcggcgcagacccctcccccatctgcgtcaagtggcgctcctgggcactcgacggaccaggcttcgacaagcggccgaacggacattgcgcacaggagcatttgggattagtgagtaaattgggggaagaggaaattttgagatttgggcagggcaaaaaagggaaaaacaggggacggtaggaattgaacccggaaggttgcccttcggattttctgtaatccgtagcgcttcctttggtcccagagctgagtcccgcgaattttttgtaattcgtggcacttcccttgccaatcagcgcagccccacggattttttgtaatccgaggcgcttccctggtcccatagttcggcctcacgaattttttgtaattcgtgtcgcttgccttccccagggtttggccccacggattttttgtaatccgaggcgcttccccggtcccatagttcggcctcacgaattttttgtaattcgtgtcgcttgccttccccagggtttggcccctcggattttttgtaatccgaggcgtctttttccttgctcagttggcccctcgggtttttcgtaacccgaggcgtgttcctttctccagtgaccgacccctcgggttttttgtaacccaaggcgtcccccattgtgagcaggtcgctcctagggttttttgtgacccaaggcgcctcccgcttacacggtcggacccatcgagtttttcgtaactcgtagcgtccttcttcatacactgtaagactcttggtgggtctgaagtcaaactcacttagtccactgtttgttcatactgctattttgtgaccccgaaccccacacaatttgttcggaagtcgggtagcagaacccaaaagtgagcaaaaatgtcgggatttttgcgtacaaaaatcgcaatagagctaaaggctcttgagaaggcgaaaacggcaacagaattgtatgctgagccggaccaaactctgacctcattggaaaatgcaattctcctggaaagcgcggcagagagaataaagtcagaggtggaggcagtgaatgccaaaattgagcaaatttggataaccgcaagcaaatggcatgacgtcatacaaaaaatggacaaggacgaaagaaaaagtgagcaaacagcgtatgaacaatttcaaacaacggagaaactgaacacaaaaatggaagcagccaacacaaagctaacagagctgaaggacctggagatgaaggtggaagcaggagcaaagctgcaacgctccaaagcagacagagacgcgcgagtggagcaaagagaacatgcaaaagcaatgtcgaagtcgaatgcagaagcagacaaagggaataaccgtgcgagaggcaatgaaatgactgccgcattgtaccaattgccaacactaagaattaagccgtttgggggagacaaacgggaatggcccatgtttgaagaagcatttaaagtggctgtggaccaaaagccaggaagcaaaacggagaagctaaatttgctgaaatcgctggttgagcgagaggccgcattgctcatcggaggcctacgcctggaagagaaaaattacgaaattgccatgaagctgttaaaggacacctatggcgacaaaggcgaatatgtaaggaggttgcacacggagttgtcgaacctcaagagatgcttttcggtggaagacacaaagcaattttgcatggaattggaacgcctagcaagagaattggaagcagcggaagaagacattgaagggccgccaatttatttaatgcttgagaagaagctatacaagcctttcctgcgtgaaattctggaagagaaagcaaaaatccagacttttgggacacgtcatccctccgaa

SEQ ID NO: 21378 - DNA, 1484 bp, Heterodera glycines
ttttgaatgacctttcaattgtgcgcaagcgttttttcgaaattgtccaactttctaatattgtgccgtcaacaagggtcaattgatgccgtcggaaaatttttttttaatgaatttgtaaaggtgtaaattccggattggaataacgactgtaacgaaatggagtatagccgccaaaaaataattcgaaaatctttcccaccatatgcattagtggaatctgtttttgttgcttttatgccaccaaaataagtccattttcgtgccgtgccctttgttggcgcagtattttttaaaatttttgtttcaaaattttgtgtcatccgtataaaatgaaaaagtaataaatgccaaaattttttattgcttctttgttcaggaatgatgccttcgaggagcaggacctcattaacgccttggagccatttttgatggcggaacgcgacagatcgtaagtgtgttgcaggcaattatcgcaccttcacttcaagaatcccggacgcggaggcgttgcacccaatcggattttgagagggcccatttgcccacaatttttagtaaaatggcggggatgtggcggcaatctgaaatggtcaacctccgttcccgcccctgaaaattttgaaaaaaaccccggctctgtcgaaaaagattaccccttcgccccgtcttttccatgctgtttttgggtgcttccgggttggtgaaactcatccccgaaattttttgaaaaatttttttttatgggtaaacatgcgttagcgtaaaacaaattggttaaataaattgatgtttcatttgtcggtgcctaaaaatgtattcctaattcggatgtttcttaagggtgttgcgcatcatgaaacgcaatcgggagctggagaacgaggtgatgaaggatgtgccgggatggaagaccggcacttggtacggcgagccggtctatttcacgttgggcgacaaatggattgaaccgaatgcaatggtcagttttagggggacatgggttgttcaattttttggaaattctattcaaaacccattcaattttcaagttttttggacaatatgtttcacgaagaattcaagattttcattgagtcggcaccgtaatcatgcatgtacaaggggtgcgccagtcagacccccatacgtcggacgtttggcgcagggggggggggtgcgccaggcttacgtcggcccctattttccccggcgacgacctttttctttttttgctattcaaaccacctttttttgcggcgcgttttttccaaaaaactttgtgggaaggggtggggcggtccggcggcgcctatcggcaccgccgggaaaattttttgaattttatgctacggaaattgttcacattttaacttttttcccctttgttatgaccccccccccctcctttacagccgccccccttacgacgcacgtggggggggggggggggggtgcgccggcgcaccccttgttcatgtatg

SEQ ID NO: 21379 - DNA, 1311 bp, Heterodera glycines
  unsure (1)..(1311): unsure at all n locations
ttcattttaattttcatggatttcagagtccagcgtcgtgtcttgaaatgttcatccacataaaagtcaaaacggtagctaatcatgcaattccaaggccaagttgataagccggaagcaaatcgaacacacaaagccaacagtcggcggaaacgaaactgaaaaaaagggaaacaaaatttaaaattgaatttaaaattggcattttttattttacattgcttttgccatttttcgctccgccgcttcttttcgattgtctgacattttgttgaaggcaattattaagacagaatttcggcacttttgtacttcagtgggctttttcttttctcaaaaattcatatgaaaacaatgcaatcaaagaaaaaaaaagaggggacatttaagtaaaacaatcgcaaaaacacattttaatattatttttatgcttttgtaaaaaatgtgaaagcgtacaatttttgaaggcattgtcaaggagaaaaacctgaacaaagagagaagaaaacaaatgatgaatgtataataaaattatttttacacaatttgcatatttacagttatatgtaatctaataattagggcttcttttttaggcaaatgcctaaatttttgcgcacttgatacgcaaagataagcacaaaaaacgcattttccgcttggtttgggatgtctacaatgacttttataatgcctattttgcctatttcgggttttttgtgatttttaaattgctataacttcaaaatttagtataaaagtggttgctcttcctccgccactttcattattattattattattattcgttcgctctctctctctctttgactttttctcctgacaattcctccaaaaatgattctgtacgttttgcatatttgttcacttaaccctttacttctcattttttagtctattcgttgtgccaatgtttgtcggatgttgtgccattctttggttttattgggaccgcctcaaaaaaccaaaaaagaaaatgtaaaaaagaaaaaaattcaaaaatttggtatttaattttcagtttcatctccgccgactgttggctttgtgtgttcgatttgcttacgccttcacaacttggccttggcatttcaatgatcagccaccgttttgacttttacgtggacgaacacttcaaaacacgcaaatgggcattgacacatattcaaatttggcgcagaattggagaaaatgacaccaaggaaatggaaatttgccatgacggtggaaatcctttgccaattcctcaaattncattgccacgcaaagtcattggattccnacgcatca

SEQ ID NO: 21380 - DNA, 1472 bp, Heterodera glycines
  unsure (1)..(1472): unsure at all n locations
aaacaaaggcaaaatttgcattttgcagtgatttctgcgaaattccaacaattttccgtgcccatttccctcaaatttctgccgacctccgtcactgccgctgcttttgcgttgggttccgtgccgagcacatgcgaccgaccgacgatagcgaacagtcgcaagtcgccgtcgcaattatttccgtctttgtgcaccattgacgaacgtctcccaccgccggaatacatttgtaggctgccgatgtaaaagccttaaaaagacaactatcgaagttttcggccaatgtaaaacaaatgggttgtgctttatacacacttaatatacatataattagatggctaattagataacaaaatacattcatatacactttcctacaactgttcttcaactttctgttttgtccactagttttaatacacgcaaacacatgtgtagatacgcgaaatacactccttaaaatcggcggaagtgaaagtgtaaaaggcgtatataaatcgatatttgattctacagtatcctttttatgttttgttgctgcaagaggcagagaaaagttgaaaaacgaagggagaaagagagatggacagagacggagaaaatggggaagagaaagaaacagagaaataatcagctcactcatttaacacctgaaaatttattaaaatttgttggatgcaattaaaggagatttgtaaaattttattggctttaataaagcatcaaatacaaaaacaaatgattaaatttatttgctgtcagcgtgagatttaaaaaaaaagaaacattaaatggcagtaatgaaaaaaagacagacgcagaaacaaaagaatgaatgggaattgattgtcctgtgaaggttttgtcgttgcattaaaatgaaatgcatttttagcacattaaacacaaacaaataaacataagcgataacaatcttaaaaagcgaaatgcaaaaataaatatcaaaaaagtcattaattataattaattttcgtcaaaatcgtttgagtgttcgtctccatccttctgcttggctcagtcctccaagtccgtctcgcggatgggccggcagcgctcgtgttggaaaatggcgtgcgcctcgcgcagcagaaaggcaccgaactcggcgatttgttttgcgcgacgcgaggcgagcccagggaacgagccacgcaccacgttggtcagattgtcaacaccttttacggggtggcatcattaatatggcaatttgagaattgtaattgatttttaaaaatcatgccaatgccagggatttgttacccgacatttccgtccccaatattcgggggacaacaaccctaattcgggttgtcaaaatggaggtcgaatttgcatttttggatccctanagcgtattcctttgattagttaattagccctcctattanacgccaccgatggcttcgatcattgccccttcgcgcacatgcgcctcggccgagtga

SEQ ID NO: 21381 - DNA, 1179 bp, Heterodera glycines
  unsure (1)..(1179): unsure at all n locations
attagttgctaattacccaatcaaccactggggagtacggtaaatgtctctcatcactcacaaattcccctccgcccccaccccaaccacctcctttttggtgggctgcgagtgggcgtattccgtgcgaatttgtgcctcctcccttctgccgatgcgctgactctccgccgcattgccccgttcttcggcgaccaccaaacgctgcagagaatggctgtactctgaacagcagaggaagagacgacgagttaatgccacacacacacaccgtagtaattaatgactgacaaatgcacgcccccccccaaaaaaaatggaaaaaggcggaacgagtcgtttttggatgcaattcattcccctcacccggatttttaaaaaaatttaaatttcaaaagaaaaacggcattgaatttgtaggaaaaagggtgctagagcgagagagagagagttacttttcccaaatcattggcattggcactcggataaaagtacaaaatttcattgatttccaattaaaaattcccgccccttttattacgttttattgcgtttgtgtccctctgctgctgctgttgtcctccttttccgtgccattgccgtgtctccaaatgggccaatttggcctcgtaaatgcgtcggttgcccgcattcattggccctgcaatgcaattgcgacggcgcaaccgctcgcgcagttcgtccagccgaagcatggcgaattggtgccgaagtgcgtccaacacggcctcgtcagagtggcgttgtacaacatcatcgtcatcaccatcatcagcatcgcttggctcaccatcactctataaactcggaaaattcttaaatattggaaccgcttttccgtatcagataaatttatttagaaaaaatcccctaaagagttctaaagattttcgatggaattcattgcattttgggggcaaataaaatgtgttatttcgtcaacgggaaacatttttaggcatttttcttgtttaggtggcccggtgaaagtgaaaagccaaaaggggtacagacggacactttggttttgtattatttttggtcaaaagagataaaatgccattgattcatcgaataaaagtgtgccaatttttccattttctttaaaattccatttaaaaattccctacctttctgctctntggtcatcgtcttccc

SEQ ID NO: 21382 - DNA, 1600 bp, Heterodera glycines
aaaatttgcactcttccgatcctttggatggtcagtttcagcaggcgtcgtcgctcctcctactttgactcatgtcaagtgctactgataagtatggggggggggaaggtgaaattgcacggtcgaagagccaatgcgaaagtgacgaccgcgtgcaagttccctaacgtttcagtcccgaagagacgaggcgatcgatcgctctcttcacattgtattcgtctctgctgctgtccaccagacatgctccctcgtgtcctaatcgttcagcaattgccaatccaatcctgtgaataggcacattttgtacggcattttcatatcagtgatcatcgattgagtacccttctgaatgctggtgtagctcaaacagtggtagctgctgtgttctactcgcccttcttttacaattgtaagagtttggtccaagcgaaacgaccccccccctacaccaatcgtctatcgcatagttttcgccttggaaggccacttgcattgaaaaaagcacaaaaaactcgtgtgggctcgcttcatacatatgattgagaactggtgacatcaaaatgaatacattttagggtgctcgggtactcaaagtttgagaaggtcaatccggacatgaaagactatatcgacgaagtcagtgctgaggatgaaagtgaagaggaggagagagatgatgataaaagtgatgaggaggaagaggaggaggaggaacggaagaaagggagaaagaagggaaataaagatgaggaagaagatgctgagagtgatgatgatgaggaggaggaggaggaagaaagggagaaagaaaaagggaaagaaagggagaaagaaaaagggaaagaaagggagaaagaggaaaggaaagaaagacgaagaagaagatgatgagagagatgaggaggaggaggaacggaagaaagggagaaagagaaaaggaaagaaagtttcggggtcgctgatcacgaatccgacatccatttcgacccatttcgaacccgaattcgaacaaaaagtcaaaaactcaattttcaacaaaattcgcatttattgttcaaaatcgtttcaaatgccacggcagcatcgactggtcaacacaaaaggcattcaaaaacgcagaacaatggacaaaagacagcagatttttaattgaagagaatggtgaccagggctggccgtgattgaatttccaatcacggaaatccgtgagccgtgatcacggggctttaaaaaaaatccgtgaaccgtgatcacggcaccccaaaatccccgtgatccgtgagccgtgattataaaaaaaatttttctaatgattttttatttaaatttatttaaaaaacggaatttaatcgcgggaaaaattcccagagtaatttatttaaatttatttgttttcttatttgttagtaaaaaataggataagactaacaatactgctaatattaaaaagaaaactaaacatataaacccgctttttttgcggcgaacttttccaaaaatgactaagtttacgatttttggcaattttttgaggaaaattagagctttttatagaaatctccaatgaaaattttttatttttacttaatttattaag

SEQ ID NO: 21383 - DNA, 3183 bp, Heterodera glycines
atttctttaataacttaaaaaacagttttaatagaaaacaataaaaggtacttttctgtttgagaccctccctgaaattttcaaataaatttctaggtaatttgtgacgctgattacgaatatgcctttgttttgcaaaattccgaacccctaacccgaactcgagcaaaaattcgatttcatatttacaaggtcattcagtttgtccccccattttttttaaaaaaatttttctttttaagtcataataacatattttaagggttttcgggatagctgatcacgaatacaatttgatcaaattcaaacccccaacatgaattcgaacaaaacgtcgaaagtacaagtttttgaattttgaatttttagtttagaaaatgttttaaataattttttaatgcaagaatgatagattccagttatttttatgtatttaagccgtttttagacgaatatgcgaaatccgaaaataatttgtttatttaaattgaataaaaaaattcgtgattattgttatgatataggtaatgattttctttattttcataaatagactaaaaaaatatatatgcaaaatgtatttaattcttatctttattatcataaatatataaaaacaaaattcataaatttacttctgcattccgacgcttttcaactgcttggagtggacctgcttcagcagctaaattgaaaaattaattaattaattaatttttcaaaaatttttcaaatttaccatcatttaagtctcttgaagaaataggactggcaaaggttggatggctggagatggcaagtaaaacgagcaatgcaacaagacttgccaccgacaaggacattgttctcatttgactgacttgcattggcaaaatgtaaattaaaaaatcgctggctaaaattaagaaaaagatattaaattattttcaattatgttggctaaattaagattatttatatcaatattaaaaaaaagcaactttctttgcttttgctaacatgtttttttctaatttgcttttggttaaattggaatataaatattttccaaatttccaatttagtgaaaattacgaaagacaaaaatgaaaggcacaaattttctcatttgcttcaaagccaaaaaccattaatggcatggaaaagtgccgagaacaacaaatgtccaacctacttcaacatgccaaagaaggaaaatgtgtccaaaattagaaaaaattaacaacccccacaattcatcaaaatggttgggtgaataaagaaaaaaaagatacactgcctattacaatttatgaatatttttatttagaaagtttaaaaaaaattaacgaaattcgaaatttaattaaattttgaaaaaagcaaaaaaaaaaaaaaacgtaacctaaatacccacatagataaaaatgaataaaagtcaatctttttatatagaatttatgacgcataaagttttgtccttgtgataaatttggccatgacacagggtggcatagtcagaattgggcacattgttaaatttcaaaaaggtcccaaaatggcatattttaaacaaaatttgtgccaactccccacacaaataaagtgaaatgtatgatgaaatgccgaaaaaatggacactaatttttgacagaacacatcggctggatgtcggtgccattagtggtggtgatgctaccataaattgaatttaaagacgaataggaagacacaaattttttgtgacatttcctttttcaggcttagttcccggtttatgaagaagaagaaaaaatgctgaaatccgatgcaaattacttttttgttttatttatttaaataaattaaataaatatatatttattttgattttttgccgaattttgtttatctgctccaaaatgcatctgtggaaatgcggagcttttgaaacaactaactgacaaaatgtaaaatatactgtgaaaatgggatactgtaagtttgtttcaatacaaattacgacaaagaattaagaatcatcctattacagtgtcatatttaaaaaatatactgtatcattaaagaatttttcacactatcttattttcagaatacattgaactttccgaaaataaatattagtcgctaattaatagattaaaaatgaaatttatatattttaatttcattattattgtggaaatccttcaaatttacccacgagtgtttttttccacattcgctgtttaaaaggttcaatagaaagaagaatcatcattcagtccacccaatgaagaaaaaaaaaagtgggacaaggacagaatgccaacaaggcaatgaaggatagataattggcacagaatgccaaaaatcagaaaaatgcactccctcgatgccctggagggatgcaatgttttcccatcagccgccgataagacgacggaagaaattaaaggctctcctctggccatgggatgtgttgttgtcgtcgtctacgacgaaaattccattatcttccatggaagatgggacatcggaagaaaattggaacgcatttggcggatgggtaagcagaaatcgtggccaattcaacaggaaatgatgtgatggcgaacccaattttcacaaaaatcgtattttaaatgaataaataattaaaatgcaattttaattttatagcagtcaaatttaattgggttgttattgataaataaattaaaaaattttatgcactttattttactttattttcttgataatataataagatgatatttaattgatgataatttatagttaagaaataaatttgaataaaaaattaacatttaaaaaaaaagtgtgaaaagtttttaatatttaattttgtcatttttctaagaaaggtttgaacataaaattttcttcaattataaaaaactttatttatataaaaaataatattttctaaagagttttattttcgcttttcaaaattaaattattaaatatttttcttttaagttattctaaataatttaattagttccattatagaaatttcttctaaaaaaattgaattaaaatatttaaattttatcgattttattctataaatttattattcattaattagagctaattttctataattacaaaataataatgaaaagagtgaaataatttccaacaattcaacaaagatgtataaaatatttatttattcaaattttaaaaattcta

SEQ ID NO: 21384 - DNA, 1131 bp, Heterodera glycines
  unsure (1)..(1131): unsure at all n locations
caactccgtctggccaactccgtctgagccaactccgtctcgccaactccgtctgggccaactccgtctgagccaactccgtctgagccaactccgtctcgccaactccgtcttagtgtataaggggccaactccgtctcagtaaaaaaaattataagaaattttcaattatcatcaaaatatcacttcggcttaatttttaaaaatctcagttttatccaaaatataataacaaataaaattaacaaaaaaatcaacaatccgtttgataattgctcgaaattcccctaagcatttcaataatcgaattttggttttggttttggcgatattcccctgatcattttcgatttgcggctgcgctttttcctcattgtagcgctgcaaaatcctcagaattcttttgtccgtgtcgcggtagcgctttgcttttggcggcggagcatttccggcaaggaaatgttcgaagtcaacgtcgattactttctggtgctcacgcaaaatattgatgaatttccatattgttgggtgtccttgtccgatcgcatgttgcaacgtgcgatggtacgcttcggcgaagttgtttgtgcggtcggtgccgctcattgtgcgctcatacacactccattcttcaggacgaaacaatggacgagtgcgtgtgccattgttgcgaagtcgcccaacgtagttgattacaaacctttaaagtcaataatgaaattgaaaaaaaattaaactcaacaaaccaatcgagaacgccctcaagttcacccggcagatgatcttctagggctgccagcgccggtgtaaggtcctcaagcggcacaaacgccagcgaagtgaccattttggcgaattgtgcaaaggctgcgtcagttttgaaacgctaaatttgagaatttcaaaagtaataaaaaatttcttacgtgagtttgctcgtcggtaagacatgctttcatgttgcgcaccaaatggaataggcaaaagttgattgagcattgtggatgtttggcacggagggcgtaaatgtacatcgactgctgaaggcaatttccgaatcgcgaagcaatcgcttagaaaatcagaattcttanatttaaaaaatatgtgaaaagctccccttanaacaca

SEQ ID NO: 21385 - DNA, 2461 bp, Heterodera glycines
aatatgtaaaaatatgtaaataagttccaacttttgttcgcaaaaacaaaaaaagtgtttttactactatttagagcatggagaatccaggaaaaaaaattaagtatttacataaaattgacatccctaataatgaccacgaataaaaaacgccaaatatgcaaattgcagcattattattttcacagaaaaggtttcttacttgctttaaaaatgtgcaaaaaataatataaatttatcctcatttttaccagttttttaaaaataataatcttacgaagttcgcagagacatatggatccacgttgctaatgatcgaggttgaaactgtcacgagttgattctggtaccattccattcgtttttcgtctccggcgaagctcagatttgcacaaattgaaccaaaaaacatctgtcaaatattttgcttcagtaaaagataaaattgatacattgaacattgatatattaatatatggaagcgatttttacgtgttattagatggttgggaaagttggttattgtaactctcggaacaaaaataataatttctaaactatgtatagcttcgcgattacacaattaccaaaaaagttatacatggaagttgcaaaaaaaaatcaaaaattttgaaactttttaataaatttttccaggtttgaaattttctcgttttttgtaaggtaaatagagcatgttaagagctttcgaatgacaccaagaatgttgaattttggtgccaaagaaaaaagttataagtggaaaaacatgcttgggcccaaatgtgtggggcccaacatgagggccaatcgaggggtccaatcgtgaggaccaaactgacgggttcaggtgacagtgattttaacacataaaaatcgcgacgctaattaaactttttaaaataatttattataccaatttaacaacatccaaacgaatgatattttcaagctcttttatttcctttctgtggaagtttttgccgacgacaatgtcattgagtaagcaacttcaaaaaatctttttgaaatgcaaaaaagatggaaaactaacacggaaatgggtccatatgttccagtttcgaggaaaatttcttttacagctgaaaatgctgatgaagacgatgcatattcaaatgaagagactattagttttaaaatatagcaaatagacagtgaattaagtgcaacagaccaatgttattttccactttttgaagcacgctgttcgcactgtcagtctcaagttctgtgaaccatataactaattctatacaaaaaatatttttaaattagaattaatgtaaagcaatgtttaatacccgctgaaatcgaatcgaatttttccctttcgatttggctgcttatttgcatacgaattttgttgagcatggggacaaattctgcttgacgttcaatctgttcaggcgacaatccaattgtgcagtcgtcgacagtgtatgtttgtatgtactgaaaggtgatttgttcttaatgatttaaataatttattcacatgaaattaaaatgataaaaactataaccgataaagcaaaaagtatttttattttaaacaattactttaatctatgacataaaaggcaaaaatactgtttttatattataattaatttagtgtgtgatcaagctacccttacgtcgagaatacttaatggtgtctgtttgtcggggtcatcacaaagaccaatgaatctttccacgtctttgtctgtttttacaattgcagggtcccaaaatagcgacacgtatcgacgcagagttttcatcggacggcgaacgttctgaaataccaagtaaactggcaaaaaaatttcagtagtaaataaggatttccgaaaatagttaaatctataatttagaaaaagaagttacaggcccgtaacaaaagggaaaagagggaacactcccccccaaaagaaacttatttttttttaatttttctaaatttgcatgcttttcttatcatatttaaaatttcaaaataaattcatgccggcgcctaccggcagtgtcggaacctagaaccattatgttttgaaagttcgacaccaaaaatacaaacttctgtcattttcaggcatatctactaaatataaataatattggagaaaaggccagagagcaaataaaaagttctttgggtctactccccgaaatttttttctgtatactggccagttgattaatatttttatttcgtttacgtttttataatcgcgtaggttgccgcgaagcgcaattacgcgttccgaaacagcaatcgtgctctgcaacttctcaaaattttcgtccattgtcttttgaagcttcatcagagccttgtactcatcagattccggctaaaaaaagacgttaaatttaataagaaaaaactttaactctgaaatttgcgataattgtcagaagttattgaacaaaaatttttgcccgttttaattta

SEQ ID NO: 21386 - DNA, 975 bp, Heterodera glycines
ttttcggggaaaacctcatgttgaaggctgtagaaaaaagagatagccatttttctgagaatatctattcttagttatggagccattttccaaccgaccatttgtagggctcaaccgtatatagtaatgcgttttcggggacaacctcatgtgtaaggctgtagaaaaaagagatagccatttttctgagaatatctattcttagttatggagccattttccaaccgaccatttgtagggctcaaccgtatatagtaatgcgttttcggggaaaacctcatgtggaaggctgtagaaaaaagagatagccatttttctgagaatatctattcttagttatggagccattttccaaccgaccatttgtagggctcaaccgtatatagtaatgcgttttcggggaaaacctcatgtggaaggctgtagaaaaaagagatagccatttttctgagaatatctattcttagttatggagccattttccaaccgaccatttgtagggctcaaccgtatatagtaatgcgttttcggggaaaacctcatgtggaaggctgtagaaaaaagagatagccatttttctgagaatatctattcttagttatggagccattttccaaccgaccatttgtagggctcaaccgtatatagtaatgcgttttcggggaaaacctcatgttgaaggttgtagaaaaaagagatagccatttttctgagaatatctattcttagttatggagccattttccaaccgaccatttgtagggctcaaccgtatatagtaatgcgttttcggggaaaacctcatgtggaaggctgtagaaaaaagagatagccatttttctgagaatatctattcttagttatggagccattttccaaccgaccatttgtagggctcaaccgtatatagtaatgcgttttcggggaaaacctcatgtggaaggctgtagaaaaaagagatagccatttttctga

SEQ ID NO: 21387 - DNA, 934 bp, Heterodera glycines
  unsure (1)..(934): unsure at all n locations
actccaaaaagtgggtctaaacgtcgtttttgagcaaaataacaacatttcgacccccctggagtaaccnncctgtctggaaatgtcttcctgatcatttttgtagagttcgaacaatgttcgacttttcgaccttttgttcgaactttttattttcaataacccagggctcccagtcactgtagaaacatttaaagtcacttttgaggtcttacaagtgctctgtgagcgaaaataacaaatgaaatttgttcgaactccaaaaagtgggtctaaacgtcgtttttgagcaaaaataacaacatttcgaccccccttggagtaaccccctgtctggaaatgtcttcctgatcatttttgtagagttcgaacaatgttagacttttcgaccttttgttcgaactttttattttcaataacccagggctcccagtcactgtagaaacatttaaagtctcttttgaggtcttacaagtgctctgtgagcgaaaataacaaatgaaatttgttcgaactccaaaaagtgggtctaaacgtcgtttttgagcaaaaataacaacatttcgaccccccttggagtaaccccctgtctagaaatgtcttcctgatcatttttgtagagttcgaacaatgttagacttttcgaccttttgttcgaactcgttattttggtctgaatagggctctaatccattgcgcaagtatttttgacgctttattttaatttgtaattaaaaaaatatatttaaattaatttttgaatataaatattagaaataataattagcgaatgggagcgccgtagcatagtggttaacgcttttgattaaatgctttggggttctagtccgcacggcgctcccataattaggtaggaattaacaattattaataataataattaaagctttaataataataaataatgctttat

SEQ ID NO: 21388 - DNA, 1778 bp, Heterodera glycines
taggcattaataactcgaaaagtagcaatgaatgaaatgttgagaagtgatcgatcaattgcagggtaaaatggaagatgaattcggttttgacgtgatcattaaatgtattaaactgaacatttcactgctttcggctgttctacggttggctcatcaattgagaaatccgtagaaatcaattaacaataaaaattattcttaacgattaaatgcttaaaccagggacggggggattagtacttgaatgtcaagtacgtacttgaaaatatttgacatttattttactgtcgacatgacattgtttttcatttttagtaaaatgccaccgattttgagccgcttctcccgttaccgctaatacgtaaactttcatgtaactcaacataaaatggatattagcttaaaataatctcagattcgttttcagcaccaaaaattaccataaaaaataaaataaaaaccgaaggaacagtgactaccgactttatcattagatcaaaagaatgagcctgggatttcaggaaatctctaatttatcctaaaggcatatacccacacatatatataatacaatttgtgatcaccgcaacaaaaagaacaattttatatacgtcaaattaattatctaataccgcaattcaaattgatcgatcacttctcaaacaattcattcattcatttctgctgctgatcatttgggcagcgaattgcgtcaagaagcctaaaaatcgtaacaccacaataaatttgaattattttttgggaaaaccaatctctcacccacccgtccccgatgttgtcctcatcattcatttcaatgccaatttgattccactgatgatagccaatcgcctcctcttcccattttgcccatttgtccgcgtcgcgcacaattggacaacggatgagcagaaaacgagtacaattgtcgtcaattattttcaatgccaattgctcccgagtcaattggttggtcagcacagagggcacaacgggatcagcaaaaggcaacggacgaaaccaaacaatgacaataaaattgacaggagaagaagccgaggcaaatgcctaaaatacgggaaaattgattaaagaaatgtaattaatatggcttttcggttggggatgggcacgaatcctaattagtaaggtgggcacttttggcccaattagggcataaaatttcttccaatgaactccaaaaaacgtaaaagagccaaataaatcattcgaaatcaccgctttgaaggctgcaatcttcgacggcaaattcacagcatccaagtcccacgcgcatttcaacacctttggcgcatcgttttgaagcggagtgaaaagccatttggccaccgcttgtccatccgatgccgcggcactgtcatcggcagggaattcgatgaagaaattggtgacatggatagtgagaacgtgaagcgatgggcagtcgttgagaattgacgggacgaatttgcgcaaacggtgaaaaaatccgacaaacaattccaagcgattaatgttttttccgaacattggccaaatgttgtgcaaaatgaactccaaaatgcggtcattgttcgtttggatggacaatttaattggacagaatgagtcgaaaagcggacgaaaatggccgagaaaagcaatgacattttgatcgatgaaactgaaaatggattgaatcgttttacaaacagaaaacaacaaatcattcgcttcaccttattgaaatggcttcgaatccgacgactttctttggcaacggatttggcggaatt

SEQ ID NO: 21389 - DNA, 1588 bp, Heterodera glycines
tgaaagtgtgcgtcttcgaagcaaagaggaagcggcgcgtgaagcggcgcgaagggaagcggcggattcgcctgagtcggagagagccgcggaaggaatgcgccattttgtgttggaggacaacgttttaacagtgccggaacgctttttggaggcggttggtccctttgctgctttgctttgctttacctccgatcactttttccgctgctattcttctgatctttttccgctttgcttttcctctaatcactttttccgctttgcttttcctctgatcacgttttccgctttgcttttcctctgatcactttttccactttgcttttcctctgatcacttttcccgctttgcttttcctctgatcacgttttccgctttgcttttcctctgatcactttttccactttgcttttcctctgatcacgttttccgctttgcttttcctctgatcacttttcccgctttgcttttcctctgatcacttttcccgctttgcttttcctctgatcacttttcccgctttgcttttcctctgatcacttttcccgctttgcttttcctctgatcacttttcccgctttgcttttcctctgatcacttttcccgctttgcttttcctctgatcacttttcccgctttgcttttcctctgatcacttttcccgctttgcttttcctctgatcacttttcccgctttgcttttcctctgatcacttttcccgctttgcttttcctctgatcacttttctcttccctttctcttttccataatcatttttcaattaaatatcaatctcttttttcctgttcaagattagcaaatatgcgggaagtgaccagcagatgggatgccaggatatgatcatgctgataactgatggagcacccggctttttccgcgaaacattcgaattgttcaatccggaaaagcgggtaaaaagggcgaagccaacaaaagtccaaaaaatgccatttcaaaattcaggtccgtttcttttcgtttgtcgttggagaagaggcaaaggattttgagcaggtgcttatcccttatattcggccaaatttgaatttgaaaaaggtccgatggatggcatgtgcaaaccgcggatttatggcacatatcagttcaatggccgacgttcaggaggtgagacaggcgaaaatatatgggaaaagagagagagagagaaggtaattaattacatttgatcaaggcaattaaaaatgaaaaaacaaaggaatgggcaacaaaaatacaaacttttcggggatgaaacattcaaatgcattcaaacgtttatccacttaccccatagaaagtgcagcaatacgttcgcattttgtcccgcaccgtttcgcgacaaaaggccgctttcaccgaggacagtccgttttggagtggggcaacccgcgaaagaatggtcagtcggtgaagaagggagacataaagcggggggaaagggagggaaaagcgtgtccttagtagcaatggattggtaactttacgttaacaatttcgccaaatctctccaacagagcgacgacttcatcgtttctgtttccttcccgtcgtcctccccgacgg

SEQ ID NO: 21390 - DNA, 1461 bp, Heterodera glycines
cggttgctgccattcccgagggtcttcccattgttgcgtctgttacgttggccattggtgtcatgcgaatgggcagtctaaatgccgtggtcaaaaaactgtcggtgcgtttattattttaaatcaccaaaattactactcgaaaatttaatttcttggttttactttgcgtcatttaaggcggttgaaacattgggctgtgtgacggttatttgttccgacaaaacgggaacactgaccaaaaatgagatgactgcttgcattgtggtggccgctgacgacacgcgggcggaggtaaacgcaaagggttttatgcattcattcgcttttacccttacacatttttcggttcctgtcgtcggtttcaacgattcgccactttcgcccgccaacggaagtggcggagagtgtcgcctgtcgaacggtgagcgcgtggttggccattcccacccggcgatcagccgagtgttggagattggctgtgtgtgcaacaactcgcacttggccaatggcacaatcatcggacagccgacggaaggggcacttttggtactggcgacagaggtggaaaacaaacgataaaaaacaacgaagaagacagagttgcaaaaatagacccaattggacatttctcgctcatatttccgccgtctcaacgaaatgccgttcaattcggacaacaaatggatgggtgttcaggtggaacccatcaatcgggttagaatcatttttataatgctctataaatgatattgttcacgcaaatttaaagcccggcgaggttgagctgatgctgaagggtgccattgaccgtgtgttgggaatgtgcgttggctatttggacaacggagtcgcccatcggccgttggacgtacaacggagagaacacattttgcacttggccaccggacttggccaatccgggctcaggggtgagcatgaacatttgaatgcctcaaaatgctgctaattgtaagattttgctgttaagttattgcaatggcttgtggcaaagacatgaactcattgtattatgttggtttagtcggcatcatggacccagtaactcatttttattgttaaaaatgtgttcttatccataaaattaagccacggcctggttgccgacaatccatcgagacggtacagaatgccggagtctccgtcaaaatggtcaccggcgatgcgttggaaacagcgattagcattggtagaacaagaaataacagtggaaaatggatttatgcattaatagtctttcaaatgaaaaaaggctatacatattttttgatttttctgaaaataatattttagggttttaaaggattacgatttgttaccctggtcaggatctcgaattttattactgaatccagtccgggtccagttccgagtcacttaccttatccgaatttttcaatatggttttttaaattgcaaggcactcgactaaacatcttc

SEQ ID NO: 21391 - DNA, 894 bp, Heterodera glycines
tcttttacacaatattcccgttcatggtcgcggtttgttaatccatgggcgaggcatgctatttgcgaaagtgttataaattacgccatttaccgttttaaggtcttcaaaactttttccagaaacatgaagcaaaagataacgaagatagtatttttcaccctcagttgggctaactggatacattcttccaattgttttacttattgtatgattttttcgtaaaatccatttcccttgcttaggattccaaacacaaaattttggcatttcaggatataaaaataagggtgaatttggattctctttaaaaaagtcaaaatatgccatcagtttactttttttgtcttttttctcgattattttttcctcctcatcattttcatcaaaaaatattgtttgctcattttctaagtgcacaggtaatctttgtacagaatgtgacttttcttgtaattggaacttaaaaattttccagcaagcctctacagggctgagataacgtgcatcaagaaaggagcctgcttcatcataaattaattcctttacagtacctttttcagttgttacacaacgaactgtggctgcgtcatatcctttaaatatgtatttgtatatatattttactgcttttatatcagcaactttttcaatatttatgtgtgatttaaaccgtttaatcaaatatggattataaggcacaacatcctgattagtcataactctttttttccctgttttccaatcaatttttgtataagttcttccattgttagggcgtttatataacgggtaacaattttcatttatttctgttttttcacggaatttttttggaaattttttactacatttgttttttttcgaacaccaacacattgcattaggaaaatc

SEQ ID NO: 21392 - DNA, 579 bp, Heterodera glycines
gtatgcctgtgccgaagtcgcattagaatcccttacaatctgtctctcaccctcagacatttgatttcggcttacttttcgttttctgtctttttcacgggaaacatcagctttttcgctggacatattcatacgtgataactgcattctgctgattgtggtttgttcggaattttctatctgtttgtctttctcggaaagattacaattattaccaacaaaaaattcttcaaatacttcatcaaggtctatcacatcaaaattatttgctttacgtttaatcgtttttctatcattatcattttcaatatggtcagactgcttttttagggagcttacaaccctttcaatcgtttcaccgctttttacgggagcttcgaacccggcaatctgttgctgattatttgaagatgtatttggaaattcatttgaatttccaacagaaaaattttgttttttacgaaccattatctaaaatcaaattaaaaagttataaaaaaactgtagaagaaatattccaaattttaaaatatttatgtttctactaaaaaaaagaataaaatataaaaacactaatag

SEQ ID NO: 21393 - DNA, 1485 bp, Heterodera glycines
  unsure (1)..(1485): unsure at all n locations
ttattatttttggaattttttataaaattatctgttccttcaatgaacaagcaaatcccttctcaatgttaacaatacataattttgttcattcattttaaatgcatataaatttaaaaaatttgagatttaaaatttggattacttaccattttcattttgaaaccattttttatatgtaaaatcattgaaaaatgcaaaattttaatttattgcgttttgggtaattcttatttagcgtagcccgtacttaccccgtgtggtgcgcagcctgtaaccctaccttttacttacactcaaatttttataggagggaaaaagaagaaatcaatcagtaaccgatggcacgacgacatttcgcctaataacccgaaattgaatatttaaaacatttcatttttgtacattatcaaagaacaaaatgttggatggattcttgacgaagccgactttgaatcggataaacgattgactaacgccttgcatctgttatctgttcggtttcgtgatcaagattttgtgagggaattcggtacttccgtgttttgctacccccccccccctaaaaatgtcatgatctcaataaagtagagcacttttctagggtagttttaggcgctggtcatgaatctggcatcacaacttcaaaattttttgattttgtctgtgattttcatcatatgactttgtctatgattttttaaaaggaaataaaatcatatgatatatcaatcgattcctctcgtcgaaaggaatcgattggtactggttacagagtttttcgattcctctatcaaaagttgtagccctacaaattttagctgggattgaaccggtctcttttcaaatgaagccgatgcgctaccggcgggccgctcggcttccctcaacccttttttggatttttagaaatcctagctagacatgctcctggggttttaaaaagaaaaaaagacattttttagctttttcgaaaaatcattgacaaaatcatagagtttgcagtttgacctcatattcttaatcagtgcctaaaattaccctagaaaagtgctttcctttatcgggaccatgacatttttaggggggggggggtagcaaaacacggaagtaccgggaattcttgttttagtaggcgaaatgtgacatttttatggggaggggggtagcaaaacctacaagtacctaatttttcaacttggtccaactgggtatttaaacagtgcaaaattttttttcaaattaatgctaaaaattaaattgatttcataaaaaccttttacaaataagcgtcttattattttaatgcaaatgggaccaagaaagtgttggctgtgttgtgataatgtaaagaatgatgggcaaagaatgagagtaaggaaagctgattctgtgtaattcatggtgaccttcccccaggngtattatcgaattgcgcagatggagctatttgaaatgtnnngcaattcanngcttttgattgcc

SEQ ID NO: 21394 - DNA, 558 bp, Heterodera glycines
gggggctgcagtcccccgtacgaggccgcgaagcggccgagccctccccaactgttcaacatcccaaggcacacaaaaagttaaaaatgctaaagaaatttgctgaggttgagtcccggcgattggaatgttggtgggttgagtcccagtgattgaatgctggagagttgagtcccgttgattggaatgttggtgggttgagtcccagtgattgaatgctggagagttgagtcccagtgattgaatgctggagagttgagtcccagtgattgaaatgctggagggttgagtcccgttgattggaatgttggtgggttgagtcccagtgattgaaatgctggagagttgagtcccgttgattggaatgttggtgggttgagtcccagtgattgaatgctggagagttgagtcccagtgattgaatgctggagagttgagtcccagtgattgaaatgctggagggttgagtcccgttgattggaatgttggtgggttgagtccccagtgattgaatgctggaagttgagtcccagtggggaggctggagagttgagtccc

SEQ ID NO: 21395 - DNA, 861 bp, Heterodera glycines
ctgggccccgccatctgggccccaagggccagtcacattttccacttcatattgtcaaaaaaattttgaataattctaagatatgacctgaaaaattaaaaaaatacatccctaagaattgaaaagtgttctcgagaactgatcgccaaaatttaatatttttttgataaaaaattttatgtttatattttctttattcgaaaaaatatataaaatatgtatagtcatttaaataaccaattaaatttttttttgattaagttttacgtgttttgttccctaaaaattagagttcagcgggaccgggaattttgggcaaaatcgggaccgcgacctaatcgggttgaaaaaccgggaatttcccaggtcaaagccgggaccttggtactcatttgtccgggttttggtccggtcccgctcaacactatactaaaaatcgctaataaaaaaaatttaactcgcctttttcatcgccttctcgggatttttgttcctttttcatgcattttttgcaatattttggtgcctattattttattaaaaattgctaatacaaaattcaatataatgataattacggctgggaattatatggatataaaatctcaaaatatggccataaaatatggaccaaaaatagcgaaatatggacataaaatgtcaaaaaatggacataaaaaagttgtggtaccatctaatttttgagtttaaaatacactactgtcttttaataatgtttgacaatatgagatggaaaatgggaccggcccagatggcggggcccagttaatctggggcccagtcggcggggcccagttggcggggcccagttggtggggcccagtcggcggggcccagtcg

SEQ ID NO: 21396 - DNA, 1411 bp, Heterodera glycines
aaaaggcaaaaaaggcgtaattaaaatcaacttatgtagaagcttcaaaccaagtggaaaatgtgttatctatgcttaatatgtctgaattaatgcgcagaaaaaggcatattcctcaaaattctttctctaataattaattattaattaaggaattgatggacccgagcaaaggcctttacaatgaaagtaaggacaaagtgacattagccatagatatttcgtagtaaaaaaagaatgaaatgactgaggaaagatggattaaattttttacagtcaaaattatttcatgtaattgtttattttgcagaataattggaaaaatataattattattaataattctttatttctacgagtctatttaatattttaggaaccctttttgattaaatttaaaatttcttcatttaaaaattttgcacttaattttttgtataaaattcttgtaacccatgtggattatcttatgaaatatagaaacactcaataatatatataattctggtattatcataaagaaaattgtatattgattataagttcatttatatctttatcattgatattacaacaaaaaatttattggtttataaaaatttgtattaaaatgacaatattgcaatttaatatcctttatttgtatatcacacatcatataaaaatgaatatatatttttacggcaaattttattgtatatgtttaaacaatattttaacttgaattttcgtatcattaacattattaaattattttagaagaattttcttctacatttaattttaaatatgatcattttccatttaattattaacttttttcagttaatttaagttaattttctgaatatactatcatctaagaaaatttttatagtagtaatatttgaacataattttattaagtggacagattttttgaatttttacagttaaaattatttcatgtagttgtttattttgcagaataattggaacaatataaattataactaataattatctttatttttacgagtcggtttaatatattaggaacctttttgattaattttaaaatgtcttcattgaaaattttgcacttaattttctgtataaaattcttgtaacccatgtagagtaagaacttatgaaatttaaataggtaacatagaataatatagataattcttatattatcataaaaagtgtatttattatagttcatttatatctttatcattgatattaaaacaaaaaatattgtttataaaaatttgtattaaatgacaatatgcaatttaatagaaattattcttataactggggttctttactgcttattatcattcttcttattatccttaatttaggtatatctgaaatttgtagtttaatttattttaatttagagtattttttttttgtaaat

SEQ ID NO: 21397 - DNA, 1161 bp, Heterodera glycines
aggattcggtctccccataaatctggggcgcatcggttcggggggactgccccgaaaacaaaaaaatcgattttttcaagtgtccgtttggggtactcaaacaattatggggagcaaaaatccaacgcagaattaaagtacaggctatagggaagctattcccgaaggattcggtctccccataaatctgggcgcatcggttcggggggactgccccgaaaacaaaaaaatcgattttttcaagtgtccgtttggggtactcaaacaattatggggagcaaaaatccaacgcagaattaaagtacaggctatagggaagctattcccgaaggattcggtctccccataaatctgggcgcatcggttcggggggactgccccgaaaacaaaaataaatcgattttttcaagtgtccgtttggggtactcaaacaattatggggagcaaaaatccaacgcagaattaaagtacaggctatagtgaagctattccggaaggattcggtctccccataaatctgggcgcatcggttcagggggactgccccgaaaacccaaaaaaaaattttttggataaaaattatttaaatgaactgactagataatatttaaaataggttatttctcttcctttcagtatccctgcaaagtttggtgcgcttctgatcagtttctgaaaaaaaagttaagcctaaactttttggcctgtttaaaaaggaattaaaaatttttaaaaattttattcatctccctttttgatagaaaaagcatcagagtgcctaaactaacatgtaaataaaatttggtgcgtttcagaaccctttctgaaaaaatatttaagaattaattttgcaaaaaataaataaaaacgaaagactcagattttcgaaaatttttttgagccagctagctcggcgctcatttcagtgtaagttagtcctttaccggggagtatccctgcaaagtttggtacgcttctgctcattagcaaaaatatgagtgatcgaatttcactaaaaaagtaagcctacattttttggcatattaaaaagcaattaaaaatttttaaatttaataattttctgcaccgaaagtactcactcgctctcctgggccggggggggggggggggggggcccccccccccccccccccccccccc

SEQ ID NO: 21398 - DNA, 1519 bp, Heterodera glycines
tctccttttcttctccatttttcctttctctctctctctcttttttctctctctctctaattcactactcctcctacagtctctcctccgtcccttttcttcgcccttcccattttgatgtctttccgttcagtttcgacttcccctccactgcttcttcctcttcctcttctgcttctcttcccacaatgcaaattcccgctgatcatttccaacaacaattcgtttccccaaattttgcgcaaaatccgccaaaattgtcctccatttatcagcaacaattcggcagttcacttagcaggtaaaaaagatgaaaaacgaactttgatgggcttttggtgccgaattagcatttgccatttcccccggggcattctttggccttatgtccactctccgccgtttgttcagttgtcccccgccggtcacttcttcgtccgtccatcagcagctcagcagtggcggcggttctggctttatcgcctcgtcgcatcccttcgcccaatcggccgccaatttaatgcgcgggttcaggtcgcttcataatttggctgatctgtgcctcgccccgtccgactgtcgccccaatttcagcattttctcgtccgactctcagcagttccccttcccggtgcctccccagtcgcttcagtctgtgatgagcggtgccccctctgcttctctcgctcgtcctacctccttcccagccgtactctcttccccgagttcgtccttcgttgcccaacatcaaagttccgcctcttcgtccggccaacccgccgtcatttcctcgtcctcgcccgattcaccgatcacttccaatcacccggcagggccaatggaagaggggcaaatgcacgaggagcccaaattatgtgccgtttgcagcgattacgcaatttggtaagtgggaggaatggaatgaaattgaggaggagggaagggagggcactccctgcaggaaagagtgccaacgaattggtcaccgttcgtccgttattccctcaacaatcattggcatttggttttagtcagcactatggcgcgttgacttgcgaaggctgcaaaggcttctttaagcggacagtacaaaagaagtcgcagtatgtgtgtggtgagtgtccaattgtctctttttctctcaccgtctctctttaagcgggcaacaaaaattgccaaattgacaaacgctatcgctccaggtcagttcttcgctcttttggtcgtttattactcaatcgcttggcagatgccaatattgtcgcttccaaaagtgtttggaggttggcatggtgcgcgagattgtccgttacggcagtctccagggacgccgggggcggttgccttccaaggtgaaaagttcgagcggagggattggcggcagcgccggcacggcgatgccaattggcatgggcggcggagtgcagcccgagccggcgccaagtccaccgctgcccattctgaccatcattgccaaggtgggtggcgcctgaactgtccgggtgatcagattttgaag

SEQ ID NO: 21399 - DNA, 2166 bp, Heterodera glycines
  unsure (1)..(2166): unsure at all n locations
gcaggaagcagttcaggcaagttgatcaatttnaacattctaagtgagagattttttatttgccggtaaaaatcaaaaattaaaaatttttatggcccaaaaacatggtcagttttaaattgtaaaaatctatttttttaaattaagttggccatcgacttccgcacccattgtcaacgcgattatcccatccaaagctgtcgcgtcgcattctcttgccggttgggaattaatttaaattaataatttaccaattttttgtataaattttcaactactaatgcttcaaataaatttttactttaataatttattttaaatttagttaaaaaatatatgatttgaattgtcattaaaagtaatattttgtagatgttagcaatgttcaggacgcgtacattcgccgtatggaattgttttacgcagggtgagacagttcaaaagaattgtaaaaagataaattatgaaaattataaaaaaatatttttttaattttccatttaaattaacgcaataatttcataatttaagtcaaaagaaataaattcgtacctttttaaatttttttttgaaaaaattattaaaatatctacataattattcatatttccgtatttttatcaatttatttttatttcatattcttcgtctttaaattcaatattttttgcccatttagcaaattgctcaatcgaattttggacctccataaagccgaccaaagccccacgaccataacggagcagccaaaatctgagccgaccgaagaaattggtgttgatcagaatctgaacccggtagtacaagcgggattggcccatttcagtctggtgagccttatatgctttgctaaattttttcttttttgagggtccttttagcataattttttagtcttaaaatttttatttaaaaaaccgggacttgaatcccgtaattttattccgaaaaacacgatttaaactgattatttatttaatttaattgctaatttttctttattttttgcaattcgcataaaaattcaataataaaaaacttcggtttttatcattagaatttttaaaattttcaatctttaaatttccattttttgtccttaattgtttcacagttgacgcacggatttggtgggcattcggtgcaagcggtgcttgaaacaatgatcagagtgatcaacgagtgtaacgttgtgctcactcgcaaataccaatcgccgattaatgccgtcactgccgctggccaacaaaatgccgttctatcgatgccatttgatctcccgtaattccgactgaacgcattaaaaaagcataattaattatttttattgaatgatgaatgattattggagatatatgcagttttttgtatttctcttatttataaaatattgtgcatggcattagtgttactgtacatcacaattgttcatacggtagggttttcggcggagagaagttcatactcattctcttctaattgttttttctttattaaagcctaatatttaagaaatgtcagaaaacatttttatgtttttggttttcttatggcgagaagcccaaaaacagcattttcgcctaacaatttctgctttagagcgacttataaaaacataaaagcatatattttggcgcctttggcacataaagacaaatcgcacatatttggcatttttcaaaacaaaatctttaagaaatacacaggaaaacagaaaatacacccttaaaaagcaactttcttgccatttcttacagaattttcaaatttctttattatttcgaatgccgaaagtaactaaatcgaatgcttcattcgtctttagagtttgatgttccccgctggaaaaatacgagacgagacgatcaacatccttggtggttacctcaattgattcgaattcgtacattttgagtaatattcatttttagttcataattcatgcatttttaaagaaatataaaaattatattaataggattttaataattctactgatgaatagggatacgatttttaggtttttacctattttttttcctgagctccccgtggcctgaaacgcacgaaaaacatgtttttttgggctgttgttaagctacttttcaagtttttagcacctattttctaggtttttatttttagcacctanaaacctaaaaaaaa

SEQ ID NO: 21400 - DNA, 2110 bp, Heterodera glycines
  unsure (1)..(2110): unsure at all n locations
attttttgattatgtttattttaatttgaaaaataannaaataaaagtttttaaaattttattttaaattttataaaatttttttacaaataaaaatntaatcataaatatttttacttttgaaattaattttattttcatttattgcaaatggcttttgctttttaaataaataatttttaataataaattntaaacgaataaataacgaaattaaatgcaatttaattaattaattaaaaattgaaatataatttatttcttaaaaattaattttcttattattataaaaaaaaacaaaaaccaagaatagtttcatatctttacaggttcgaatgaattaaatcggccaattagcatctaattaatttgcctaattaatcaattaattgcccattcgtgctaatgagttaattagcggcggcacttacggcgcgtacaccgcctccacaaaggccttcagcggtgtggtgatgtccgcaaagtcctccaccactttatcggtcagcacgcgcttcatgatgtccgccagctcgcgcagcttgtcgcgcaactgttgccgcgcgttgtacgcctcgggcgaattgccgagtccacgacgctccaaatctgttttttgaaatgaaatgccaatatagagattaaaagctaaatttctaaaaaaaaattaaaaaaaaatggaaaaagtcgaaaaagtgcaatgccaaatttaaaatttacagccatattttgctcattattagcttctatttggcgcctgttatccctttaaaatgggtgtgtacttttgatggaaaaagttaataaaaaaaaggagaaaaatttaaaaaaatatttgtggacaggcaaagtcaatagagcgagggcacatctaaaatccttgaaaattttcaaggattcaaacccaatgaatgatacattctcgagtcatatatgcaaggacgtccttgagatcaatgactttgtgaactgccaagaacaggagttttgcgtgggccgccacagatttcaaaataaaactgattgagtattttgaattcccaagaataggaggggggagttgattttaaggactgtccttggcactcaagggcagagcggagtgagtgccgccgagtcatgatgctgattgacactattgatcacggaacccgtcagttgggccccggcacgtttgggccccagcggttttttggttataacttttttttctttgtcatccaaatcaaacattgttggtatcattcgaaagctgtaagtgtcctctattagcctgcaaaattttgaaaaattatgttaaggttcaaaacaattatggccagaacaactcaaaaaaccagattttccaacttttatggccataaatttgttcaaaattgacacaattttttgaaaatttgcaggctaatagagcatctgaagggctttcgaatgataccaatgatgtttgatttggatgacaaagaaaaaagttatagtccaaaaacctgctgacgcccaactgacgtagaccgccccctcactctctcattttcccatattttcaccaacttttatctcaattgaaacagatgattttttgtttaattctgtctcattgtcaggcatgagcattccccgttggtgtccacgtggagcactcggcgcggaacacgcggcgcccatttggtcagtgatccattcgatgacaaaaataaattggggagcaggtcgtttccccccccccccgtcgtgcgtttcattttgggcaacggcactttttattttatatacaaaacgcaatagtgcacctattagggctatatgagagtcgaaattttcagagactcgggaacccgagacagaccgggaattgacaccgccgacgagagtcgagactcgaaaaacccgagaaatttctcgattcgagagttcgagaccgagaatcttgagcagggtgcactacgtttcccccccgccgtttcccccccgccggttcccccccgccgtttcccccccgtatcagttcccccccagctcggttcccccccgcatcgtttcccccccgagaaaatttaaaaaaaaaaaatagctaacttagaaatttttcaagaaaaaaatcttagaaagt

SEQ ID NO: 21401 - DNA, 2087 bp, Heterodera glycines
  unsure (1)..(2087): unsure at all n locations
atgacaaaatnnttttaatgaaattgggaaaatttcaaactatttacactttttaaatccctggcggngtctggcggcactctctgcgaatttaaaaaaatatattttcgcatgataagagtagcattttgcgtgcatgcaaagactataattgattctgttgtcattcactttgtgataagaaagggggaagcaaatgaatgaatgataaaatggcacataaaacggacaattctctccgtttcctccccccaccccaagaaaatgcacaagggcagtttagtgccactttttggcaaaaatttgcgacaaaattcgtggagagcgtttggggagaagagcccactgaaaaggtggcgattaaacaaattaagtgccttcaaatggcttattagttttctcttctccaaatcgcttcccctcgtccttctgctgatcattttgctgctttacttccaatttcctctgaatcttttcggcccgagcgatggcaccgattttgggcgaattatttccaatggcactttcctcgccaaatttgttgattttcaaaaacggtattttatgagcaaaaggcaaactttcctttccagtttttcaaaaaattattcaaccatcgaagaaaagctgaggcgtttttcaatttttgttgccaatttcgaacaattggaaaagatcggaagggaaggcgaagtgtacggaattacgacatttttcgattggagcgacgaagaattgaaagaagtgatcactgatcagacacaaggaacttactgatcggctccattttcagttgataatgccacatgaatactttgaaagcgttcccttttcttgggctaagccaatccgcgaatttcgtccgatggatgcgaattttaagcggccgagcgaattcgattggcgcaaaaagggagtggtcaatcacgtgaagaatcagagtgagtggacgaagtgatcggagaaaaggccaaaaatgaaaagggatttgcttaagtgcgttgcggcgcgtgttgggcttttgccacggcagcagtggtcgagtcacagcacgcaattcacaacggaacactgctcactctgtcggaacaggtcactgactccaaacgaaagtgatcagccgaggccgaaacaaagggaataaatccgacagaatttagtgggatttgcaatttcatagaaatcaaaagccagaaataattctgcttgattttgcgtattgatcagattgctttgctgttgatcaactgtttgtttagcaaatgatcgattgcgaccaatcgaacaacggatgcgaaggagggaacagaccaaacgcatttcggtcggtgctccctttgatgccattcattgtctgtctttcacttcccttcctcatttgtcagctacgttcgtgataatggccttctccgtgaagataattaccctgtctctcgccccccctcccaatttgccacttttgtcctttcatttgccttttgaagtaccgcggtgccgatggtaactgcgaattgtcgccgggccccgtggacccaacgcaacggacattcgtcgacgaagtgcgaactttgccgagcgacgagcagcaaattgcggattttgttgtggagaaagggcccgtttcatttggtagacgaacagcaaaaagaaagggaccaatgggaaaggaactctttgaggaatgaatgtgaccaaaacaatgtttcattatgtggggggcattttctcgccaactgccgacgaatgccaattccattcgatgggtcggcatgccatggaagtggtcggatttggagaggacgaaaagagtggcggaacacccttctggatcatgaagaacagttggggcagttcgtggggcatcaacgggggatatatgcacattcggaggtcggcagaagagggagtgatcgggaggngagggggggggagtgatcggaaagcggtcgtcgtagaagtgatcgctgctttgtcacgacttcttttcaggngggtcgatgcgtgcggactttcgcgggaagtacacacggctctgattacgcgatactgatcaaaaaagtctatccgaattgatcagtatttccatt

SEQ ID NO: 21402 - DNA, 809 bp, Heterodera glycines
aacggattaaaggtgacaaagacaaggccaacagctatcacaaagagttccaaacttttcgggaggatgtccatgatttgttctacgataagggcgggtggttcgactacgacctgaaaaatcaaaaactgatcaatcgcttctacggaagcattgttgtgccactgttcgcgagatgctatcacacggccgacgtggaggagacggaaaaaatgttaacccaattggaagagttcgacaagaaaaaccaaataatgagccagaaatttggggtgccgacgaggtaaataaatggcaaattgaactaaaaaaagaaaaagaattgtttcagcgcaattgcttcggggcagcagtgggatttccccaatatttggccggtaaaggcggaaagcgtcgtttattacaattaaatgaattcactgttcttaagccattggcacatatgctcatcgaaggattgcgccgttcggggatcaaacggtaggtacagtaagacaaaggcatttctttgcaatgccatcgacagaatggaagacaaagccagggatttggcacagcaatatgtgtcagccaaccacaaattgttcaatcagtgtggaaagcatatgtttgagaaaacgacagcggacgaaggcgcccccggaaaaggcggggaatacaccgtacaggtgagcaaagaaacaattaatcgcttcaaagcccattctgacaaattgttttctgctaagagataattaattttataaaaataacaaaaactaattaaaaacataaaataatttaccaataatccaattttggttattttt

SEQ ID NO: 21403 - DNA, 878 bp, Heterodera glycines
  unsure (1)..(878): unsure at all n locations
tatggttttagccctaaaaagttaaaaaacgatgtcgcgggtgtcttaaaactagaggccggtaaaaaaatttcctggagcagaagcgggagttaaatattttccgggacgggagtcccgaatcggaatccgtaaaaatcccgctaccgtaaaaatcccgttcaccaaaaagaagcgggagcgggaccagggaatccaataaaaatcccgcgggagtcccgatcccgccaatctctacttaaaaccctgagaatcaaaattcaaatttggataagaatcctaaaccgtaaaaattgtcaaacaaaatttaaaaaaatatattaagccttaactaatttacctacattaaatatggtatcatggaaaaatttattagattcaggcctggacctgattttaaaatttggtttataatgaaagaatgagattttttaaaaagaaatacacgtatttattgagtgtttttcttttcaatttttggcaaaaatttatgcaaatataagggcctgctggatccaggttaaacgaaaataatttcagcttttaaaattagaatgaattcatgtcaactctttttgctctatttttggactttcgtaataactatcctgtccaattaggtaattagttaattaattaccgctttaaatgcgtctatttttgatgtcaactcctgctcactgaattcgagctcacaatgaaacattcgcggcgaactgtccggacgagggggcgagcacagtaaccatttggcccacgcttggcaatccgtcgccgtggcactgtcgtcggccggaaaggtgggaaactgttcataggaagacactgaatgaaggntttgggcatcgcgcagaatggacgaggaacattgacgaaaa

SEQ ID NO: 21404 - DNA, 2192 bp, Heterodera glycines
aagttttccgtccattggccctgtcggaaatatgttttcaagacttttgatagaaactatattttaaaaattcggcacctaaacctgctaaagttgccaaaatcattgaaaaaaaattaaaattttatttaatctcatacatattatagatttatgttcaaagataaaaaataaatccgtttttttttgataaatttctacatttttacctggctgttgctgcaacaattttcgcccatgaaaactctgaccggtttcattaatttggataacagtgtttttgtgaatgtttctgtctggcaatttttggagctgatcaatttgatcagcactgatcactaattctgtgtcacaatatgaatgatcaccatcatcaccatccgtttcacattcactgatattctaacaaaaaaataataattataactttctaattataaagtaaaaaaaaattatttaaatcacaaacggtcccgatttaagacacttattttaccctctattcttgagtgtcggaaaattcattaaaaattctattttaaaaaatgaaaaatttgtattaaacttaccctaaattaggagaatttggatatctatgcttatatacatttattttatttttgcctatccaataaaattataaaaaaatgttttaattaaatgaatgaattattccaacttgatggcccaattgttgtattgtttctttgtcaccgtccaaattggcccaaatcgacacattcggcatgttcttattcatcgccatttgttccacaatgaattcacacttttgcccgatgccattattgtccatgggttggcatgacacaaattgttgctcaattggcacaaaatgattgtcatagcctttatttgattaaattttaaataatttgcatttaaaaaaatgatgaaaaaatacttacggagcatcacatttgttggcacatgtgtatgtggcacgaacaaacggatcagcataaacacataaaaccttgaattataattttgagctttttttaataatttattcaaacccaaaaaattagaaataattttcgaaaacataaaaatttaattattttcgagagtctcgtgatatttttgggattgtccattctgtccgatggaataataagttaatacaaaaatttctatcgtttttttatgaattttcaaaattttcgtccacttacattgccattcccaatttgcttttcttttcacccaaatctttgcttttcactccactcttaagcttttgttgcagtttcattttgcttccaactttcacaccttttttattcgggttttgccgtctaaaataattaaatttattttttaaataattttttaatgttttttatttttacattttcggctgagctgcgtttaccggtgttggttgatgttgattttctaaattaaaaataatttatttatgaataaataaattcaattttccgaaggctttaccttctgccgatggattgagcctgagattgttaagtgaatgggcgacattcgtcaccaggttgatgctcggattttgttgctgaattggtggcccaccaccattagtcatagaaagcgaatttgacccaccacggaccatttcgccaactaaattaaaaaaaaattaaaaattcactttaaaaagctaaccatttattaagttggcgaacaagacaagcggtagaacagaagcgaaaagttgtccaatcatttcttctgttttagttaaaatagtttctaatttggttaaaaacagcactcattttaggaaatcatttaagcatataatacagagattttttatcagcagtcaaaaaatcccgttttcgaggcctcataaaatccccctgggttttcggttatgggaaaaactttaaaaatttacaataggaatcagcttcgctccatccgatggtgtctaatttaaattcttattttctatctaacaactgtttggaatgattcccttgtcaaatgcgtaaagctgaatctcgactctggtcggaaattcgggattttcccggattagtcccaatttaatatttttttaattttcggagcaatttactaataaacatacgatatattctctaattatcgcccagtctctattaatcccgtagtctccaattatcccccccctttctgaggaggttgaaaaataatccccccagtct

SEQ ID NO: 21405 - DNA, 1813 bp, Heterodera glycines
  unsure (1)..(1813): unsure at all n locations
acttaaacanngaggaataatcgagagcatgatttttggcatctccttcgccaatctcctccaagtgattgcggtcgagggtacgtcgggcagtgtggtcgagaaggactttcagtcaccgttgttccacaaaatagtagctcgagaggtggacgtgctggacgttgagattcgtacgctcacaggacggtagtgttgtgattttcaaaatattttccttctttaatttaagagaggtgccttttaaatttggccaagttgtgctgactcttcagtttaaaaaagtcgtaactttctgatacaatggtccgagttatattcaacgggtcgaacttgcggttggagaattatcatcagcagggtggaagtatttcgtactttgagggagccccaacctttcagcgtggctatggctacttccttggaattccacggcataaggaagcgggggtgggagccgtactgcggaacctttggcgttatctccgccccatgatcgctgcggcgaagcctacgtaacaacatatcagctgcgacggcaagtactcagcggcacatatcccgcagatgggtgccaaggtgttcaagatttccgtgcagtctgattgttaacctggtatgcttattttttgcttcattcgctcatcgtatttccattcaggaccctgcaggtatgccgggaactcattggtgtgcgatatgggcacagtctcctgctgttgcctacttctttgactcttatggagagatgcctatcagcttgatcaaaaaatatttatccgataattttaaaaagatttactataataagaggcggtttcaatcggtgttgtccaatgtttgtggtcactatgtaattactttcgtttattttatgtccgtcggattgtgtttcgaaaatattatgcaaattttgaatcgttcaaataaccctgatggatttgtttatcggtttgtaacaaagagcatagaataaatattaacgaaattagtcttcatcagatgtgtcatcctcataaggcatggaaacaaaaaaaagtaaaggcccaattccgaataaattcagcaaatccatttagtccatcatatttttcataatattcgttgaccactttttggctcgtgccgtcctcttgccttaagaaacccttcacctaaaatagcaataaaatatgaaacatattttccattaacctcaatacagtcttcagcatcgaaaatgtagagtcgattcaacgatgtcagcgtgcgaatcatcatacatccgcttacacgatagtcacgatggctactgtatgctggagttagtgttgtaaaacgaaagaaacatacccaaggtttggtagtggcgtaatacagccaaattcacgagcaacttcctcaaggattggcacacattcgatgagtcggaattcggtgttggatgtgacggtcatttttttcaataaaaatcgtaaaataagattgaggaaaattaaagtatgaaatatttgtacagtaaacagtacgcgaaataattgaacatttcaaagcactttatgaatcaacactgaagaaacacatgacattgttacggaggaagttatagaattcatcaattcccttttctttgtcgaagtagatagtctcaacgcttaggacgtatccaaactgcttgacaattcccttgaactcaatttggtctccttcttcgctgatgtagatganacgcggcttgtcctgntgctcgaaaacgtaacgcttctgctcctcctcgtacggcaccgnnaaattttgcagtcgaacataacccgcaccagatcaaatgctgtgc

SEQ ID NO: 21406 - DNA, 1559 bp, Heterodera glycines
aaagttcatggtttctaaagaccaaattttaaaggcatattaccaaaagccaattctcgcaatggacgacgtgaaagggcggcgccgctttggcataatgcccgctgaacaccaattggccgctgactgaatcgaccaaatgcaaccgcagcagagagagggacgggtcggcactcaaaacggccaccaaattcgggttgttgtatttgtacagaaccgaacgattgcccaacactttgccacggctgtgcattttttctgatgtgaataaaatttgagatagaaaatgaataaatctttctaatgtgtagactttggttcaccattagcagactttcccacaatggcataaatggactcggagtcactccatggcaattgcgtcatccattgttcggataatcgagcatttccatcggcagaaaattcaaccttatggccgagctaaaaaacacaaaaaaatgattcagcgtttttaaaaagtgtaaataaaagtaaaataggctgaatatttattaatacattttatgaaaacgggatttgcgtggctagagaaaagtattgtatataattaaatccaaccaaggtgcccttttcgtgcccaacattgaacaaataagtctgtttaagaggctcggaatttggcatagattttggcaaaaattccacaactgttgggtcagaattcttgaaaatcagcaggggatggagttgttctgagttgggaaaaggccaaagttcaatccgaaaaagcccgccagggatctgaaaaaagagaaattcagaaataacagtgaaaataaaaataatacaattccaatttcttatgatcagaaaaaaggtaaaaatactaacccgaacccgttcaatttgagtgccggtgattgggttgaaaaacaaaacaacagaatcagccgaatcctaaaaaacaaaaaaaattgattttattcgctgcgatttcaaaccaacctttgcattgaatacggcggccgcctgactcggccattggtaaaatgccgtgccccgttggatgagcaacggcactttcccttcccttgctgcctcaacagaatggcgttcgttgtgataaggcgcaaagtcattgcccaaatacaacgaccaaagcaagtggccattctcattggaaatgccgaagagagtgccttaagacaaaccactttcatatggtcgaaggattgtaagaaaaacgacctggaagagtgctgacaacgatcactttgcgcatgttgaagcagtccctctccaatcgtccgtcgcttaacattccctccggcgcagggccaaggccgaaaagttggccgaaaagggcggagaagcgaaagtcaccgttgatgaacatttccaacgtttgtacgaagcgattggcagtggtgaagaaaaagcgatgcaattgttcgatttgactgcgaatgcgcagcaaaaaggaaagccaaacggactctgaaaaaagggggagacaattgaatggaaatcgacaaaaactattaacaagttaaaagcaacaaactcaaattttgtgactgacccaaatttgtaaa

SEQ ID NO: 21407 - DNA, 2397 bp, Heterodera glycines
  unsure (1)..(2397): unsure at all n locations
atttttctaaaaanttatcgtgacttcaatcccgcgggatcccgcgggattggtaaaatggtcgggagggatcccggttcgggatccagatgaaatcccgatcccgatcaatcccgatgaatttaaaaaatccttcgggacggatcccgaggtcgggatcccgaatttaatcccgcgggatcccgatcccgtccggtctctagtaaatatttactgggttggcacttttgctatacatttactctcgcttctcccaccgatcgattttgcatagatcatttttctgtgaaaaagcccaaaaaaaatcctgaccaagtccgaatcattctctggacctagtccaatctcaaatgtccatctaatttattaaatattattgtgattgaccaaggtgattgcgtggcaacggcataaattggacagcctttggaattttgtagggtgccaatgtttgacggaaggcactcttctcatcgtccgtcaattggtgcgcaacgccgctgagcttttctgcgaaggcatcggaaggttcgcagacggcgacgaccgcctcgccaaagtcggggtgcggaacaccttttaagaaagagaatgccaacgacagaattcggaaatacggcataattagtaaaatgaaaataaaaaaatgattttactcatttaaattggcatttagaaaacaaatgtactttttctgagttagtaaaaagctaaggaaattaataaatttggatttaaatttaaaaaagaatttttacgaaattaataataatttatttctcaccaataattgcgcattctttcagcttttcgccgaaaatgttggtcaccacgtcatccacttccggcgggtaaacattcagtccccccgtaatgatcaaatccttttggcgccctttgatccaaacgaagcctaattaaaaaagcaaacaaacaattaagttttataattacacgaacaaatcatttatgggagcagaaaaagtcaacagaaatttatactttaaaatccataaacaaatttttttttaaattttccaaatgacaaaggcattttaaataaaaaaaattcaagaacttttacgaattttatttaatattttctcctcatacagtaaataagttcatttcttcctccatcactcattaattcaaaaagaataaaatttaataaaataataaataaatttcaccgttttggtcaatttcgcccatgtcgccggtgatgaagaagccgtccgctgtgaattcctgcttggtcttctccggcaggttcagatacctacccgttgaacagactcggactcttcagctcaatgactccggggggggggggcgtcgtgtggaaatacaaacaaagaaagtgtgctaggcagggctgcacgcaattacggattgcggattacggaaattacggggttttgggagttacggattacgggttacggatttttgggatttttccgtaattttgatccgtaatttgacttttggattattttttcgagacgatttcttgtacgattatttttataaaaaacaaatttttctattttttatttaaagggctacccgtatttcgatttatttaagaattaaaatagatttataattttttatttgttgttgttaaggctatttgggtagttcgcctagaaaatagaggcatcacttttttgtcacacctatttttcacgcattttatgaaaattcataaaaccttagccaggtgaggggaggaattccccccttcccccgcccgaaatgaaaaattaaaaatttttacaggaaaaattgggacttttaaatttttttgtcgatttttcttaataaaatcattaaaattaaaaaaaaaatttgcccggcggcacctatcggcaccgccggaccacgatttactcgattttaccttatttttttaaattttgactacaaaatggcaaaaattagtctttttttggctagaaatggttacaattcctgtttttgctgtccagcgctgaacttttttaaataacactaaataaattttaccaaaaaaaattcttcggattcccccccccccctccgtaatttttttctggctattaaaatgttgaaataattatatacatatacataaatccgattataatgatcagactttcaaaaaattttcaaaaatcaacccataaattcaaaaagaatgatttaatcagacacaaaattataaattatttgtaaaatttaaataaaaaatgaagaaactccatcaagaaaatcagttttttgatttttattaatcactatttaaaaatttttttctaaaattctgttaaaaattgatttttaaaaattacggattacggattacgggaaattacggggtttttggacccccgtaattacggattacgg

SEQ ID NO: 21408 - DNA, 1100 bp, Heterodera glycines
  unsure (1)..(1100): unsure at all n locations
ctgaggcccgaaggaaaattngagagggctaatttatatgtaatattcgaaagtgccaagctaattagcgattcaggcgcacattggggcctgaattaagccattttccctttgatcggtacaaaattgggccgaaaaagagatagccattttctgaggcccgaaggaaaatttgagagggctaatttatatgtaatattcgaaagtgccaagctaattagcgattcaggcgcacattggggcctgaattaagccattttccctttgatcggtacaaaattggccgaaaaagagatagccattttctgaggcccgaaggaaaatttgagagggctaatttatatgtaatattcgaaagtgccaagctaattagcgattcaggcgcacattggggcctgaattaagccattttccctttgatcggtacaaaattggccgaaaaagagatagccattttctgaggcccgaaggaaaatttgagagggctaatttatatgtaatattcgaaagtgccaagctaattagcgattcaggcgcacattggggcctgaattaagccattttccctttgatcggtacaaaattggccgaaaaagagatagccattttctgaggcccgaaggaaaatttgagagggctaatttatatgtaatattcgaaagtgccaagctaattagcgattcaggcgcacattggggcctgaattaagccattttccctttgatcggtacaaaattggccgaaaaagagatagccattttctgaggcccgaaggaaaatttgagagggctaatttatatgtaatattcgaaagtgccaagctaattagcgattcaggcgcacattggggcctgaattaagccattttccctttgatcggtacaaaattggccgaaaaagagatagccattttctgaggcccgaaggaaaatttgagagggctaatttatatgtaatattcgaaagtgccaagctaattagcgattcaggcgcacattggggcctgaattaagccattttccctttgatcggtacaaaattggccgaaaagagatagccattttctgaggcccgagggaaaattgagagggctaattata

SEQ ID NO: 21409 - DNA, 934 bp, Heterodera glycines
ttattttggcatttttttagcatttttactatttgtctttttttttggaaaaaatggtttgataaataaaaattccacccttagaaaggggggggataattggggacggcgggattaatggagacggggggataaaaagagaaaatacggtataggcatttgaaaatgtatattaaaagtaccccgtaaactgcacaatttcaaaaaaaaattatttgttaagttttttttgaaatttttttgaaaaacagtaatttatcattaaatttcaaaaaaattgcttaaaaattctcaaaaaatttttctttaaatttttccttattaaaaattttctaagaattttttccttgaaaaattattatgtttgaaaaaaaaatttttttgaaatttctgcggcgagattccggcggcgagattttgtcccgtccccaattgtatgcccccctgcaaaaaatgccccttcatttacatttttgaggcgtccataaacgcggcaaacgacatctgttggacaaaaaacccgggttgttgcacgtgtgcaacatctgtgagcaggtgttcgacgccaaggccatcgcttcgcactgtgccgtccaccatttgccggacaaaggcgctcagttggcactgccctacgggtgccggttcagcgccggcgtcaaatgccaattcaggtgaacttcgggggtatggtaattggtaatggtattgaaactctttttcgttttcgaatccatttaaatccttttttgattgttgtatttggctgggaaagaaaagttatagccaaaagcttgtgctagtacgaaaacggcctggtccacctctttgcaaacgactggcttatcatcaaccaacttataagcattggactcataaaatcaagaacatcgcatcttttgcaaattgggaaatttttgttagaaaatcataa

SEQ ID NO: 21410 - DNA, 1484 bp, Heterodera glycines
aaaattttaaaaatttatttcatctcccttttgatagaaaaagcatcagagagccttatttaacttttaattaacatttggtgcgtttcagagcacgttctaaaaaatatttatgaattaattttgcaaaataataaataattaatgaaaaagtcagaatttcgaaaaattttaaaaacaacaagcgttggcattttttcaggttaagttagtcctttacaatggagaaggcctgcaaaatttggagagattatatcgattttagtgcgctaggttcgatgaaacttttaaaatatacgcctaaactttttggcctgtttaaaaaggaattaaaaatttttaaaaattttattcatctcccttttgatagaaaaagcatcagagtgccttaattaattttttttaaataaaaaaatttgactagaccaatcgaaagctaacggtcgacctaatggaaaaaaatccccgaaggagagaatttaattaattccattccttcgggggtccgtgccgggtgccgcggggtaagcagtgctggtttcgtttcatcacggcccccatccttttgactagtcagccagcgttgcttaacttgtcagatcggacgggtacgcatgattccaattttccaagcaccccaccgaaagtagaacgaaataaccaaaatataaggaaaatattttaaaaagatgttattcatctcccttttgatagaaaaagcatcagagagccttatttaacttttaattaacatttggtgcgtttcagagcacgttctaaaaaatatttatgaattaattttgcaaaataataaataattaatgaaaaagtcagaatttcgaaaaattttaaaaacaacaagcgttggcattttttcaggttaagttagtcctttacaatggagaaggcctgcaaaatttggagagattatatcgattttagtgcgctaagttcgatgaaactttttaaaatataagcctaaactttttggcttatttaaaaagcaattaaaattttttaaaaattttattcatctcccttttgatagaaaaagcatcagagagccttatttaacttttaattaacatttggtgcgtttcagagcacgttctaaaaaatatttatgaattaattttgcaaaataataaataattaatgaaaaagtcagaatttcgaaaaattttaaaaacaacaagcgttggcatttttcaggttaagttagtcctttacaatggagaaggcctgcaaaatttggagagattatatcgattttagtgcgctaggttcgatgaaactttttaaaatataagcctaaactttttggcctgtttaaaaaggaattaaaaatttttaaaaattttattcatctcccttttgatagaaaaagcatcagagagccttatttaacttttaattaacatttggtgcgtttcagagcagtttctgaaaaaatatttatgaattgattttgctaaaaaaataaa

SEQ ID NO: 21411 - DNA, 1163 bp, Heterodera glycines
  unsure (1)..(1163): unsure at all n locations
tttttatccaaaaaattttttttgggtttccggggcagtccccctgaacggatgcgcccagatttatggggagaccgatcttttcggaatagcttcactatagcctgtactttaattctgcgttggattttgctccccataattgtttgagtaccccaaacggacacttgaaaaaatcgatttatttttgttttcggggcagtccccccgaaccgatgcgcccagatttatggggagaccgaatccttcgggaatagcttccctatagcctgtactttaattctgcgttggatttttgctccccataattgtttgagtaccccaaacggacacttgaaaaaatcgatttttttgttttcggggcagtccccccgaaccgatgcgcccagatttatggggagaccgaatccttcgggaatagcttccctatagcctgtactttaattctgcgttggatttttgctccccataattgtttgagtaccccaaacggacacttgaaaaaatcgatttttttgttttcggggcagtccccccgaaccgatgcgcccagatttatggggagaccgaatccttccggaatagcttccctatagcctgtactttaattctgcgttggatttttgctccccataattgtttgagtaccccaaacggacacttgaaaaaatcgatttttttgttttcggggcagtccccccgaaccgatgcgcccagatttatggggagaccgaatccttcgggaatagcttccctatagcctgtactttaattctgcgttggatttttgctccccataaatgtttgagtaccccaaacggacacttgaaaaaatcgatttttttgtttcataaatatttttttcagaaagtgctctaaagcgcaccaaattttatttacaacttaattttagcactctgatgctttagtatcaaaaaggaagatggagaaaaaattttttaaaaaatttttccttatattttggttatatcgttttttttgttttcggggcagtccccccgaaccgatgcgcccagatttatggggagaccgatccttcggggatagcttccctatagcctgtactttaatctgcngtggatttttgctccccataaatgtttgagtaccccaaacggacactagagaaaatcgattttttt

SEQ ID NO: 21412 - DNA, 586 bp, Heterodera glycines
agtataagggaattgaaccagcaaagaaaaaaagaaaacctatagcacaaccaatgcgccaacaagggagttgaaggtcattcttctctattgcatttattgggataaaaaaaagtttggcacgccatatctcggcactcatgctcatttggcaaaactggttaaaatttcacaatagaaactaggggtgatctacccacacaccaagtttcattttgaaatcccacggtcacttgccgacccctcctttgtaagtcattttttaacatgatatgacgacttatataattcgttttcttcttttcttacagcagaagaaaattttaattatggtggggcaccttattaagaaataaaataactcttattcaataaatacggtatttattattttcattagttttaacacagttttgttagattatttctcaatttcataatattaaaaagaactttatgcgcacattcaaaaaattatataaataattaatttatatcaattttctcaattgattaattgataacattaccaattctaatcttccaagcctttcgtaccatgtcgatatttgaatggatttatctg

SEQ ID NO: 21413 - DNA, 1088 bp, Heterodera glycines
  unsure (1)..(1088): unsure at all n locations
tttttaaaaattaaaaaaattgttcttaatcaaaaagatttaagtcttttattttttacttttaattttatggagttttcacaagattttcataattcattcctaacaaatgaaaaattcatctccaaaattattttattattttcttgaccaagaattttaaacatttttgtgattttgaggggttataacgtatatttnggcagtttttgtccatgttntgtaccatattttgagtttttagtccaaattttatgtccacatttagtgttttttagtccatataattcacaaccctatatataagcaaaaaattttttaaaattttttcccatccctaaaaattttcaaaaaaattttctaaatattcgagtttgagttattgtaaagaaaatgacatataattatccaaaatgaaaggcaaattaaaattttggtgatttttaaacactggcgccaaaaaaccattacgggcgctaaaacggccgctccaaaaaagcggcaccaaaaaccggcgccagtggccgcgccaaactgacgccgacccgatgagacgcccacccaattgattcatttggtttttctgcccgtggtcaaccgaagaagaggcagaagagagaatggcagcaacagtgcccaattgattcacccattcatttcctcttctcctcagaaaattcatttgtgcattttcccagtggcgcctaacgacaccgctggacccccagccttcatggcgtccgcttcaataccttcgttacacatattttccaaaaattttgctaatttttgaaaaattagcattgtaaaatcaattaaaatatagctaaaataaaatatggaaaattgaataaataagtaaataaattataaaaatgcaataacaacatttgcaaatatttaaaatagggttcggaccccgtccccggggacgggacaggttttatggccttacccccgcccccgccccaaatatacccttaagaatggcatattcgttgataaaaggaaaaattttttaaccatctttgacaaatttttatgaaataaagaaatttgttttattttttaaatatatttgtggatta

SEQ ID NO: 21414 - DNA, 1388 bp, Heterodera glycines
cagaatgtgatcggggtacaaaaaattcgggttcaaaaatgggtgtaaattcccttggagatgcgttagaaaagaaagaaaaatattgttcggacaacttttgaagagctgcattgaatgctgccgtccccgctgctgtacgcccccgcgttgctgagttagggtcgagagcggcatgaaaaaagacaaaaaggagggaaatggaacaaattcgcggctttgccctcgcgttggagaaagcaatgcgcagaataactggggagacttagggttagcgcatcaattatttttttcagaatgtgatcggggtacaaaaaatacgggtccaaaaatgggtgtaaatccgcttggagatgcgttagaaaagaaagaaaaatatgttcggacagcttttgaagagctgcattgaatgctgcagttgccgctgctgtacgcccacccgttgctgagttagggtcgagagcggcatgaaaaaagacaaaaaggaggaaaatgaaacaaattcgcggctttgccctcgcgttggagaaagcaatgcgcagaataactggggagacttagggttagcgcatcaattatttttttcagaatgtgatcggggtacaaaaaatacgggtccaaaagtgggtgtaactccgcttggagatgcgttagaaaagaaagaaaaatatgttcggacagcttttgaagagctgcattgaatgctgcagtcgccgctgctgtacgcccacccgttgctgagttagggtcgagagcggcatgaaaaaagacaaaaaggaggaaaatgaaacaaattcgcggctttgccctcgcgttggagaaagcaatgcgcagaataactggggagacttagggttagcgcatcaattatttttttcagaatgtgatcggggtacaaaaatacgggtccaaaagtgggtgtaactccgcttggagatgcgttagaaaagaaagaaaaatatgttcggacagcttttgaagagctgcattgaatgctgcagtcgccgctgctgtacgcccacccgttgctgagttagggccgagagcggcatgaaaaaagacaaaaaggaggaaaatgaaacaaattcgcggctttgccctcgcgttggagaaagcaatgcgcagaataactggggagacttagggttagcgcatcaattatttttttcagaatgtgatcggggtacaaaaatacgggtccaaaagtgggtgtaactccgcttggagatgcgttaaaaaaaaagaaaaatatgttcggacagcttttgagagttgcattgaatgttggcatccccgctgctggacccccccccgttcctgagtttaggggcgagaacgggcttggaaaaaaaaaaaaaggaggaaaaatgaaaaaaattcccggcttt

SEQ ID NO: 21415 - DNA, 1129 bp, Heterodera glycines
tcgaaagactcatttgggtatgcaaaaaaaccacatttttcgataaagagcctcattttacaaatttattcaaaatacgtttaaaaatggtcaaaagttatatttttgttgtccatctgcatgggtacccccacccccgcccacgggcgacaacctttttttgcttttaacataccacttttttgcggcgctttttccaaaaaacttttatgtggtgtctattttcattattgcattttctcatcgctttccttgccgttgggaagaggtcattttgagcacattaattaatgcccttcattcaaatgatgcggcgatcggcaatgggcacggcaaaatgaatagcgagctgtactttttcctttttactccctctgtccaccaaatgaccagcaattgtacaaaaaattttgttttaaaccaatgtcttggtcatatatttttcattccactccaatttattctggggctgttaggtcattgtcgaatatttcactattttgacatttattagtagtgtttaatcagggtagccagattaaaatcttcgaaagactcatttggcatgcaaaaaaaccacatttttggtcaaaaagcctcattttacaaatttattcaaaatacgtttaaaaatgttcaaaagttatatttttgttgtccatctgcatgggtacccccacccccgcccacgggcgacaacctttttttgcttttaacataccacttttttgcggcgctttttccaaaaaacttttatgtggtgtctattttcattattgcattttctcatcgctttccttgccgttgggaagaggtcattttgagcacattaattaatgcccttcattcaaatgatgcggcgatcggcaatgggcacggcaaaatgaatagcgagctgtactttttcctttttactccctctgtccaccaaatgaccagcaattgtacaaaaaattttgttttaaaccaatgtcttggtcatatatttttcattccactccaatttattctggggctgttaggtcattgtcgaatatttcactattttgacatttattagtagtgtttaatcagggtagccagattaaaatcttcgaaagacccatttggcatgcaaaaaaccacattt

SEQ ID NO: 21416 - DNA, 1080 bp, Heterodera glycines
ttaataaagtggaggcgttccgcgggggggggggaaaatcttcacaaaatttggatgggatttgcgaaagaaaattggtttatctttaattgattttattgtaaatttatttagtttggcattctgtcttttgtattttcaaaaacaatacaattcggatcccgcaaatcgcgcaggttccaaaaaaatacgggattgcggactaggaccccgcaaaaccccgtgtctggatcccgtcccctcgccggtccctaattttcactctttcggaccgagactttactgagaccgaaaaacccgagacttttcaaaaatttttgcttaaaaatcatttatttttttcgagtcttttcttaaccatttttttttaaattcaattaacccgagacttttcaaaaatttttgcttaaaaatcatttatttttttcgagtcttttcttaaccattttttttaaaattcaattaggtacatattataactccaaaaacacaaaacaagaaatttgtaagttttttctctccataaattgaatttttcactgccgtattggtgcgccggtggcccctatcatggctcggcgatttttttaaattctttttgtgaagggaattttgggggttcggtggtgccgttagcgtcgccggggaaaattttgaaaatttgaacgtactgaataggttttcaccaaaaagtgacaaaattttcgattttgatcatgtctttaagaaaaaatttggggttttaggcgtcgccgggtgaaaaaagtgcaaatcaaattttattaaatttaaaaagttaccaaaaatgtgttaaatttaagtttatcaaaagccaatcattagggaagtaaaaaaatctcttttcggtctcgagtctcgaaaatcgagaccgagactgaaaataccgagagcgagaccgagaccaaaaaaaacccgagacttttctagagccgacaccgagactctcgagcatcagccccggcttttaccatttacgggattttatgaatactttcattcctgctcaatggatttaaatttctccccatcccttgttttgaaagaaatttataaatttcg

SEQ ID NO: 21417 - DNA, 1418 bp, Heterodera glycines
ttcccctttatgttatccaaatgattaattgtcctcgtacttttaaatcgtttattgagaaaacgaaatacaatcaatgatcgtctggtttgaatgtgtctcatcgaattggtccccagcgatgtttcccgacagaaacacaaacaaattaaaggtgtacgagacgattgatgggatggagaccaagaaaacgcaatacaaatattctcagtatctgctcaaaagaacacggaaaagcaaataaaaaattatagaatacataaaatcaatcgaatccacgggaaaaatggtcggtgaatgaatggatgggtggagaggagataatttaaatgaacgaaggaaatgaaaagatcgatgcagtgacggtgttgagggctgtgccgaagcgattatttcgtcgtcatcatcgttacgaattcttaaaagggcaacttcacaattcgtttgtaatcacaaaggatacgatatttcattagtacggtttgctaaagaccatttgttcttattttcttattgcccttttttaattccaatctcccagggtgtagctaaaaagagagaaaaattttatataaaaggaggaggaagaccccaatacaaccaccttacacaactagcccatgataatgctaccataaacactgaccttcgtagttgacttgcccatccccgtcaatgtccgcttccctgatcctaaacaaccattcaaactcagtcctcccctttccgcccttccattcgcttacatttcgtccacttcttcgtctgtcagtttctctcctaaatttgtcatcacgtgacgcagttcggccgcagagatgaagccattgccgtctttgtcgaacacctcgaaatttataatcaatatctaatttcattttacattttgtgttactctgaatgcctcccgaatctcttcttcgctgtccgtgtccttcattttgcgtgccatcattgtgaggaattcgggaaagtcaatggtcccgtttcctgaatgtttgccgatacattacgcttattcaaagccttttaggaccgtctgcatccacttcgttgatcatgtcctgcaactccgcctccgtggggttttgacccagcgaccgcatgaccgtgcccaattccttggtggtaattgtgccatccccgtccttatcgaacagcgagaaagcctctttgaactctgaaaaggataaaagcatacatccagtagtgtaaatatggggcaaagcaaacacatttagctaagccattaccaaacgaaaaaagaagggatctgatggacctgtcgtaataatttcgatggggcgatacgaacaaaatccaaattaccaaatgaaaaaatggaggggggtaattccaatgaaactcggattaaagtatgcaagactaaatggtaaaaccaaatttaaattgcaaat

SEQ ID NO: 21418 - DNA, 629 bp, Heterodera glycines
acatgacacccctccaccctcccccccccccgcgtccgcaattgcattgcgcacaaaaagattattcgcctaagcagcaaggcgttgttatgttgttgtcgttgacggaaacattctcagccggtgtgtttgtccgtcatcggcggggaaaataatcccccccccccccgctctctctcctctttcgcttctccgcccgtccttcttacatattgcgccagaatcgtcgacgccgggggaaaaaacgaaaagggatggggaaagtgcctatcaacatcgacgagggaattttgctgagagaaagcgatcgatagagcagcagcagccgaggagagaattatcgcctccgtggacatcactcgcccccccccctttggtcggtctctttttcctctgctgctcccttttgaagtgtcgctaattaactgacgaagcgagcgaagtgaagggtatgaaagagacggcgcgaaaaatcgaaagagggagtcatcgcatctcacacgcactgctggcgaaagggggggggaactaattgaaaaagtcgggttgaattttgatgacaagcggaaattggaaattaaaaggaaagaatggaaaaggaaagtgaaacacaaaattaaaagggaaaa

SEQ ID NO: 21419 - DNA, 1513 bp, Heterodera glycines
gatcgaaaaattttcaaaatcagaacatcgggtccaaaaaatcagattttggggtcgaaaatcagaacattttgcaaaattgttttatttttacaatttattcgatcaaaaatgtattaaatattatatttttcacctcccatgatcatctttaaaaattttggtgaggaaattaacaaatcgtaaatttcagtgttcagtgcactcgggatcaaaaaatcagatttttaagaatttttgcggcgcatttttccaaaaaacttttgagaaatgggcgccgggggagggtcctgcggtgccgataggcgccgccggaaaattttttgtaatttcgttctgatttgttaacagattttcacaaaaaaatgccaattttgcaattaaaagccacgcgacgacttttttttcgcttttaagaacgcttttttgcggggcccttcttccaaaaattttggaggacaggggacccggcggcacctatcggcgccgccgggaaaaatgtgtgattttagtaagatttgttaacagatttttgtccaaaaacgaccaaattttgccataaatttttttaaccaaaatccaactttatttgtccaaaaccgattcaaatacatgcacataatgaccatgaaatcttattttctattcattccatgcatttgaatcggtttagacaaaaaaagttggatttatgtaaacaatgaattttcgactttgtccgagttcaggtccggggttcgaaatacttttttaatatttctttattttaaaaaatatgtgactcccattcttcataattgccggataattcaaatgtatttaacaaaaaaaaaggaaagaattttaaattaattaaaaaatgctcaaattaccttcccaatcaatgtagaaaagtcgacttttttctttgtcatggcacacgtacattgccaaaatttttttaacataaaaacattctggctcctccttttcaatgatgcttacatcttttgttgccttctcctttactggtttactcactttactcatggttatcttaattttaaaaaattatttttaaaaataaattaaaaataatttaatttgccatcaaaaaaaaaaaaggattccaaaaattattcatttatttttaattttcgaacagaaatgaattgtccttgaaagttcactcaccaaaaaacctggtctgagcattcaagattttttaaggattgtactttacaaatttaatttttataattttattttagatgtcccttaatcagaaataattaaaatttaattaatttcaaaaatgatactaaactataaaatcatttcttgttaattttcataattatttgtcgttttatcaacaagaatgaattgtccttgaaatttcaccaaaaaacctggtcctgagcattcaagattttttaaggactgtactttacaaatttaataattttttttaataatttttttttactgtttgagtctcttgtagaatttcctcctaaactattgtcactgt

SEQ ID NO: 21420 - DNA, 1079 bp, Heterodera glycines
tttttatgtatttttttcttatttttacacgttttcctttatttcaagttaataataaaaaattattatcttagggcgtaaacctgcctacaactttttgaaattaatatttcaaaaatccattgaattttcaatatgataaaacatattacactatatgttacatgctaagagaggaaattcatgaactccctccgttttcatgtaacatgtaacatattttgaagcgggcgcgaagcaccgaggccacgaagtgttcttacgagccccacaaatttagaaatgggcgcgaagcgcccatcttagggcgtaaacctgcctacaaccccttaataacatttcaaaaattcattgctttcattatgttaatacatgttacatgttacatgctcagagaggaaattcatgaactccctccgttttcatgtaacatattttgaagcgggtgcgaagcaccgaggccacgaagtgttcttacgagcaccacaaatttagaaatgggcgcgaagcgcccatcttagggcggtaagctccaacaaccccttaataacttttcaaaaattcattgctttcattatgttaatacatgttacatgttacatgctcagagaggaaattcatgaactccctccgttttcatgtaacatattttgaagcgggcgcgaagcaccgaggccacgaagtgttcttacgagcccctcaaatttagaaatgggcgcgaagcgcccatcttagggcggtaagctccaacaaccccttaataacttttcaaaaattcattgctttcattatgttaatacatgttacatgttacatgctcagagaggaaattcatgaactccctccgttttcatgtaacatgtaacatattttgaagcgggcgcgaagcaccgaggccacgaagtgttcttacgagccccacaaatttagaaatgggcgcgaagcgcccatcttagggcgtaaacctgcctacaaccccttaataacatttcaaaaattcattgctttcattatgttaatacatgttacatgttacatgctcagagaggaaattcatgactccctccgtttttcatgta

SEQ ID NO: 21421 - DNA, 2336 bp, Heterodera glycines
gtggcggattctcgcggtgttcaatgccatcacaacaatcatcaatgtgggcgttacagttttgctggtgatgcgggtggccattgctgacaatgaaaaaggcacaattttaaaaaaaaaactattcaaaaatttaaaaaaaatgccaaacttttgggtttggagaaatttctaaacgatcaaatttttcagagtgatgggcgagagtaaaccatggaaaaagccagccaatgtttctgattaaatacatttttatgaaaaaagtatgagtatgtatccgcctccggaggattttttgaaaatttgggtttttcgtgttggtaatctcccaaagacttccctcgcccaattattttttttagatgaaaaccccctttttgaataatttctagaaaaactgcatcagtgtgtttatatatattttttccccgctctttaggggccttgaattaatatttacctcaggtcatcatgacgatgatcagtgccatcttcgtcgtcctgctggtgttggttgctgatgtttttgttggtgtcccggtcatcgtttgttgcggtgccgtcgtcgtcgtcagtcgatgccaacaacagcgcatccaacacatccgagtccgagtgttcaatgaacacacaaaatttgctgactgaaatttgtaaggggaaatttaaaaaatgataaaaaataattaattaattaaattaaaaaagaaaattcttacttgatcccacaaaatcactggcatttcgaatacactgctgcacactttcatgaagtttgctgagagcggacggtaagaaaagtgcgagcctggaaaattttttttttaaatttataatattttaccctgcataaatattgcaaaaatgtaaattatggttttttgagaaagggaaatttaaaaaaaacacaaaaatcaattatttaggttaaattaaagttaatttatcacacatatataaaaagtaatgaactcacaacacgccactcagcaacgggtaaaggcccgcaagcagtacatgcgggtccttcgtggcacgaactttgtcaaaaatgtaaatgctctccaacagcaacacctaaagaatgggggtggtcatcaccttttagtgagattttttccgaaaattttgttattttttaaacagaggatccgatatgataatcaaacagttataaatttagaatctcacatactcaaatgtgattatttttcattaaattcgagacaggcattttttccaattttctgtcaccaatttattgtttaattaatttaaatttgtttgtacctcttcaaacacataatgggccagtcggttgagaaacattcggactttctgcaaaatgatgagcatcgagtagaaagaggaacgatattctgcaacaaataaaaaatttagttaaaatatgccagtttgctttataaaatttttttcctgtccttctccactacgcgccggacgacctctccccccccccgaagttttttttttaaatcaaatttacaattagtacttttcaaaatagaaacctagaaaaatttaaattgaaaatttgttagcgattttttcaaaattttatgatgacaaaactatgtttttctacaaaagtttcaaaaaatctcaaaaaagatttaaaaaatttttttttgattcgagggggagggggactgtgcaccaaaacgcaccgctccgtgtggccaaccgctggcgcacaacgcgtaacaaattctgtcccgtgtagtccaactgagcccgctgcaactgcaggttggacacaaagccgaacacgcgtttgtacgcccggagcgcattggtggagaaaaactcagcaaccgcttggaattctgttgaaataaggcaaaaataataattaaagaaaaaaaaaccgctcaaccccctaaattcctagtaaaacaaattgttcgttaggtttttaaatttgtcaaaaaaaaaatttttttttttttgaattttatttcatgttaggtatttttaaaacacttttggcttcatagaagcgttttttccagaaaattaacttaagaaaagtttgtttttcaaaaattttaccgtttcgttggctttgccgaagtcgacttttgagcatgaatttttcggagaaaattttgcacttcatttgctcgcgtttggtcagtttgacgccgcacaacaagtgcatcagatccgccacatttgcggtcggtgagcacattgccaacgcgtcgttcacacatttttccgcaatttttgtcgaatgggacacatttttgcgcgacgaaaatggcggtggacacttttttggttgcggtcggtttggggggttttgatactgc

SEQ ID NO: 21422 - DNA, 1014 bp, Heterodera glycines
ttattgttcttactatacgtcatggtttctccagacgaagttgctgaagagtataggttcgtatttaaattgaccaattcgttcggttttcttgaaaaacaaatactaattcagggcagcgctgtcggagctgacacgcaatgacaagactcagatcaatctgctcacaattttggccgaggattatgcgtcatatgccagcgcaattgttgctgtgattgaggaacgtctcttcaaggttttttgaatgggactttatttttgcatttctttactgaatagcattgcccgttcagtgtccatcaccgatgaaaatcgtcatgctctatgtgctcgactcgatcgtcaagaacattcccgcgacaagcggcgcctaccgtgacttatttgcgaaaaggattgttgacatgattgtccatgtgttcaaggaggtggtctcgtcaattcgcattcaaagcattccaatccgcccaaaaagccagaagtccctaaaatttccaccacaacctctagtcttaagattgttgtctttcataatcatttttatgtgcgctgatctctttctcacctttgccaaatacactttgctctgccgctcaattttagttaaaagatgaaaacataagcaatcttagttgctttcttaaattggagtgcttcagctaaagactattggggggaaaaggagttggggaaatttgattcgtctttactgacgacggagcttctttacattatgttgtgaactgttggccttcatcaacaaaacagtgtcttgattaaggggtgaattggtgtaaccaaattcacacaatcaagtaacagaccatccaaaagtccgtgctccgaataccagcccaaaaacatattaagtgaatgatattcgtgtcactcaatttttagtaattgacagcatttgtatcgagttaatagccggcaatcaacggtaaaaattctaatttgacatggagaacgtataaaatcacacaatttttcggacgatttgacatccat

SEQ ID NO: 21423 - DNA, 2479 bp, Heterodera glycines
  unsure (1)..(2479): unsure at all n locations
tatgaggtgtgtttgctttaataaatcacattgaataaatatcatttntaattccattttttccctttaaaggttttttacttagacgacgtggcggccattgagcgcaatggattgccccaccgggtgtcttcgccggtccggaccgcgacgtggtaatcgacgggacggcttatcgaatggcatttgggcagcacaaacaagttctcatcgatggcgacctgcatacattacgttttggcgcaccttctcgcgagctgtttatgggcaattttccgttcaaaggcgccttcggaggtccgccaatcattgcaacgatcaatcaacgaaggcacgaaattcgcctttgtggaccgccgcccgaagtgcgcattgacccggagccgagctacgaactgatgcggtacatgccggcagtgcgacaacaacagccgacgatggtgcaaccgacgaagactgatgggacagagggcgaccgcaagaggaagagaggtagagacaggaggctaacaaaacaggaattattgtttcagaatcgccgcccatcgacgtttcacgattgttaaagcgtctgaaggagaccggactgcttacacaaccgcccaacgaagcagagcggaaccaacgtaaaaaacaagtggagatagaggcgaatgcggcaccaattccttccaaccatcgcctagacaatatcgagcgcagggcaacgccgatgtccggcctggagcagttcagcatgagatcactgatcatgtcggtgtttggggtgtggtcagtcctttaaccaaggggtatctgttttgtgcgacatttgtggaccagtcacaattcagttttcaatatttaaggatattttattcatataaaatgacaagcagcctatttaacaaataacacaatgttaattattccaatcttacgattatgagacgaaggaaagaggaatattaattagcatgtttagaattaataattttgctccactctgatttttccggttacttttggcattgattgaatgttcatccccgatttcagtcgctacgattccgtaatcgacgccattcatcgtccacgcgttgtgtgtcagtattgtggaattgcgttccaaaaattatataatgaggcgtatcaacggcacgcggattggcacctgcaaaaaacaattcggatcgaggaccaaaaacttaacaaaggaccaaaagtggtgaagggtacaagctcacagccatggtatatggtggaggtcgggaatgcaactcgaaaatggcgataaacgacaaaatattattggaatttaggattggtttgatttttcggagacggaactggtcaacagaacgcagggaatgggtgagcaaagggggaaatggcaaataacgccaagaatcatttaaattatgccaaggtggtgctgacaaatctgccgtcgaagacgaaaagggcaccgccgcagtttcgcatcaacatacggcggggaccaatcgggacgcgccttcggaattgtcgaatcgaaggtaggccagaagcgcatttgccaatttgatgctaacattgcattctcatttcacaggaatgccaagtttgccatgaacaattcgaggagtattgggacgaggaggaggacgtgtggcgccttccgcactgcttactttcggatgggaaggtgtgccaaagagggaaagaatagatgtcattttgttgttttaggcatttcatattttttgcaaagaggacgtcatccaagaggaagctgacatggacttacgttgttgatttattttgctatgatctctcccccaccgcttttgtccaaattcattgaaggcgaataaatttttaattatttgaacaatttttattacattcattcgttgttaaaatcatatcacaaagttagaattttatatcgtatttgttgaattaaagcccccaggaagttctattcccgacatctcaattggaggggtggctcaattcataaaaaattatatttacgtgccaaactgaggggcataccaaaaatcgcactttcaaattctatatttttaataatgagtggcattcctcgccccctcagttttgtagaggttcgatcgcatgaacaaatcattcggttgatcaatcgccgatcgttcgttcggttggagtcgtcgccctcctcccccgcccctttctttgtcattgctttgtctgctgctgctggtgtcccctggcgccgtttcgcctgtgcttttcttctcttccgcccatcagtttcagcatgggactgtcaatggaattagttccgatgacagacttacttttttaacctgtattctcaaatggtcaattggaaccggttaaacaatgttttgtgtgcccctttttcggaaagtaagtgtaaaccatccccaaccaagcattttatgtacatatggtgttattcgaaagtttaaattcataaagcaattattgccaaaaatattaataaggtaaa

SEQ ID NO: 21424 - DNA, 1542 bp, Heterodera glycines
cttaaattccgcccttccccgcaacaagtctgtcgttggcattggcatccgcggggggcgggggcaacgaaggcaaattcgaccgtctcttcggcaccgagggcggtgccaatggcaatgccaccaatgcgtcggcattgttttttatattttggcaattttcaaaaggacactgtgaggacaaataatcacggaacattcccctgaaaagggcgggtttttgtgccatttgatacatttggcattggctattgccctttctgcccaaaatgctcctgctgcttttgctttggcgtatttttcttctacaaaaaataattggccatggattttcagcttgtcgccttttttttactcatggtggtccaatggtaatgccaattcagacacaatttttgaatttggctgagcggttggcaaaaaaaaaaaaatggaaaatgaaaaaattgaaaatataatcatacaaataaaaaaatatgtaagctgttagcagcttaattaagtttataaaaatagaaatatttccaatttccaaaaatgatgagcagaattcatcgatggcatcataaaggggataaaattggcataaacggccaaaaatggccattgacgcggcaaagtccgcttttaatcgcagagcttaaaactttagcaggaattaaacaacgtataactgccaagcgaataagaagaacattttcattttatcacttccgctttaacaatttccgctcgtctgcagagaaaaaacgttaattagccttaattagccttttctgttcacgactgatcaccttttccgcttgctaatcccccaattcattattatcttatgttattcttccgatcacaattgatcatcttttccgcttatcaactctttctttattaatttctctgatcacttttcagattgctcagcagtttaactgttttttgtcacctcttctgatcactatgtaattatcatcatttttggtaattttccattctgatcattttcgtagatcacttcctccgcttgatcatttcagatttgctgctatttcttctactctttgatctgagcaatcttttccttccctccgtcgaaaatgatccaaaatttcgcccctttccattcaaatgcatttttcatctctgatttgggtgacagaaacgaaatgcaatgcgaaatgaaatgatttgattgattacgacggtaaaacccatccccgccgatcaccgaattttgtcgtcccttccctttttgattttgccgacttcgccaccctttcgcccccccccctttggtcgatcattttgatcattttctgccacctctgcccttttcggggttcgggcggagtttccgccggttcggacacttttcgacgcctttttcagtgcctccgatcacttccgccgcgccgtccgttgatcagtctttttttgtcatcttttaaatcgatgactaattccttctccgatctgtcgcccccgggcgtttttctctgatttttttcccgcattctttgaccttttttattcataaattcgccc

SEQ ID NO: 21425 - DNA, 989 bp, Heterodera glycines
caatttcgcactgtcccgccgccgccacctatgcattacgacgccatttcagcaacggatgaagcggacgacgaacgcagccgcgcacgcgacaattggctccgtgccagccgacgcgcgtcgcaacatccgtcggttcgtttgtgggatattcactgattagaatcagtgaaatggtcagcagcagcatagatgatggagaagattgtgccatttcaggagcatttgagtccccgggcggacgcgacggtgccattggcgatgaacgtgttgagcggcgtgtcgcgacggagttccattgcgaccaccaattgggaaaatgccatcggcggacttggcgtaacgccacaaatgagtgagtttagcgtgattgtgaaatcaaaaaagaaattcagaagagcaagaaaaggcgggcacagcggcggcggtcaaacggcgcatttcttttttggtcagcggagcctcggcagaggtaaagcaaagcaaaaaaaaaaggcatggaatatgagggaattgatggaggaggactgagttaaggcattaggcatgctaattgccccttaattacccccaattaaatccgcccgactcattttgtaggtgaactcaatgaaagtcaaaaggcaatgttcgttggaatgggagttcatcgccaccattttggaccgtctttttctgtttctgtttacactgactgtggtaattagcaaatgattaaattttaatttcatgggattttttaaattttaaagactgttatcactgcgggtattatgattgtcggacgaatagcacaatggcagtacgaacagttgcttcaagaaattggctgattgaacagattatttatataatcaatgaatattttttgttttcgaattatgtataaagaaatttatttctcatttaatcggtttaaccagggctcgcagatctgaggatttatcctcagtttgtggctttttgataggtcaatgcggatttttttt

SEQ ID NO: 21426 - DNA, 1030 bp, Heterodera glycines
aaatttattcggggtctcacctccgtctcgcagacgggagacctaaatttggacgcggttcgccacgatctggactgggccaggggtggacggacaacaacaaatccttcagcgaaaaatgtcaattataaccagcagctccgacgttatttacagatgagaaaggaacatgcggacagaccaacaaaagttgagctgaccaagggaataagtgtactgatgaatagaggtggcgaagaaggcgaagttgttgataccccacgccgtcctcccgctcctccaccaccacctcctcctcctgggagacctcttcgtcgtccaccgccgagtcctccgggtcccggtggtccttcgccaccaagtcccccacctcgtccacaacgccccccgagaccgagcaggacttctcggagaagtggtcgtatggagcaatggcgacaaaggcgatacgatatacagcaacggcagccgccgccgctggtagtgcgagacctcctcgcagaagcagctgctgcgccactgcccgaaagtgacgatgataatgatgctgatgatgagtatatgttggagaacggattcgcgctaccagcaccatcacaatactatggcgatttgcctgtgctgccgacaatgcggaagaaattgaggaaatggacacagctcagcgcaggattgccatcagaagaaaattactcaaggacgaggctgacgatgatgatgatcaacgcaaaaaatataggatttatcaacctccaccactgcctcgcgcaaaagtaaaagttgagccgaggcctcctccagctcgaccacgtactaacatcaagagagaacaacataagccaaagtcagaattcaaaccgtcgctggcaccaaagcacgttgatcaccccacttctacacctagggcaaaaagagagcctgactttaatctcgatccacgaccatctacatcaagacaagccggatataacccgcctcccccgacgcccaaaataaaacatgaaccgacaacaaagagacctatgccata

SEQ ID NO: 21427 - DNA, 890 bp, Heterodera glycines
ttttaagcaaattctggaatcaacttgaaaatgcattctgaaacagttttcatatatgctcaggaacaagagccgaaacataatgataaaaactggaaggcgccgttaggggcggtactaaaacatcaaattttggacccgccacaaggattcggaattcctgtttcaggaataaccgatttctacatatatcttaggcgttgtgcagcattttttcctgccaatgcagagaatgcagacctgttttcaattaatattataatgccaaataatacagaaggattaacaatatggtaaattaagtttttaagctttagatttcagatagatataaaaaagatacccattaaccatcttttgtctaaaaaattatttataggtatagtatcccagctgccgattttcaaaaatttaaaagtctagcagtacatattttgtgaaagaattttcaaaaaccgatgaatatttaagaaagaatacacccaaaaattcttgtcaaaaacagaattcgctttgttcgaacggcggggagggtattttaacactaccagggtcaattcattttggatttagtacggtaaaattttatttataaacttgcaatattaaaaatttttctttcgaaataaggggacaaattgcgcaattgcattgaatctgggtccaaaatcctgggttccatatgggttggatgccagaatagaattgaaacgatttcaatatgccgcttttgatgcacatgaattaacaaagctaaatatgattaaataatatggcggaggaggtaatgatgaagttgaaagagccgaagaggcctggaaattcgtcagaaaagaatatatatatgctaccgtaaagggtttgacccaatttatcaaaccatcaaccaa

SEQ ID NO: 21428 - DNA, 2097 bp, Heterodera glycines
  unsure (1)..(2097): unsure at all n locations
gagaacaggaaaaanccgaattttttcttggcgttgactcaagaccgggtacaaaaaatgtacccccaaaaattgcgtcattttcttacactttttttttcaaaaacagtgagttgaacacccatcagccccaagtggaagtggtgcgctccaagggcaaggagttggccaagtccagcgaaattggcgggccggagattgagcgccgtatcaaagcattggaccaaagttggacacaaatggtcgaattggcagaggaccggcaaaaaaagctgcaggagaggtgggaaaagggagaaaaagcattgaaaatttcaaaattatatgagtgaatttattttctccaattttctaatattttttgaaaaagttattgaaaaaatatctcttcaaaagctacacaaagcgatattttcaaattttatttgaaattctcggtccaaataaatttatttaaatttctgtaataaatctcaaatttttggattttgctttttatttattgcttaattttataaatacctaaaattcagtcaattattttgcgaaatgaacattgattgaattacccaataataattaaaaatttatttttttaaatttctattccctattttttcctccccttcccatcagtgaggagttccaaaatttcattggccgtgttgaggaggaggaagcctggctgaacgagaagcaacagatactcagctcgcccaacgtcggtgagaacatggctgcagtgcagggactgttgaagaagcacgacacgttcgaggtggacctgcagatgcaccagcagcgcattgacgaactgcagcgccaaggcgaacaggtgggagacagaatggcatggcacacgcgggggagggcgaaattgacacataataaagccaaaatttgtcttaaaaagggacatattaaaatatttttattcaaaattaataattttaaagaagctaacatatttgtttccttgggtgactttataaacactgtcgaaaaaatttctcaaaacgaaaatctcagaaaaaagatcagctactttattttattaacattaaattcctttaattttgttaattataattattaattgataattacagctcatcaattctggcaatcaccacgcaaagaacatcggcacgcgcacggaacaattactcaagcatttgatcctgatcaaagaattggccgtccaacgattgcaaaagttgcgcgacaacaacgcgtacatgcaggtagataattgactcgttgttgactggtttctcaagactgaaagtctgtctaataatattgactttttcaatactctcgaaatggtggaaatttttctgattattttaaatttttgcatgaagactgatcagtcattaatataatccggcattattggattcagagacatggcatctaattgtttgaatgacaacttctatttattcgagacttcttaattttgagactccccttaaatgaagcgggattcgaataatttttgtccaccttcaataattcgcatttcttatggcaccaaaccggatttcgaaatgccgtaacccaatggtccaatttttcagttcatgtggaaatgcgatgtggtggagagttggatcggtgacaaagaaccgcacgttcgttccgctgattatggccgcgatttgtcgtcggtgcaactgttgctgaacaaacaggacactttcgacaatgggctgaacaattttgaggtgggagagagcattgtgtatcattaggaccagggctgcacgaaatttcgtgtcgttttcgtttcgtcctacattttcggcactttttgagtttcgtgtttcgttttcgttcgttaaaatttttcgtttcgttttcgattttaaaaatttcatttttcgtttcgtgtttcgttttcgagtttaaaatttaaaattttcgtttcgttttcgtcagatggaattttgacgaaaaagacgaaaatatttacacccttaagaatgacttttttagtaaaaaaaaaaaaaagatttcattgaactgttgtagtttagtcgagcacacttcagaatgtgttgtttttttaatatgggttcgatcccatat

SEQ ID NO: 21429 - DNA, 984 bp, Heterodera glycines
tccttggtccgtgtttcagacgggtcgaacagatgaccgtgcttttacaccgagaacgcacaactgagagcccgagctggaccgaactggttgctggtacgtgtcgcacgcgaccgccaccgacccccagctcgagtcaacacggacccgaaaccattgcacaattcacccagagtaaacagcactcccccgatccgggtaccagaccccgaaaggctggcctcaagaccgagctcacgcagctactccgagcatctcagcgcactccgcctgcaaatgccccattcgccactgaacagaaggacagcaaaccccagtctggaggctagcaggccaacgtacagcaacaaacgggtgaatgcagaccagatacgccagctctgtccgtttccacctcatcggtttcacgtcctctttaactctctcttcaaagtgctttgcaactttccctcacggtacttgttcgctatcggactcgtggccgtatttagtcttagatgaagtttaccacctgatttgggctgcgatcccaaacaacccgactccaagacacgtaaagatgggtaggcaccgccagttggacaggtcttgcaccttctctggagccccggtcaagggaaacttgaacaagcgggccaacccaagctcacggtctatacgctacacctcgcaaccccagaggagctgcgattcagcgctggactcttcccagttcactcgccgttactacgggaatcctcgttagtttcttttcctccgcttactgatatgcttaagttcagcgggtgttcacgtctgagttcaggtcgaaaaatcaaagcaggaatgccagtaatccaggcactccgccacagcatgcaaagcattggtgcgcttgagttacggtccgtaaaacgcgaattagaaccacaaggtcgcgccagcacaccaaaaccccacagccgagctgagcaagtaacgtaagaacacgtacaagtacatgat

SEQ ID NO: 21430 - DNA, 2926 bp, Heterodera glycines
cgctggcgctgtgccggtgccgccaccgctcgcgcaccgttgtatcacattgttcatattggccgaggaagtggcgccgccgacattgatcgttgcgatggcggtgccatcgtccggcgccagtgccgtgcactgttgcggtagattggcaatggccaccaggttggcacgcacattgcgcaggctggccaacagttgcgcgaacggggtgacgatgaagtcgtcgccgtgcctggaaggaaccacacaataaacatcgggcattttaattttggcacaatttttttttttggtgttttgatccaataaatattagaattttttaattttcgattaaaacgtaaaaaaaaaaattacataattgccaaattgataaatgtcgccaaatatgcaaaattttttacattttcaattgtttaactcatttctcagataatcccccgaaaacaaaatatgttgggaaaccctctaatcactacaaaaattgcatgaaaaattaaatttaaattatttgaaaaaaatttacaatttgtctaaaaatggacataatctcgacaaaattgggaaaacaaaaaatatgcgttaatcatggaatagaagaaccaaaaataagggtatactaatcgggataaatccccaagcttcggttggtgccattttggagattatgccgtcgtcttataatttgaatttggcgcaaaatgcttggcgcagcgtttcaaagttttggcaacaagaacaagtgccattgttggcattgtccataaactctttggcaccaccacaactggcgggtggcacttacatagcggcggttgtcagttcactgctggccacagagctggcacggcttgccggtcgttgtaaaccggcagcgccactgtttccgcaaccgctaacagtggcatagtcgcgcaactgcaacaccggcgacgtgtcgtccgtcatgccgaagccgcccgcccggtacaaaaagctttcgcgtcgcccgtgtgcgcccatgccgcccaaatgggtatggtaattgtagctgctgccaccgacggcacccgcgccggtggaacagctgacgctgacgctcggctgcagtcgcccgcgtgtcggcaccggcgccggttggtacgacgacgatgacgacggcacttgttgctgatgatgatagggctgttcctcggacttgttgagatccaccgacgaaagcagcgactgcgtgtcgtcgccgcagccaccagcgagcggcggcggtggcgactcctcggcaaccgttgtggacgcggtcgcatggcgactgttagcagccgcagcgacggcatgatggtgttgtcgccgcgcagctttacgaccatcattgcaaccgcttgaaagtgtggcgcgtcgaaacgcgccgaatccgccgccgcttttgccgctggtgaacagcgagccgaggtgcaagtccgggtgccgcaagcgttctcgcagcgacttcttcttgctgttgccgttgtcgttgttactcgttgtcgtctcagccgcagtcgcggccgacgacgacagcgactgggacgatggcattgttgcgacgacaactgcggtgtcggcgacgacggcgcgggagtcaccagtgtcgcggtgccgtcgcaacagtcgctgggtgcccttgtcgcctgttttggtggccctgccggtgccaaagtcgacgccgcaacaatcgccgcgctcgctgtcgcagctgctgcaacaatcgtcagcagcaatacagcagggagaacgacaacaccagcaccaccaccacgaccagcgttggcgtcgcggacgaccgtattcacgcacaacgactacggtagggctgctcaacgcggcgattttgttggcagagaagagagacacgaggtgtggcagcgacgggagcagcaaggaaggcgattatgctgataatgatgcagccgaccgcacatcaatttgttacatcatcattcagcatatattggtccttcaacggtggtgttacggtcattggcggcggccacacattacggtataagaataataataataataatacagcgacagtaataacacgaatggagataatgaaaatggatcacaatgtgtaaaaaaggcaaaaatatcaaaataatttaataatgggccaaaaaggggggtgagcccaaggctgaatttttttttgggaaaatctgaagggtttttcaataaattttgttactcgagactatttgaaatttccgaaacattggagacaatcaataaaagagcagagaatgcaaaaaaaaaaccgagtttattttttctcgattagaaattcgacaccgaaaccctcgagcagcacttggaagttgtgtgggtgtgcacgaaaatgaagccaaagtgagtgtgtaaagcaatggcgattaagcggaactgatcaatcgatcagtttctttttcattcgataggagaggggagagatttgtggggccaagcaccgattgatcaactgatcagtgagcggaataagtgagtgatcaatgtttatgaagttgaaggcgccgctgatgtgccgttaaattgcaccgttgggacgccacgggtcccagaaggcgaaaaatgcgattgaattgcccaaaaaatttcgggaaataaaaccattttaaattttgtgccacatatttttgatattttaaaatgggcacaaattcggtgtcaaatgagcgccgtactaatttgaaaaaagccaaaacggggcctaaagattaattaaaattctgtgcctataactttttctaattatatttgagtgaaacgaggacaaacacaacatacaaattgatttgttcattttggccaaaacaaattaaaagcgcactaatgagcgagagcattaggggtgcactaatgggacgaggcggaaggggggaagggtgataggatttaggatgaactgatg

SEQ ID NO: 21431 - DNA, 1440 bp, Heterodera glycines
  unsure (1)..(1440): unsure at all n locations
gaccgggaccggcttttctggtccgggtctcggtttttgtcaaaattcccggtcccgctcaactctaatagtaatcaaaaatgaagaaatttttaagcaaattgtcatggtcataaattaatgcaatcagtaagaattaagaattattttcttttttatttttgcgaaaattttcccttgtaagcttttcgtggctttcggttctccgtgaaggagtgatctgatcattgttttgtaataaactttttttgatcagcattaaaaaatagattaatgaaagttttttaaaattgtaaatttaacattgagtcaatttacaaataaaacctaacaaagtgtcattttttttaattgattgctcattagtctctatgtcttttggcatttcgcctgcacttgccttaagcattgcgaacaattcggcttttgcgttggcaattttcgcgtacggctccgcagccttttggcataccgccgcggtatatttgctaaatatttgcgcatgttccacaatttgccctattaattcgggtgcgctcattttttgcgcttttttcagcatttgtggcccataaaattcatttatttgccctttggaaaattcgtttttcaattgccattgcacttcgttttttttcgtctgatgcattttctgttcaacttcagcactttgcttgaacaaaagcttcattatcatttttatttcccatgacccaacaatttttgattgcttcagcaaataatttttatagaaaatatttaattcctttgcattaattgagcctaaaattcagcaaatgcttaactggaaaggcttaaaagaaaagtgaataaattaagtttaaatagaaaaaaaattaaatatatttattaacgaatcaaaatgacaatagtggtaaaaatagtggcattttaaaagaataatataaaaatttcgtctatttaaaaaaattaaataataaacaaaaaaaaacaatttttataattgtaaattgacctaattcaaaacttcaaaagcagagaatgatttttaagttattttttaatgtaacattaaataaaataaaaaaaattactcttgattagtatgtttatttcttttaattttcaaaagatgaatttttaagggggagggcggaaattttttcattggcagaaaatggtcaaaaaactcgtgccctataaacaaattaccatattcagacaaaaacgaatgtggtaaatttgttgcactttgatgcataaagtcgaaaaaagggacattcgtttcaatcaaatgtgccattatgcgcatgtgaatttcctcttgggttggtgatgtgccgagattgtttaacatttgctttatcacccattgatcatcacattttggcttatccatttctgtctcagcagtgattgcctgcaaatannnataaaaatatattttaaatttaaatt

SEQ ID NO: 21432 - DNA, 1606 bp, Heterodera glycines
  unsure (1)..(1606): unsure at all n locations
atcccccaatctccattaatcccccaatctcccccccccagtctaggaggggtttgaaaaataatccccctatcttaatcccccagtctccaattatcccccagtctacgagaggttgaaaaataatcccccatgggggataattagagcaaatatggtaattaggaatggccaatcaatcataatttatcagtggtaataatgttttttatggaaaaaacctcttgaatatataaataaattgtatgtataaaaatgtacaaaagaaaaattttaagatttgcacaaaatatcaacaaatttctggtcccggtaagtcccgtactatttctttatctatgttagtagtgaaaaactgaatgtgctttgctatgtttaacttttttctatacgttaaatccgtttcaaactttgcatatgatagagaaaaaaataaggaattgttcaatcgctttttaaaaaaaaaatcgctttttagtctaaaatttaaaacaaaatttctaacgcccatatcttttttcgaattcatcaaatcactacgtatttggttagaaaaagcttctcgttaataagagctttcgaatgatatcaagattgtccattttggtgggcaaaaaccttcaaaaataattcccaaaaatcgtcattttttaattttttggacaaaattaaaaaaatgtttatgttgcacaacggattcgaacctccgccctcctcatcccgtcccttcactatcttacaaaaaccacttcaccacacatgcaaatctttttgaaactgggaggctaaatgtctatttgcgcaaaattaacaataaaaataatcaattatgaatttaatatttatataatttcaatttatctattaaaatggctatataaattacaatgggtttaaatggtattaagaaatagttttaaaaattattattcttataaatagagattttttttaaaaagctattcaattttataagcaatatatttagctaattttttgaactttagtgcgctgttataatgtcaaaaactttaatctgagtaaattatgatcaattaattaataaatacttcgaaatatttgaccgaagagcctgaaataagtgttataaaagctaaacaaaaagtataaatattaaacaatcggaataagagctatagtcatggtggaaagaatttcaggatttgttggcacaaatttgctcgtcgtcgtagagatggttatgaaattcgtgcttacgcgtttcttaaattccgccaaagtttagaaaacaaaaaatttaacacataaaaattcataacttggctcaaattccacaaaattaatattctacggtatctttaataacctcaatcgttctctatcagattattattaaaaaagaatttttaaagaaaaagattaaactttctgagtttttgccatgaccttcattatataaattttaaactcattaaaatgcgataaactcatattatgtaattggttgatagcctaagaaactttgttataattaagataagggtttttttttggaaatcatattttgatagagaacaattanagcgattgaatgataccgtgaattcgatgtcatgactagggc

SEQ ID NO: 21433 - DNA, 1669 bp, Heterodera glycines
acattaaataattaaattaaaatgtttttacaaaggcgatgaagagcaggaggacgaggcggcgatttgaccactgaaaatgggaggaaaattctttaatttagggaaatttcaataaattaaaaagggaaaataaaaatgccattttaagcggcaaaaaacgaaagaaaaaaagaaaaaacaattggaaaattgtgtgtttatttcgcaaattttgatcagtgatcaccatgcttcagtgccccctcacaacactcgcgcatttcgtccggcttcggagtgcctgaggaaaatttaaaaaatatatttaaaacattaattagggcaattaccaagaagatcaatcaccatgttaagctgtaaaaatgaaaatttaagaacaaataaacaaagaagagaacaaaaagtacgacaaaaagcacctgatcaattgggccttgggctgaaaatggaaaaaataaaaattaaaaaatggaaaattggagcaaaaattaaaatatttatctgttttaataccttgaaacagaatccgacgggaaagcaactaaattaaagtgtaatgggttacttatttataagatattttggtttttattattcagaattcacctcggcaaaaatgcatccgactgaccaaactgaaaatattttaaaatttcatttttaaaaacttaaaaaaatgccgcagtttaaatttccgattttaaatttcatgactttcccagtccatcaaatgcatacctaagaatggagaagggcaaatcgaacaaaaataagaaataaaaatggaaaatgaaaatccacggttaaatttttttaatatttcaaaagccccgaaaaaatttttaaaaaaaactcaccatcaaccttttcgttgtacctgaaaaattggggacaaattaaattggtcttttctcccaacaattattgcgtaattaattaattcattcattaattaacacaccttcgcgcacccatcagcagttcgggtgccctgtgggggtaagaaaaatttttaaatttgaattttttttaaaattttttggcacaccgatagtattgggtgaccacttcatgtgtcatattctgcacatcgcatcggtcgaagatgcgggccagcccaaagtcgcaaattttcagaatgcaattggaattgaccaacaaattgccgggcttaaaaacacgcaatttttagtaaaattatggcaaaaattaaaaaaaatgccatttttgacattttttaaattattttttggctaattggacgactaccttaatgtcacggtgcaacacattcgcagaatggagatactttaagccgcgcaaaatctaaagcaacgggaatgggggattggttgggtttgaaaaatgcccgaatatttttcagacacgggaaaatgccaggcatccatgtacaatagggttttattccattagagaaataaatttaacaaaaataattccaaattttttgaaaattatgccccctcacaagccccatttttcgacaaaaaaatgcagaaattccgcaataaaatttattccattttcagtcaattcaattttcccataaaaatgggcctctaaaattggacggacttggtagacgaacactttgacctggaaatgattgggtttttagttgtaaaaacagttaatttattatttt

SEQ ID NO: 21434 - DNA, 189 bp, Heterodera glycines
gaagaagcacggcggggaggggaagaagcacggggacgcgagctgctggggggaacctgttgggaaaagcggaaccatcaataagttgaggaggagagtaagaagttcaaaatgtgctgcagcagaagcagcatcaatgtgggaagaggaggagggggagaagaagcaacaacaacgccgggggggggg

SEQ ID NO: 21435 - DNA, 1260 bp, Heterodera glycines
ggttttttttttaaacaattttccctcatctctccccaacttttaggggtacaacaacggcggcccttgcatccgatgcagctgttcacgggctctttaaacctatttttattttttttctatctcttctctgaatggagttataacaattttccacaatttttttactcagttttgcatttaacagacacattctaaaatttctaattagtatagtagtccaagcctattattattttttttgactagtctctgaatggggttatcccagttttagtatcctttttgaaaaacaaaaattttaataactgatacggtagcccaacatccattgccccaatgtacccttcggtttgccaacgggagctaacaattgatgagtttgtttggtttcttttttaagcaattttccgtcattgctcaccaactgttaggcgtacagcaacggcggcacttgcatccgatgcagctgttcacgggctctctaaacctatttttattttttttttatctcttctctgaaaggagttataacaatttttcacaacagttttgcatttaacagacacattctaaaatttctaattagtatggtagtccaagcctattattattttttttgactagtctctgaatggggttatcccagttttagtatcctttttgaaaaacaaaaattttaataactgatacggtagcccaacatccattgccccaatgtacccttcggtttgccaacgggagctaacaattgatgagtttgtttggtttcttttttaagcaattttccgtcattgctcaccaactgttaggcgtacagcaacggcggcacttgcatccgatgcagctgttcacgggctctctaaccctatttttattttttttctatctcttctctgaaaggagttataacaatttttcacaacagttttgcatttaacagacacattctaaaatttctaattagtatagtagtccaagcctattattattttttttgactagtctctgaatggggttatcccagttttagtatcctttttgaaaaacaaaaattttaataactgatacggtagcccaacatccattgccccaatgtacccttcggtttgtcaacgggagctaacaattgatgagtttgtttggtttcttttttaagcaattttccgtcattgctcacctactgttaggcgcacagcaacggcggcacttgcatccgatgcagctgttcacgggctctctaacctatttttatttttt

SEQ ID NO: 21436 - DNA, 1385 bp, Heterodera glycines
  unsure (1)..(1385): unsure at all n locations
ctaaaaatcccagataatcttttaaaattccaaatatcttcataacccatagcttatctaggtagcgaagctcccaaagcgcgaagcgctttttcccagctaaatagccgacggttcacgcacccgctagttatatatacgttatattgacaaggggtttcatccttaaaaccgatttctcgggaatggctaacgggacgggtttgaaagttgtgcattggtcttacaacttttcacggcgcatccgggaaaaatatagagaaaaattctgcgcggacgactgagtcccggggaccgatttctcactttttcttgcagtttagggcccgtaactttttttttaaaactcggatcaaaaaattcccgctgtgagggccctaagttgaagtgttggctaaaagttaaaaaaaattccaggcctctatctctaaccccatggcctgtgtgcttctacaaaaattcagtaccaaatttgtccagttcagtccccgttgaataactcattaggctttgacctgagcgcaggggtgccagcggcactattgtagagcttcgaaagctcgatttttccaaattttaaaatttcaaaaattttgaaaatttttcgagctaggcctaaaaaacggttttttggtttttgaattttaagaatttttaacgaattttcccagagaaacggagaccactttcaagcaaccatttttcgagctctatcgattggtgggatttttgaaaaaatgtcgatttttttccggaaatagaaaaaatttttggcctaagcgggacatttgagtcccgggcccataactcgtcaggggttgatcttatccaaaaattgccttagagcaaaattgtagagctttttaagctctatcgaatgatgtactacatgtttggaaaatttcaaaatttttcgagctaggccccctagaaattttcggaatttttttttgggttgaaaaagagtgtgaaaaatttttttctgggtatttttaaggtgctgagcacgaatctgatgtttgttttacgtttcagaatttttggaattttttaaaaattcgaaaatatttttaatttttttggtccttggaaatttgggttaaaatttgaaaattcataactcaatggaggactggtcaatttaagtgaattaaagctttaaaaatagcaaaaaatcgggagaattttatgagatttatttggttttataatgttcaaaagaaaaaaagttattccagaatttctggaaaaattcgaattttcagaaaaaaattcataactcggttctgaaaagtcatactctaaaagtaaaatactacaaagatccgcaattttttgctctnattatataaattttatttcacgaccnntgcaggcccatgcaa

SEQ ID NO: 21437 - DNA, 1882 bp, Heterodera glycines
  unsure (1)..(1882): unsure at all n locations
gctgatggcgcgcgatgcatcgcttctcatcatgcnnattccttnagcctcaattgtgcccatcgcttcgttcattctttgcatgcttataatttttaattggggaaagtgatcactggcaatttgcttttctgtgtgtctctgtttttttctctttttttacattttgtcgatcattgggctgcctttcccgtgaatttgcagcagatataccgattaacttcctcggggaattgctaaaatcttttttgaaattctaattcggcaactttgaaaagtaagtgccagcaggtgatcactgaatgcccccccttaaatgtttttacttttttaaattctttccgtcccattttctctcaccgtccgtccctttcatttttcgctttttcacaaaattctctccccgactgttctctgctgtgttttttccctttgcttcttcctcggctaatccggctttaattccttctagcaaaagataattgacgccggcaaaaagcgattggtggcggaggaaagagcaattttagagaatatgccggcatcgatactgaaatgaatggtgggggaggagaggagggggaggggagggagtggtcaaaaatcaaggtgatcagagcatgaaactcctaatcagaaacaaaaaaaaatcacagggaaagagataagagagagagagagagaaagtgaaaggaagagaaaggaaaaggagaaaaagagagagagagaatagagatggatggagaggaaaagatttggagggagatgagtgagtatgaatatccaatcagaaggctagctagcctcgttttaaattaaatttggtttctatttaaaatgcttttcattttcgcttccattacaaatgctttccttcctttccccgtaagtccgtcggtcggccgtgatgttttgcttttgccttgggcatttgttagttgcgctgtgattttcggcgtttgagcatttggcttgcctgacgcagctcaagcggaacatccgacttttgtcctccatttgagtgaaaggtgctcgaagcggaggaattgacaatgcttctgtgctcattctcgtctcgacaaaaagataaccatgagaagcatttgtccgattgtccccctttctccccctcccccccccctctctcctcccattccaatcagtgcccatgcccaattataattttattagccccccccccctaacccaattatgcttttgcatgcgaatgtccgtcctccgtctctctgccaaccaaattcctcaactcggaccgacccttcgctgcctgactgacccttatgagttgttaattatcggactttgtttttgtattttctttggcctttctgtccaaaatccataattagcgcccttttccaatgtcctcggccttagattaatcaaaatcatgcattgtctttgctttcttaatttactacgcccccgccccccgaagatattagctcaatttgattttatgtccctattcgttagcctggccaaaaaaggagaaaactggttcgattgtcagcagataaagcgaaaattggagaagaagtggatggtcccctctcagatcgcttcattcggagacgattttccttattgaacacattaagtgattttggtttggtttaaagccttcgcttattgattggctttttcaaactctcaatttcctgcaattccctcgcctccaaagatgcgccacccgacgcatctgatcgagctgagcttcagccgactcggcttccaaattggtgccttttctttgcctctcgcctttgccattttctcaacatttccttaaggcaaacacccaaaaatgataatcgccggcggcattctgttcgccattctgtccagcattggtttgctg

SEQ ID NO: 21438 - DNA, 1205 bp, Heterodera glycines
gtgtaaaaaacagtcttaaaaatgtttctttttctttctttgttgtttgtgttataaattggttttgatatgaaaatattgttttggaaagtcccaaaaaaatttttaagtttgcaaagttttggcgttctgattacaaaataaataataaacttatttgcactgggtgagcaaaactcaatgtgtacggattttctttaaaaaatgataaaatatctgtcaattaaaaaaatataagggatcatattttgtcgataggaaaaccatgagtatacaaaaagaaaattcaaaatattttaatttctgtagatggattgaaccagcggaaagaagaagggaaaatcaaggagactagccactaagccatttgcacaattggcataccgggacttcggattaccgggaatttccggcccggtcccgtggcactaatttgacgaaattggtattactttcttccgagctgaaccagcacagctcgcatctccccccccccccccccactttcatttgattacttcaattttcagagtaaaaagcaaattttagttcttacaattagacatttctcttagcttctgtaaatttattttagattacttataatatatacccattaaacaatgagaattttcggaaatgtccagctgtgtgctgtacgtcgtctgcacacctctgttttgcggcgttcgatggctgtgccaatgagtcgttatgagccgaacagtcgccttccttatcaaaagcttgatgctaatttggcagtcattcgaaaaaggtttttttcaacaaccggattacaaattcctgggatatccgaaaaaccaattttaaatcttttctgcattattgaaaatcgagttgctgccaactttcaggttggaccgtccccttacgctggctgagaagatcatttactctcatttggatgacccgcaaaaccaaaaattagaacgcggtgtgtcatatctgaacttgcgccctgaccgtgtggccatgcaggatgccactgctcaaatggccatgcttcagttcatgtcgtctggaattccggcggttcaggtttgaacactcaaaatcagagtcaggcaagaaaggctttctatgttcattttacaggtccctaccacaattcattgtgaccatttgatccaagcgcaagtcggaagtgagaaggacctttaccgagcaaaggttggtcaatt

SEQ ID NO: 21439 - DNA, 489 bp, Heterodera glycines
gagttctaatcccgcggcagatccgcaaatttaaaaattccggacgctctaacctgtacagtgtggtgtgatcacagggctggtcccgcggcaaacactcctcgacggtaccgctgtgctcaactgagttgacgaagggctcaatgttgccgagaatactatacaaaaggaacaaaattattgaaaaaaggtccagggtttaaagaatgcctaagggtaccgtatattcgaacaaatcggtgagtctattttcagggtacggtatttgttgccctttgctaatgattcattaaattaatttcctggctaattggccacctgctaatgtctaattgggccagcaccctttgcaatgtttgcgcgtccattcggtgcagtggcggctgattttccaccggcgacgatggccccgccgcgccgtcactttccatgccgtcctcgtcaacatggttggcatggccatcatcagcggagagacggccatcactt

SEQ ID NO: 21440 - DNA, 898 bp, Heterodera glycines
ccgccccgattcagctgtgtgtcaatcccagtcccaatctcgtctttcttcatccagtcattaaacattggcccaataagcacctcaaacaaatcatgttcattacggtcaaggaagaacttggtcttttgaccaaaatggcgccatgtgacgtgtattctttccctgtcctgttgactttccttaaaacgtatctttttcaactattttaaatcacggcaatgaccgatgttgtgaagattccttctgctcggttccttctttcgtttttgctatgaattggtttggaaagcgtattaaaaaaggcttcgtgaattctggcttcatgtggcctgtatatttcgtcaatttcagcgggtgcttccatttttggtcttctttttggagcaataacaatggaaggtatgaataattgttggcttcgctaataggtgaatttgttggtaaatgaggagaagtccaaatcgccgatttatttttgtgtgacactcggcccaactcaactggttgtgattgtcggataaatggaaagagaactttgactgacattcgctgtttgtttgttcgctttttgtttgtttgttcgcgttgccccgttctgtgccacttttctgacgttttttttcaattcctccaccacctaaggcttcgtcggcaaatgatttttgtttgtatatttctccataatgttccataaatagagaaaatggttcatggtatttaacttcatttagggttggcccgacacagggaccacttgggtactatactgagaaatacggtaataatttgaggaaaaaatttcgaaacgatttcatttgtttgtaaaatattatcaaagtgcggtcgttgactaaagaacaaaaatcacaaactcatttcgcattacattataaaa

SEQ ID NO: 21441 - DNA, 1322 bp, Heterodera glycines
atataacttttgaaaaaaattaatgcttttttgagaggttagtttatttttgcataaaaattgcaatgattaaagagaaaaatttcaaacaaatttcctgccgtttaagccacagattccctaaataactttatgcccaaaaatacagtatgacagcgatacaattagacaaataataatatgtatcaaagggtgtgaactatgaatagattaataaaaatataccaaaaattataaagaaaatgcttttttgaaataaaaaaatgttttttttttaaatcgaatgaatctttttttaagttttagtttaattaaaaaaaaagtctgtactatcgaaaaatgccaagatattcttgaatttgaataccttaccttttttttggaaaaagcaaatgttagtgaaatataagacgaatagaaaattcgcgcgccaccatttgggcgccataaaataaaaattgtagaaattacaaatttttcagcgcatcgcccaaatgacccggccacacttaagaaatgcgccagggaccttttccgttttggtgccgcacctcattttcaccgacaaaaaaattttatatgtatcggtgtttttttcatttctaattgggtgcgacgccaaaacgagaaagtgtctgcgccaacacctgtatgaattgttgtacggacaattcgtcaatggacaatcagtcagtaatggacaatccgtcaggatatttgattttttagatacatagttcacaatttaattaattgtaatattgttttttaaatatttgaaaaaagattatttcctcattttttaaaataattcaattttatcaatttaaattcattttcgattattttatctaaaaaattttgcgttttaaaaaaataatttactgacagattgtttacatatgaactgtccaatgaccgattgtccaatgattgattgtccgtccgggtgccgtagagtctatttatattcgatgttgtctccgtttcatcacaatttggcgagcaattttataaatccatcttcgaagtcccacgtccatcggcaagacgaagtacaaaatggcagcaattaccagcaaaaggaagtaaaacaaatagccctctaatgattcatttaatccgctaattgtttcatgcacataccaccaatgcaatatgtacacaatacagaagattaggaagaacacacaacagtgaatgaaatttggcgtaaattgctctcttttatggcgacgtgatgaatgccgcggcacattcctgcgtattttattggaaaagaaaatgtaaaaagatatatttgctataaaaatatcatggga

SEQ ID NO: 21442 - DNA, 988 bp, Heterodera glycines
tcttattgagtacatatttttctccattgaaaaataaattcaaattaaagtgtaaagaataaatggatttttatgtgggtctttcgtccataggtcttttgtcggtgtatgccttttgtctaagtttattttgcgagtgatcttttgtctgttggtcttctgtcactacgcctttcttgagatgctcagaaatgcaaatgtccaacactttttaagaatgttctccaatccgtcaacccaaatcagtctaacaacaattccctgcgacaaaaggtcgacttatttttagccgaaatggacaaaagcccaattttcaaaaaagcctccgaattttattctggtcagttttaattgtaaatatactttgaacagtgtttgtctatttacccattttaagcccatcgtttgtccaattcgaagtctttcaaacagaaattccattctctttggttttttccttcgtcctccattcgtttgttttgtctcctccatttccccctgttatgtaaagaccaattcaattaagcatttggctctttgatgtgccgcttttcggctttttccggcaattggctttccttcatttcggcacaaaaacgaatgaacgtgaaacgattggtggtggaaagggaaagtgaggtgggaggagagctaacgaaggcatcccttggcattggcattcgccacgatggaatgaattggcgaattgcccccccccccctccccccgaaacccctcaaagttcctcaattttgttcgcgcactttccatttgccccattcacccagaaagtagcattgttcaatgggaactctaattacaggacatggcacttgtagagtttgggggaagtgacgccggaggggcaaacgttgcggccatgcgaggcaatgcgcagccgcagaaacggcactttgcgctgggggacagcgtcgaatttgaactgaccgccctcactttgtgtgcccttttgagaagagaaaggcat

SEQ ID NO: 21443 - DNA, 1485 bp, Heterodera glycines
  unsure (1)..(1485): unsure at all n locations
agagtggcgaggagaaattgtggacggacaccacagttgggtgaggttttacctgcaggagaaggcgggagacatcgaatacacgngatattacgtgaaaccacggcacggcaatttcatcggcaccattcagtacaaatggaagcagtacttgaaaaggatcggcggtttcatgataggcacgtcgccaggtaagcggacgcccctggggcacttttgaaaggcattccttcggtcgaaagagactttggctgaatttagcttccttttggcatttccctttcctttttggcactgtattttctctttttggcacctcccttttttctcgtccagcttttgacttttctctgctcaccgtttgcattttgactgaaccgggcgaccggaagtgcaaattccaactgaaagaaactcctatgttcgtctcctccttcctcgaggattgtgtcatcgacggatccttcagacacaacttttgcattgcgaccgcttatccgggcattggaaattcaaatgaaagttaacggaaccgaagaacggacattttgtaagacaaagaaagcttttgaaactcgcactttataacattcgttctttatttctttttatgtgcaattaaacaaataaataacactttaatttaatgaggggattaaggaaagtgaatggggggagggagagcaaaggtaattaattagtcgatcggggaaaataccggtattaaccgaactaggtttgactgtctttgagaagtgacttattccgctcatcatacatttgcgtctgcgttggtcaacagtggttgtccctcgggcgccgtttcttcgccctccgtttggctttccctccgatttttgtcgaaggcggcactttttgcggaagcggtgggccttttcgtttgctgctgatggaggacagaaggaggaaaatggataagcttgtggtcgattttaagcgatttggtctgcagaagttgtttatgcagcgaagttggcactttggagagattggccatgggagagacatgggaagagaccgccgaagagggcacttggacgagtccaaagcgcgaatgatgctcagtcaagggccattttggtcttaaaagatcataactcttgaaatgccttttaatgctttcgtttgcaaggctattcgttcttttttgccatgccgtggggtgtcggactttttgccggggattccctccccccaatgccttcgccatttgatttgcctatggcatatcgtcgttccgttgtccgtctctgctgcgccgccttttgtcgtccctgccatcccttgttggaatgtcccatggctgctgcttttcactgttattcctttgccggaagcgtcgacaagtcgaagacgcttttcctccaggaacatttctaccagcaaatccagcttcttgtcgattttttccatgtgccgttccattttgatcacgcggtttgctaatgacactttcatgtcctc

SEQ ID NO: 21444 - DNA, 2083 bp, Heterodera glycines
ctctgggaagtaacccagtaccggggcagggctcctcggtttaaggatggcccccaggatatttgaaaaggcttaacaatatcctaaaggggtttagtaccgagtaaaccaacaacataacaaaatggggtgagaaaggacagtacaaagtacttgtgatcaaagaaaaaaacaagggaaaaatgaagaaaaagataaatttgggaataataaaattaattttaaatgaggaaaagaaaaaatttatagaaaaaatagtcaaaaatggaaataatttgaagttaaaaattttaaataggacaaacataatgccaagagtcaaaataatttttaaattaaaaaaaacggaatgcaaagggttgaaataatttttaaatttgaaaaaaacagaatgccaagggtcaaaataatttttaaatttgaaaaaacagaatgccaagagtgaaaataatttttaaatttgaaaaaaacagaatgccaagagtgaaaataatttttaaatttgaaaaaacagaatgccaagagtgaaaataatttttaaatttgaaaaaaacagaatgccaagggttaaaataatttttaaatttgaaaaaaacagaatgcaaagggttgacataatttttaaatttgaaaaacaatgccgagtgaaaataattttaaattcgaaaaaacagaacgccaagggtgaaaataatttttaaatttgaaaaaaaaaaaacagaatgcaaagggttgacataatttttaaatttgaaaaaaatgccgagtgaaaataattttaaattcgaaaaaacagaacgccaataatttaaataaattttaaatttgaaaaaacagaaagccataatttaattttgaaaaaaacagaatgccaagaatttaaatattttttaaatgagaaaatggggaaaataaatgcaagaaattggcaagaaataaatagggaaatttggcacaaaaatgtgcaaaatttggcaagaaataaatagggaaatttggcacaaaaatgtgcaaaaatttgacaagaaataaatagggaaatttggcacaaaaatgtgtaaaaattggcaaaagaaagggttaaaaattgtggcaaaataatgcgaaaaattggcaagaaataaatagggaaatttggcacaaaaatgtgtaaaaataggcaaaataaagggttaaaaatttgggcaaaacaaagccaaaaattggccagaaataaattgggaaataaggggcaaaacaatgccaaaaattgcggcaaaatggcacaaaaaacggtaccataataatgccaatctggcacataaataataaatggcgaaaattaatgggtaaatgggtaaacaaatgccaaagaaggaaaaattaaggcataaataaatgataatggattattgattggcttttccttccgtaaagtgaattaaatgaaatgaaaatgaccaaatggacaaaaaatcaattaataaattgtttattgtctgaaggtgtcaaattacataatgggcatgcgggaaggagggcggcactacaaagtacgcgaccaattaaaaaaattgaattgtttatttggcaccgttccaataaccccgcccccttcataattgatttgtttatttgacccctcctcccgccttctcgccgcccgctctcgccccctgcccccgctggtgacgtcaatttttccctttatgagagcaaattaatgtttattgtccattgccaatgtggccgagtggttagtgcgtcagtctggccgccccctctggggtttgaatccgcttggtgcggggaatttttggagaattttaaatgaatttaaattcaacgtctttgacctttaagacatttaaaataatttaaaataaatttaaattaatttaaataaagtcgcgcagtaaaaaagtcgcgcagtaagaaaaaagtcgcgcacccccctgcaataggtttgggtttccaagaaaaagtcgcgcaataggttttggcttcagtactgaaaagtctggcgctcaaatggcccgcgctcacttggcggcgctcaaatggctggcgctcagttggccatgcacccctcccacgcctatgg

SEQ ID NO: 21445 - DNA, 2983 bp, Heterodera glycines
  unsure (1)..(2983): unsure at all n locations
aagtaaatcataaaaaatgcaattaattaattatgtttatcttaattaggtttattgtcatcaggacccgtcacccggtataattactgtaatntaggatataaagcagcgaatccctcacattcaaaagagtttcaaaagcaacattataagtatgataagaggtctaaagacaatggatcaacaacaagcgaaaacagccgaagaagcggcacctcgtctagcaactgtaccatacagtaggaaattggacaattttcagacgatttttcgattttggcgatcatggaaaatggataattttcgtttatgaattgttgaattaatttccgcttttttgaattgttgaagattgttgagtaaatcatttgttgctaatattggtcttaaaaatttataatgcaaaaaaaaaaatccatttggtcaaggaattgggagatatttgtgaatcacattcttagaaatatttttaaaaaatgaatttctatatttaacaagttttagagtgacaaagattataacaattttgttttgcgtttaccagattagaataatccaaaaacaccggaagtcggattcgaattggcaaagtatttttttaaaaaggaaaataaaaatttgaaaatttttctgcaacttcgtacatatgcttaataaatatttcagctcgattgaccaacagaaacttagtatttgccatttttcacttttttcccatttttggcattattttttaaagtaagcatattgcattgacaatttaccacagcagcagataatttaaaaatttgattgaccatttcgcaatggcaaaagaatatttgagcaaatggttgctatacatttatttgtttttaataatttttcattaggtccatttttatgaatttccatattttttcctcaaatattttggattaaatataaattaaaaatagttaattatagcttggttttaagtttttaagtcaggactcccatcggatgagttctagtcaaacaattttgactaaagactttttgaaattttatgactataactttttttttataattttgtaaaaaaaaaattaaattaatattctgataggagaacatttagagctttagaatgacaccatgaaatatgattttttttttgaaattgagccaagatacgaatttatatgttttacattttttatgttcctacaacttggcagttttaagaaacgcccatggtggcgctttttaagaaacgaccttcggaagggttggtcctcaaattccccaatgtttttggaagttcttaaagcctaatttcataaatttttttatatcccaccccccccccccccacaattatataataataattataataaaaaagaaaaataaaatattgtacaaattatatcgtcacatttacgtaaatgcgccggaaatccaaaaaatggcaataacaactatttttttcatttacgtaatttatattaattacaataatataaattacatttgcaatattgttggctttgtaaggctcgacaaatgtttgaataaagcaatgaaaaatggatagacgattttaataatatgttttatttaattccaaactccgattgaacaactaatttttcagatgaagccaatgcaattcgcctcattttcccccgttgccatcatttttttgctgtttttggtcaccgaactttgggcaggttgcgttttatcaacgcaaaaaccgaaaaaaggtgaaaaacaaatattttgttgattatttttgtaatatttattggcaatgataataattttcaaacaaagttatggccaaaagggcaaaggcacaaggtttccaaaaaaatttggccataactttttgaaacttaacgaaattttttgtaattttacagattagtagaaaaaacctattttttttttattttcttgatatcattcaatagctctaagtattttctacaagcctgtaaaatttcagaaaatttcatttgatggtttttttataacgccctttttgatggcgttttttttataacggctcagcaccatacagacagaatatctgtcgaaataaataatttttttttattggtcagttcgctttatgttttattttttatttttcagggaattcggtcccccttcacctacaatcatcgcggaatcaacgaaaagaaatagacaaaatagttaagcagaataaaagagacgtaaagcaaccaaaaaaacgccagagcggaagcacgtctataagcagaaaacccatgaataataaaaggaaccgtgttgttgtttgaaaaaaaggctttagaaaaatgtcaagccttataagcctaggcgtatgcctaactgtttttgaatttgttggataaaaaatatatttgtttctacattatttcgtaatttttcgcaatttaatcaaaatgaaaaaaaaaattaatttatacttttaaaaatttagattaaaaatgtgaaaataaatttatttcgaatatttttttgatttattaaattttgaaaatttcaaaaaatgttagaatttttttaatataaaatttgtttttttaggttatttcgtttcgtagttttatttacttttgtttttcatatttcgtaggggaacagttcaactcgccgataaattgtgcaaaaaaaaattgtggaaatttttaattatttaaagaaaaaatttaagaaaaattttccaatctgtataatgattattatttgtaaaatgctttcaaaatttatcattttttgatcatctgaaataaaaattgcataaaaaaggggaaaatttcgaaaaaagataaataaatgtcttttanatgaaactataaaattaaaataacattactttcacaatttaacattaacaatttagtcgaggcaataaaaagcccacagatttttttttcatattaataatttggaatggcaaaaatgattttattgcatttaatatttattgtatttttcttat

SEQ ID NO: 21446 - DNA, 1224 bp, Heterodera glycines
ctttttcgtcttctcctctttttcttcctcttctgaactttgtgcctctccagatgaggtttgtgcttcggtgtctctgttttcctctttcttttcctctcccttttcctttttcttccccctttcctccgtttcttccctttctttctcttcttcctctaccctttccgtttccctttgctcttcctctttcttcttctttttcttcttcctctcccgttctttctctccctcctcctccctcttgtcgactatcaatcctttctttttgccctccttcaaaacatctgccaattgttcgtccggcgttttctctttcttttcttctgctggggttccccctccgccgtatccggcacctttctgcgcttcgctttcggctggcggtggtggcggcggaagaacgggcggaagtgacgcattcgatgccccatatccggcacctgctgccggcgctgctgcactcacaggaggcttatttgcttcttcatagagtgattgcgcttgatcttttggcggcggatgatcgggcggtggtgggggcggaagtgacgcattcgatgcgccaccttcggccggcgcgcctcccgctggggcactttcagccggcgcagcttcggctggcgctgtgccactggccggcttcgtcttagcttctttgtaaagcgattttgcctggtctttaggcggctcggccggaggaggtggcagcgatgcgtttgtggcgccgtatccggcgccaccagctggcgctgctgcgctctctggtggcgattgtgaagcatttggtgccattccataggcggcgtctcccgcgggggcattttcagccggcgcggcttcggctggcactgcggcactcgccggcttcgcttcttcgtaaagtgattgcgcttggtcttttggacttgctttctcttccgcggccgttggctctgctctcttctctttgctctcttcgtcttcctttttttctcctcttctctcttcgtctttcgtctcttcctctccttttgagtgctctttcttcccctttccttcttttcctccttgcttttgttctttactttcttcttcggagctctcgctctcttctgtctctttgcacttctttttctctgttctccctctctttttgcctgctttctgtaccctctcgtcgtctgatttttctcttctttatctttttcttgctttcccttttcttctatttttttcatccct

SEQ ID NO: 21447 - DNA, 1240 bp, Heterodera glycines
gtagaaactctgttacatttttctcgaattttataaaatttctccagtcgggcaattcccccccccccccccgacttttcttttccgaaggtcggggaacaaagcaacattaaattgccaattggcagcttatttatatctttgggtaattattcgtctgttttaagctaacaggcaaaaacgttctactgacaaaagcaggtttttttccgacagtttcgccaattagcactgatcagtcaccaactgatcagtgcttatgtttttgtgacttttccgtgtctctttcctatcatttagctgatccatttaattagctgtccaattgactacaaatctgcatcataaggaaaatgatttaaagcataaatcgaatgaattgccaaaattgccataatccaatttgcccaaggcaattggagggaggtgaagcatggaaaagcggaaacaaaaggcgaaagggaggtgagggggacgaggagagagtggccgggggacgagaaagaggaataaagagagagaaggcatggagagagagaggggaggagagcaattgtggaacagagagagtgtggcagagaaagaggagagaaacaaaccatcccccttcttttgcggttattggactggattggaagagatcatgcaaaattgttgctgttagaatagaattaaaggaatcgccaatcccaaccaaaccgtccaccatttatcccttcaaaaaatgattagagaaatcccagcgggggatgggggagagatgaagcctaagcatgggcaatttcataagtcgttaattagacggctgatatgatggatgggagagggaggggaggggaaaagccgggagaagccgagggaaaaggaggggataaagtagggggagaagccaagggatgggtgggatgcgcagaaagagagaaacaaagatgggataatcgcgagaagctgctgctgggagagaggacgaatcagaatcaggatgcaagtggtgctgttgggtttgggctggctgatcggattgatcagattgcgcgttcgtttcgcttgaggcattccgaccgcgggggacgccttttgaaaaacacggaaggatatttgaaagccgacaatcaaaggcaaagggaattgcaaaaaaacgaaaaagaaataaatattattatttatttaatttaaattcgaaaaaacgaaaaaacgaacgaatgaatgaatgtttcttttgtcagctcacaaacaataa

SEQ ID NO: 21448 - DNA, 282 bp, Heterodera glycines
cggtgtcatctatgttactagatcggggatcgatccccgggcggccgctcgagcaggacctgcagaagctagcttgatggggatcagattgtcgtttcccgccttcagtttaaactatcaagagagggaggagagggttggagaaggaaaggaaaaaaaaatgaaggaggagaaagggtgggggcaatgaaggaagggaaaaaagttgaaagaggggatgcatataattaaaaaaatatataattattattttaaaattatgtaaccggtaacttgctaacg

SEQ ID NO: 21449 - DNA, 1542 bp, Heterodera glycines
  unsure (1)..(1542): unsure at all n locations
tacattcaaagtcgaagaaaatgatgcgctnttccgtcttcttctttgnccggtacgggatgtagcattcacgtggaacgtggaagccgaggcagactttgcaaaacttctgtccgcacacgtgtggcttgtctttgtgcacctaaaatcaaaaggattgtagtttttttatcctctaaaattacccgagtttggtagattattccgcagtcgacacactttttcgaactcttgcagatcgatttttcgatggttgtcacttcagtcccgcgcttgattttacattgtgacagtttacagtggtgttcgtagcactttcggcatttgaatgtctaaaataattcatttaaaaatacaacggattcattgctttacttttgaacatcccaggcaggtctcgaaaaaattatcgttggagtcaatacaatttcccctgaagtccgatccaacacgctggcagttgtgacacttccatttgcatttagaattgtgctggttttggtggctgtatggcatttcacactaaaaaatttttattatgattttttcctttgtttttaatattactccaaaacagtagttcctcgttccaaagacttttccaattgattttatagggtcgtagtgaccggcgccgtcatcttctccttctgtaaagagcacgcatagctctttttagtagttgttcacgtccgctttccacaaaggcttcatttttccagatgtcccaaaacagaacagacgaaatgtgtccgggtgaagctcggcataatattccttaaaaatactagttaattattattattaaaaaggtgttttgcctggattgtttctccgtattcctcaatggaatagaagggatgctccagattaatccggcaggcttggcacagagttgtaacatcgttcagctgccatccagggttgcgcttatattccgagaatcgttgttgtggcagcacatgtttcattcgcagaaattcaaacgcccgaaagagacaaaagttgtcgttgttcatcagctcgaaagttgtcccatcgcagatgctgtacgggatgttgaagtcgggtctcctccctttgccagccagcttcttcctctgctttccgctctcgatcgccgtgatgtcgatgacgaacgattcttcgcagattgagggcctttccttcgccttgttgctctggtcgacaatctcaaagcgcgtcagaattgtctcagccattgttccgtcgatcttcttgatgtttttgaagtgcacggcaatctcgtagtcaaggtggcgtgccgtcagaaggaagatgaagtggttggccacgatgttcatggcttctgctcccttcattgcgtacgtaagacacatcaggaacaggctcttcagcacgtcttccgggtagttcgagttccaaatgtagttcagcataaaacggcccaagaaacggtatgctaaaatggatttttatttatttagaataaaacgaatacaaaagaacaaacctttgaaccgtccactctctgcttgggcggcatccaaacaaatgaag

SEQ ID NO: 21450 - DNA, 2493 bp, Heterodera glycines
tttgtttgacggacacagtttattaaagccaaacaaaaaaaaaaaattttttttttgattttttttttagatggacgttttgattgcctattggctgacatcgcatgttttctggtcctaccatcagcagtttgagatgccgacagcccaacgcacacagtccgccctgtccaatatttggtggttttggctgtgctattggtcagtgggggcggggatgtaccagggttgcatcatcgggtctcgagaatggtgccggattttgtgtgcctctagttgtccgaaaaaaatccgtattggattaaattttgattcggctgtaccgaccggtttttcaaaagacttgaactagtgtaaatcgtctttttatgcccgaaattccgtttttcaaaggtttgaaagtgaggtgcccgacacgggtcctatcgtcaacgattggaattggccgttcgcgcagccgcacttcatgcacacactgatggccaagctgaacgcgaagctgcaataatgatcccaggtgggtgacgggcggattttcgcttaaaaacgatctgggtaaggtttggttcgagaatggaccgtggaaaattcccgttttcatcgatacctatttatatttcgttatgcaaaaaacagggacaaagattgggttcggtaaatgagacgaaattccgggctcatacaaaaaaattgccaagccttgggtgatttttaaggaatgtcgcatatttgttgttatttcttttcagaccaaaaattgccaatcattcccagacaaaaaaaagaaaggaggagagagaaagaaagagaacatagcgttgattcattaaaccgtacagtgcaacaaaacgccacaacactccgtcgtcttcagccagtgtttggacttccttccctttcttcatgccttcctttgatgatgtttttttccttttcttcgtcatatacctataataatattttgttgctgttttttgcatttgacacttggaaacgcgccattttccactgacattttgatattttgttcctctttttttctcggccggtgcatttttgacacccacctccgactccctctcaaaaacactataaaaattttctctctctcatcatcattgttttgttaacccgcctatatagcagtgacacttactacattttttaatgattttttgattggataataataattgtgcaccaaatttctaaaaaagaatttggcaccttttgcttctagccatttcatttaaaaaaatccccgataaaagtggtcacaattttattttattatttttgttgtgcatatattatattattaccaccgccacaatttactcatttcggctgatattttctcctcttttgtccattgcattttttgccaggatttattattatacccaattgattgaccatctgcaaggaacttttttgttctattttttttgtaattttaataaaatacgatatttctgaccattgtatatacatatatacctatttcttttgaatccgcgatccgcgggattttgttttgcgcggcgcgccgcggattttttggtacaaaatttttaaaagaaaaatttattgaatatttagatttgaaggcataaaattttgtaaactttactaaagttccaattttctagcgcatttatatggaatacaatcagaaaatatttatacattcatgattcatttttttcaaaattttccccccgcgggggcctgtcgggaccgccggacctctccacttcctccatgttctcaaaactttttgaaaaaatacgtcgcaaaaaaggtgtaatattctcttctcaaaaatattcttaaaaatgtaaaatgacatgaaaaagttatgatgaaaatcattgaataattttttaaccaaatattcaaatataccaaaaatattttttgaaatcaccttttacttggttaagaattaaaaaatttagtctagtaaaaatatttagaaaatttttattatattttttgaaaaaattccgaattccgacgtttttggggtcgtaattccgatttccgaaaatttttggggcttcggaatgccatccttgtttgcatcactgggaaccttagcaaattcccccccccccccctattcagtccccctaagtattatatgcatcgtgattttaattaatttttatataaaaaataaaaataaaatttaaaaaatggtttaaaaaattaaaaatgcgcgaccgcgatccgcgattcgcggcaatgtttttgcgcgaaccgcgatccgcgaccgaggcaaattgaatccacgatgctcgatccgcgaccgcgggatttttctgtgagccctccacccctgttagagaccgagatttccaaatatgccgagctgggctgacattttcagaagcaaccggtttccgggctccgactctcaaaaatcggtgaaaacggattttctaattgccgggcccgggaccggtttccgggttggtaacaatttaa

SEQ ID NO: 21451 - DNA, 1912 bp, Heterodera glycines
gggctgtcattataatcctcaaggagtggtccaaacggcacggcttgttgcagataaatccatttaggcacgatagaatccgaccgttggatggacgaattatgcctgggtttcagcactgatcaccgagcggcacctttcccttgtacaaagccccactattttttctcattcaaattttctcactaaagattaagccgtaatgctcggaggattgtaaaaatgttaattgaacattagcagtggagcaaatgggacaaatttctcgagtatttaaagggggagacacaattcataaattcattttccaacttttcgtactccattttaactatgtctcaacagccccaatactctgttccccctcccgctccatactcatatgcataatgccaccttacggctatatgccgcaaaatgtcccacaaatgggatatcagcaagcgccactcgcgccgccacaagtctcggtgccccaaggcaaaaccggtggttacaaaccatcatgtgctggccccgcaccagctccggtgccatgtgttgccgaggtgttgactcagcttgtagccgacttcaccactttcaccactgagttcaacaacaacttatcagcctttagcaccgagttcgcgcagctatccaaatggctccgtgagaatgtgggcgtcgcttaactttcctaaatcttttttaaaaataaatttgccgttcaaatatgatcccaagaggatttcagtggggcaaattgccctttctctaaagtttgaaattgggtggtcatcccattccctaatcccttcgccttttcccattttttgaatcgtggcggatttgtgcgcacaacagcttctcaaatgctcttctgatgcccgacctgatgttcaacagctccgcccatgatacgagaagaaggtgtatataaagaacagaagaaaaacagaaggcacctttttcctccaattccctcctaccaaacgatcttctgacttcaaaattctctttaacgtttttgaaattacccaaatttcgcagtgatcaacgttttcaaatttgtcttcgcatttctcgtatttttggttttgtgttaaaataaagattttggatcaaaatctttcgtgtggattattcacggtcttagaccccgaagtccagagttaacagaatttttctgagagcaactcgctcaattatcctttcgaatcgtaaggataaattttgtcaataccaaaaggtgaaacatttcctttttcgggaatttgtcttttatcacatttggtccacacggagttgtgtctcacacaactgcccactgtcctttccatttttcggattgttgcaacaattaataaagaattaattatcggaagcgtaaaatgaaaatatgaatttaaatatactattaactaaattaagaaataattaataaaaaattatctgtataatttttaatttaaattaaaataatcgatagattatataaattgattaattgagatattagtaaaaaaccgaaaatattaaatattttattgttgtaacgaatttgacgaaaaattttaaaatttcggcttatactaaagttttggaaaatgcagctcgcatatgagatgtccacttcattttggcccggccatttctaaaataaaaataaatttgtttttttaaattgcgagccatcacttttataatttcaaaacattaaattttttaaactaatgctcataaattaattaaaaagaccaatttaattggaaattcaaaaaataataaacaaaaacatgaatagaaaacaaaatgaaattttgcattacactgacttatctgctgcaaattaattttttttttagaattgtatgtgtgtgtatattcatataaaatattaaattttataaaataaaattaagaaaaatta

SEQ ID NO: 21452 - DNA, 1427 bp, Heterodera glycines
gggggctctatttttcaaccccccccctcaaaagggggggctttatttcagaggggggctctaattcaggggggggggctataattcaataaatactgtatattaattcattcattttttttaatcatttaccaatgcatatcaaattccacatttactgagcgaaattgaatggcccattcagcgttttgactggtacaattcgcttggttgcttctgcaatgatatatttttttttttttaatttggctatttacaatcaaggtaattaattcatcataaaagtttgaaaaaaaattgctgaattttttttcttttagttttcttattcaaaaattttctaaaaattttttcattgtaaaatttctgtttgaaattttttttttccaaaaaattttccggcgactttttggggtgctcgtcaaaattcaaagcctccccccccctcacgtcttacttggccatgccagccaatgcttcgcatcgtttgttcgccttttcggcatccggaaacacgtgttggccacatttgagcaatgttggtgccgcgcccgcataagtcatgtacaacatgttgcccacctgtttttttcccaaatttaaacgaatttttttttaatttttgaaaaaccgtatcccctgcaaaaccatgtttggcgaaaaaatacgaaaatttcgattttttgaattgtaatggggaaaaatttgcgaattttccctaattgatagtttgttctaaaaaaaatgagggtgaaacttcattctacctgagccaggataagtagttcagccagcagacacacgactaaaaaattttttttaaatatattttatacatgaataaggggtgttttcaacttggtaacccccccctccccaaaaaaactttttgtaaaaatatcgaatttttttttcgattttttttttagaaaaaaacgtttaaatttaaatttgtttaaaaaactcaccatatgtgtacctgcccagctggtagaagtcgtccaacttcactgtttcgtccaccattttgtctgttgcggctgccaattgggcgggcgatgcgccggctggcaccaaaccggttaccgcggtctgcgcatggcgtgccgtttctgtgctcggctcattctgttcctgttccgcaaccttttccgtcaacattgggtcggcttcagaagccgtaggagcagacattttcaagacacactaattatccttaattaaggcattaatgaaggctattaaggtaaattgggtatcacaacggcagattatttaaacgattttaaaggataaaagcgaaattcgaaaattttaattttcgactttttgttcgagttcgggtctggggttcggatttggttggatcacggattcgtggtcagcgacaacggaaacccacttggaacatatgttttcgatgactt

SEQ ID NO: 21453 - DNA, 1383 bp, Heterodera glycines
tgtttacattttgcaaaatttgaaaaaaaaaatcattactgtaccaaagatatggcgaaaatcataaaaaaactcttaattttggtagttttggcactgtgccgtttgggtttaaattttttattttctactcaatttcacgtttaaaaatgccattggaaggcgtgtcgatctatgcccatattaataagcttaacattcgtcaaaatgtaattgtccacgatctttgtactgaccactcgttttcatggccacagtgccggaaattctttttttgtcaggcggttgtataatttgccgttgccgcttttttgtgccggtgccatcgttcgccggcggcttcgccggtgccatgcgtaacaaaatgggaaacatgcgcacttgccagcagctgaactctccgtcgacaaaacggtctccgatcaaccgccgcattgggccgtcggtaaatattaatctgagggctcaaactcaaaattgcttaaaaacagtggatgtcggtttaaaccgacccgaaaagtggaaaaaaggattgatctgtgccaatgacttttttcacagaatggcacaactcttgtaagtgaaattatgtaattggaatttccgattgtttgtggattcgtcgactttcgctttgagcaaatgcatgacccaaccgatagaagaacagaacgaataaataaatattttaaatattaatgcaatccttttttcaattcgataaatctgaccatcgcggggaggagagagcaattagctaattgttgcgattttaatgtgaaaattcgcatgaaaatattgtttatgtaaaggcgaatttatttttaaattgtctacgattttttgaaaattcaagctcattttgaaaactctgctgattgttactccaaaaacattaaaatggaagagttttttacattttgtcttaaaaaatttatacgcaacaaaaactaatattttttaatcaacagatttatttaattttgttttttaataaaagttatttccgttaataattttaatagaaattttagccaattttataataaatttttgtgataaaacaaacaattttaatttaggctttgaactaagcggcagggctgcaattgacataagaatttaatcaattaattacttttattaattagtcactataaaataaaattaatttgttttttaagagaacggatcggtttaataggtatattaaaaataaataataaaaaatatctttcttttggttacataaaataaattaacataaattatttgtccaattagtccgatccaactctcaaaaaagggacaggcatttgttttgagcaattcggtctttccatccgtttcttctgctgatgatcaacgaatgacaacattgat

SEQ ID NO: 21454 - DNA, 1313 bp, Heterodera glycines
  unsure (1)..(1313): unsure at all n locations
atgcaaagaaaatgaacaatcgaattttgaggaaacctcccagtttttggcttaataatttatgaatttcattttaaattctctcaaaatatttttcccgcattttaagttggatttgcactgatgttttgatggacattctgccattttttgaccatgcccaacttggcctcaaattggcactgatttcgccacgtttcgatgttttagtggacacgcattttgatggcaaaagcgaatggcccatttggaaattagtcgaaattcacaaagaccgtgggtcggaaccaaaacttcgtctgtttaccagctatgccgattttaccaatattctgaattttccgttgcccgaccgtccgctgcccgagaaaacacgctttaagcgtcttgtgatcatgtaattaaattaaaagcattgttaactgataaaagcatcccattttcaggtacattgatcattcagtcatcgcatttctccgctcaaataaacaaattttcaatggaacacgattcgcattgagtttgtcagtgcaggcgcccaagaacgctgcccagccgatttgggatgttttggcacgtgaaatttggtcaattattgcgccaaacattcgccgtttgtacgttcccgatgctgaccatttggacaatttgcgcagtcgcacttcgccgacaattctcacggatctcaacattaattccatcctttctggtcatctgttgcccgatgtgctcggtgattttgatgggccaaatgcaactgcttctgctggccaatcgttgtccaaatggttgcacactccgaccaccgacgggaagccgaagcgattgcgttgcgatgatttcaacgggcaaggaaacgccgaatgggtccacaatttcaaggaaggtgctccttcttttctcctattttgtcattcatttgcatctttttcggcaactaaattttcaacaattaatgcgatttgcttttaatgtgtccgttttcccattgtttagccgtttctccgtgccacttcttctgtctgctacataattcaattctttgccttctcatcaacgccaattgcgccatttgaattgttgaacgaacggaccaatgagaagttgacactgacaatgagcacgaatacatatggcttctgatgcggtgccaaattgggcagacgtttcaatgggatgccaaaaatttgaactttttgtcggcattcatttgtatggttacaaaaaatgcattgggtgagcatgaaaacagaattttttaaaatacatttaaaactcgaacttaaannttgataaaactatgttttaaattt

SEQ ID NO: 21455 - DNA, 1484 bp, Heterodera glycines
ccatgtccgcgctccaacaagtcggctatgtacaaagacacaattcgctcgctttatttgtgtgcgtaattatcccttgagggcactttggtggcgaaggtccgtttggcgtacaatgcgacgccacaaattgaagcgaaaaaggcacaaaaagaggcacagatcgaacggacgacgctgagagaattggagggaaagcggcggacagacgaatggtcggtcaaccattagcagcaaaacaatccaacaacgaatttccatttcatgacggactccgattttgccaacttttcccattgggtcgtcgagcagcgcaaagacaaatggcacaggagagagtatttgccgtggctgttgtacggtgaatggaaaaaaacacgccgcaattacaacaaaagaacatgaaattccattccatttcagaaaatgaaatcggctgcattcgactgactttcgacatttgccaaagacagccgcaaaggacggacggaggggggcacacgtgcatttgagaaagagaaaaggaaaacgaacaaattgacagagggcgaaatactgtggcgaatcaattagtcctaattgggtttattccttgtcctctcacaaatattacaactgaatgggttggtggtgcgttcgttcgtccgtttgtcttttgtccgtccgtcggtcattcgtcccattccttcgccctcactcagtgcgtcccctcttcgcttctcttcctccccggcacccatccctccacttttgggcgtgtggtcgaatagggcacgtattttttgctcattacaatcgaattgttcggctcatgttccaacatccatttcttgcgctccggcggcggctcaacagtcggcggtttgtcgcaaatgtggtgcaaccagcggtgccattcgggcgggatttgcgaggcgtcgtagtcgagccaaatcctctcggcgtagacgacgtagcgattccggggcacgaaataagtgttgtccttaagatttggcatttactcccaaacaatcgaaaatgcaaattaacaaacatcgaccccaccttagccttcgttcgtaaacgccgccctttttaaacacattcccgtcaattttctcaccaaatgcgggattaaaaatacactggtacaaatagattcttttttggtaaactaaatattttagattgactccagcgaattttccaaaatttctttcaaagttttagtaaattattttttccgtgtatttaattaaatttacgaatataatctttgtttgtttacttcgaagtatcggttgccaaactgatcctcgcctatcaatgtgccagcacggttctgaaattcgttattaaagtaattggaaatcctaatttaaaaaaataataaatttcattcatttgaccgtgtccatcaaataacgctgtttaatggctgctcggatgcccccagtttgtttcacaatattaaacgcttttgccaatttgtcgagaaaaaa

SEQ ID NO: 21456 - DNA, 1720 bp, Heterodera glycines
caaaattaaagcgaaatataaaaagagagcggtgaaacagcggtggaaaaagaaagagaagcgaagacccaaaatggcacaaagcgacgaaagcccgatggcccaagaaaagtgagttttttcacacgcaattttttggattcaatttggaaggtgctaatttttcaggagatgaagcgttgcattccgtgtggcggcgacttgagcagctttggaagacgatgccggacgctgaacaaatgcgccaacagctggagcatcatttcgtctcaaattggttatggacaccggcagactcgacgaattgaagctggtgagttgatggaaggggctttaaaatcttatccaactaattaagagggaggaggaacaacggtagcaagcggaggaagacaaaacgaaatgaagaaagtgatcaagaagctgacgtcgatgtcgttgactgatcgaggattaatggtttttattttcattacaagcggtagataaattttttaaaaatttgtaaacaatttttaaatcattttggtcacttttccttttatttattcattaaaatcatcgaaatacatcaatagcatgcactgggaatcgaacctgggacccccccctttggtgaccttctcacagaccacttcgccacacatacaaatcttttttggtacagcagctcagtttccggacgccgtgtacagttatggcaaaaagtatagactcaaaaatttctttttcgaaaaatacgattttctaaaaaaacgaatggaggagaaaaaagttttgtttacaccaaaagaaacgtcatttagtacactaataaatacacaaaaactccctcggtatgtaactttgttgacgagaaaatcggcccagacccaaacaaatcccctttttggtgggcaataagtatagactcaaaatgttaaatagaccaaaactcagagataaattctgaaaaaacttcttcactttttgatgctgaccaaaaaagttttttatacaaatttgatcagaaaactccttcattgtgatctgaacaccccaaaacacactgaaaatcggtaaaattttcaaaaaaaaaactcatggggattcggaacatttttctgggaaatttgattgggcctatcagaaggaggacaaaattctctgccggattgcctttggggtggcgggcctacgactaatacccgcagagcaagagagcgtgaaaaaatgattaccataaaaatggcctattttctaccatttcccttttgagagaaacctttccagaataaaatgcataatatgtttattcaatcctttcacaggatgttaaaaaaagaaaatataggctcaaaaaaatacaaatacaaaaatttaggacacagtttcatgaacaaaaagcacaaaaatttccaaaatcttcgaataccattcatcagcagatcaataaatgtaggcacctaaaatgaaataattggacatttaatatttgtgcatttatttaatcatgcaatatttatttttattttttttattactttcttcggcaatttgaacgagtttttgccattttccattcccgccagtgcctccatcaaatagcaaagcatccaaaaaattttggaaattctttgcttttccacgtcctgaatcattggcatttgtcaaaaaatacttctttacaatttacatcaacataagcatgtttataggtggtaagcgtggttgatcgatc

SEQ ID NO: 21457 - DNA, 953 bp, Heterodera glycines
aatgaaaagcggcaaaaatggtcccgaaattttgggcatttattcgggaaacaaattgtggaataaaaagctttatatttttgaacccacaagcaatcattacgatcgttgttccttttggtttaatttctgatccttccgagaattttttgatcaatcgaattattgtattaatttcggtaattagtccttgaatcgatcccctcccaattatccccccatgctaattttgtgcccaattgttcgcagaatcgccggtcctcccatctcaagaaagatcgcaaccatttgccggtgttcaccctgagacactacagcacgcagcggctcgcctgcgcccgacccagcaccgtgaatcgttattcacacatgaacggcaacaatttctggacggacaaggtgatcagaaagatcacggcacaaagcaccagcaaaaaaggatcagagagagtgagagagagagaaaggagagacaaagaaagtgagagagaaagcgtgatcgggggtgagagagagcacaaaaaaaggatcagggagagagaaaacgagaagtaagagagaagacataattgagaaagaaagccgcgaccagggatgcgaaagagagaaagaatggaagagagaaagtgcgatcagggtgtgattgagagagggagagagaaaacagaccgagtgaggcactattctgatcaggcttgatcagcggagcagatgacttagaattgtggcgagattcttgagctctaagcttattgttagctgaaaatgctaaccgcaaaactttataaatttagaaattcaattcattaaaaatatgccccctcccattttctgatcaattggcttctgggcgacattggccggatcagtcgcagcatggtaaaagcagcaaataacattatattctattgtttcttaaaattctcatttcctccacagaatcgttggccaag

SEQ ID NO: 21458 - DNA, 1873 bp, Heterodera glycines
aaatttaagttagatagaaaaatcttagaattttttttagcttttggtaacttttttaaaaaaaatcttggtgtgggtacggggaagtgaagagcacctccatataaaaaatttcatgcatttttcaccaaattgaaaacttttacagttaattgcgttggtctgtctcatcggtgtgctgatgttttttgcgcattctctcagagatgagccgttgcccactggtgctgtaaaaacgccaacagcaccagacgagaacactgttgatgcatattacaaatcgcatgctgtagcagaaagcagcgacatggacaataattttgcataacgtttttctttgctttcgaattttttgatattttattccctattttcaattagctattacattgttctcctgttttacagtataaaaaatgcatattatttgctagggaattgatttttatttgctaaaaacactcaaagcacaaaagtaacgcaatttgcataaaaatgtgtgttaaatattcgggacaaattgcagcacaatattaaagtgctcgagaaccgagtttagcaacttggggtaactgacaattgaatttacgggttcacttcattccctccgtcccgaaaatttaaattaaattttgtatataaagtgtatattaacaaatattaattcatatgcacagtaaattataattaatttaaaaattattgtcgcaacaaatcactgttgaaaatatgtacatggcaccgtgaaaattgatcaaaaaaaaaaatttagattttgttcaactgtattgtttatttaagtctgacaatgggaatttcttatgaggatggacaaagaattgaacaagaatttaacaattttgtatatgtaatgtttggttccattttcttcatcataagccaacggatgagatgaattccttcagctataaatttttctccattgaaattttaaaaatgttgtccaacttgattgtgtctcaagaattcgggccaatcaacttcttcgctgtaaaaaaaattgaaaatttttaaatgttgaaaaggagtgacgattttctcacatacatattcatgctaaaaatgctgctgttggtacaggcccaatttgtcgacagatgacaactcttatggcatgccattcggcaatctgtgcgagacggcactcattaaataacacaaaaaaatatttttttgaactcagacaggagaagggggggatctgctggcccgttttcaataatccaatcaggatttccttctaaaagctcaatgaacgatcaatgagaaccaaatcctgtttcagtccgtttttccaaaaactcacttctatgtacatgtattacttaccccgacattggtatgcctgtcttgtagtaaaatttccgccaattttctttccgcaaactgcgcacagtacacgcctagtaatcggcatgatgtattattttggcattatgcactcttcaaataagactgggcgcttgacatttggactaatgcttacaattagatagaagaactgagtaggacataaaatgttaatactacatttaatttattgttccaaaaacgattctggcacgccaatcataaatttgacggcattttcatgtgcccaaatgagcatcgacccagtaaactgtaccctcttggttttactgccacaaaaatatgccactcataaatgtgcaattttttcccgctttgcatcagtttgatcactgctggctccgactgcacttcgaaaggtattgcataatatctgatattttcagtttaaattggggtacgagatttccaatactaatccagttctcgacaccacaccttggtttctcctcctcagtgccaactagctctaacactaatt

SEQ ID NO: 21459 - DNA, 2024 bp, Heterodera glycines
tgtaataatctaaatttgaatgtccatggctaatctttttgcttttttagcttcatttgcggcgattgttggttggatttgttcgattttctgccgccctctcagcttggcctcgaaattgcgctgatcagtcgccgatttgactgcttcgttgaggaacatttcaaaacgcgcaaatggacattggcgaacgaaattaaaattagaggagtaattgggcagaatggtgcaattgaaatgggaattgtcaattccgatggaaaagcattgccaatcccacaaattccgttgccgaacaaagtcatcggatttggaagcatttttatccagtaaaaaaatgaatttttgtaatgatttgtgccaatcacaatttcatttaattttcagcttcatcgaccaaaatgtgctcacttttcttcgccgttttcaccgttttttctccgtttgtgcaacaaaattgtacattctcactgagaatgttcgcatttcggagtttgttatgcgcaacatttggccactgttcaagaacaccattcatgtgatgtgtttgaaccccatcgcttttcgtcaaatgcgtcaattggccccgtcaatgctaaacgattgtccatcacttcgcgttgtttttttcgatggtggcattttgcccgaatttccgcccgacgacagcgccaatgcgtcggatggccaagcggtggccaaatggctgttcacgcctcgtcccgacttaacgaagatactcggcattgagaatttaactgtggaccaattgttgacaacagtggaacaaatcaaagcggtgattatttgattactcaaatttaattcattttttaaaatatttttttgtcttctttttaggctttttcctctgcttcttctcctgtcaatttcagcatttctgttgactttccgtcgtcctctccgattgattctgttgagccatttcaattgaccaacgaattcaccggggagcaattggtactgttacaagaaaatgcatatggttttgtgctcatccgttgtccaattgtgcccgatgataagaaacggcagaagttcaagaaggaattgggcgaccgatggaaccaaatgaaaattgccttcacagaccaattagttgacaacgggtgattaacaattttaacaaatccaatgtttatttttgtttttgtcttcagtcttctcggtggttcctcacctgggccgaatggtcagcagaaacagcaaaaaatgaaatgtatgattatttgaagtgatgttggaacttgccatttaaatgtaatgtagtcgtacataatgtatttgactttgctcacaaattcataaaatgagtttgttttaccaatattttgaaaaaaacgcataggaaacggcccccatcagttaaattggcctttttgactccctaaagaccagaaaattttccaaaaaatgattttttagcaaaattttcatgaaaaatattgaataaatttaaattttctcaaaaatggctaatttatgtcaaaaataagcgaaaaatttagtgtatctgaggaatttaattttaagaaattatacccttaatttggaagaatttatatccatatttttgccattttatgtccatatttcacgattcttggtccagattttatggccatactaaatatttaaaattctcacttttgttcctaaattgatcaaaaaaagctaaatttagtcaaaaccattgaaatatcaaaaaattgtaaaatgtaaaaatatttgaagcaattttgcaaaatgttcttatttttgacactaaaatctaattttttggcctttgttcttattttgaaaattttgagatagaaacactggattaatagacaaaaaacccataaaaattgactattctggcataatttataatccctaaatttggtcatttttagacaatatctgtgcaattataccaaacacatcattcaaaaaaattaattttttgtgagactttttggagctatttaaaagcaaacccccgtccccgtccccggggg

SEQ ID NO: 21460 - DNA, 2087 bp, Heterodera glycines
taaaaaaaatggataaattttaaaaataataaatgaataccttgtcaaagtgttacacgggtccgggactttgggaagcgagtccggcattcaaaaaaattcaataagaatgttgaacatttttaagattttttaaattaagtcgggtgttcggggctggaccagggatgacattccgaggccccaaaaattttcggaaatcggaattccgagagctcaaaaacattcagaaatctgaattccgaagcccgaatttttcggaaatcgggattccaaccccaagaatgtcagaaatcggattcgtgccatccctggtatggacccggtcgaaaacccggatttgtgtattcccaactccatgacttatctatatattttcagacttcttttttttaagaaaacccaaatcaagagtttatgcggcacttacaatagtgacgacgtgtgctgtcgagctgcctaccgtacttcagaaacttgccaaccgaccaaatgggacccagaaaaacaggcaatttacgacgcattgcgtgccgcaaatccagatggatacacatatgcctatgacgataagacggcaataaagaagtgctcatcatcttctgctgcgatcgtgggcttttgcaccaatgtgtgaatttgaaagaagagggagttttgaaacgaatgtttttggcaaaaaaattttcttttcaaatttcctgattttttctgtactgcttttttttctaaaacaccgacaaaaaatcgtcataactttctttaaattttaagtttttgaaatttgttccaatgttatagacaaagttacaaaaacaaaaaaaaaattgtaacgaaattttttgaaactttatctaatgagaaacgttatgacaatttgtttttgtcagttttccgaaaacagcctatcatctgtcacccaatcgttttccagctaaactttctatttcaatttcactaaccaaaacatttcttctgctgctggtaaaatttatatgtgaatttcatttcactttttggggagtgcaaatttgttcgaaaccgatttacattttcagaaaaattcaggtatattttattagaaaaaaaaccttgaaaaatttttactcttgaaaattttgtcagaggggggctgggatgggctgattcggcggatgaggggagggtaacggtttgatgccagaacgtaacgttttgcatctaaatttgacatattcaaataagtcgaaatgttgccaaccctggaaaatgccaaaattcaatggccaagcaaatccaatttatttgcattgataaatatgcaacattttccgcctgtaatcattgtcattttcacgaaaattccgggttttcattctgaaaatattcccgaaaacagcagttggccttcactacgcacaatcataaaattgaatgggtgatcggcaatgaattcgatcgttggtggccgtatgatcagcagtgatcgctccaccatgatcagaccggtggctgcagccgcttcacttccagcctcattattcttaatggaaaatcagccaatttttgatactaaagttttaaatggcattaatggccatgtgttttaaaaataacaaaaaaaaagttttaggaaattctgctgttttaaatcgcatttttttaaaatatcgaatctttaaattcgaataattccgaaaataacaaaatcagcgcaaaaaacccgcaattaaaaaataaattccatttgaacagattttttaatgtgtgagagaagatttcaaatatttaattaattcaacgttttgatcacaacaaatgattattgctgtgcatggatatgtcttcaatttgcgatttttatgattaatgaacgatcagtataatcaaatcatccgtgaaaaactgtgccgaaaagcatattggtattatcatcgccaattgccaagaaagcgaggaaagggtgatcagcgatgaagcgatttggggaaatgttggcactattggccacaacatgaatgccagtggcagctgcagcttcggtgccctgctcattgacctaagtgaggatcgattggtttatttggcagtgtgatcaaggcccgtgt

SEQ ID NO: 21461 - DNA, 1898 bp, Heterodera glycines
ccatatggggaaaacagcccattccacgttccgtctaggcagagaagtctcgctagacaagcttccaagcattccgcttgaaagcttctttgcccgacggatacgtgaggcccaactcatcatcattgatgagatcaccatgctgcacaacacggtgatagaggtcatcgaccgagtgtgcaaagaaatggcaattccccagcacaaggacctcctcttcggaggaaaaacggtcatattcagcggtgactttaaacagtcactgccggtcgtgcctcacgaaggcctaactgcacaagttacggcctgctttcaaaccaatccactgtttggtcagtttaccacaatgaaattgaccatcaaccagaggttgggccaagggcagcaagcgtacttgcaaatgtgccgccaaatcggcctcggagagaccggagaacacttctggattcctccgcagttcctcgtaaagagcagggaagagttgatagactttgtctatccaaacttccaacaactccttggcaatgacaaagagctgctcaatcgtttgattctcgctccgcacattgacacgtgtgatgagatcaacgaaatcatgatggcgaatgtgcctggtcaagtgcgcgaatatttgtcctcggataagccgcttgacgagcgtccactggacatcgatgaaatcgagtccgaagtggcagcgttgaaccggcgcacagactctgggatgcctccccaccgtctgcgactcaaagtcggaagcgtcgttgttctccttatcaacaaaagtgataaagaaggactgatcaacggcacgcgcatcgttcttgaagaacttggtgacgatcgcctggtcggtcgagtaatcaacagcaacgctgttggtggccaagttaagttcttcattgaaagaacacgtaatgtgtatgaagacaaaacgcctggcggcttaaaatatgagcgtttgcagttccccataaaacctgcattcgccatgaccattctcaaaggtcaaggccaaacaatcaacacggtcggaattgaccttgaaagggatgtattttcccatggtcaattatacactgccttttcaagggcaacggacggtaacaacgtccgagtgtacgctcccagaagggagaccgatgcacaaggtcaaaccaaagtgttgaacattgtggccaaaaacatgctcaaattgcaataaggcaaacgagttatagtccagcgtgtgtggcactttactgatgtcgccccgttctcatctgcactttaaacgcatacacatacaaaaagtgctgccacctggactaagggagggaggagggatgacgtgcgagttagggcacttccggtttccattgcactgataaatgcaatgtgtcagctcatcacgtgagtgaaaccaagtgcatgtcggctgacgcaaagaccctaacacaaggcctaggtagcgaagctcccaaagcgcgaagcgctttaagcacccaagaaacatgtaagcacacaccggctagttactatatatgttatattgacaaggagtttcgttgctaaaaccattttctcccggccgaaggccgggagcgccctgaaagtagtggaagggccttacaactttttgaggcgcatccgggaaaactatagagaaaaattctgcgcggacgactgagtcccagggacggatttctcaatttttcgtgcgtttgacggcccataactttttttctgaaactcggatcaaaaaattcccgctgtgagggcactccgcagaagtgtcctctataatccagtattttttattttttgatcagaccaaatcccggacctgtacagacacggagactcagttaatttttttttcccacttcagtaccaggcgaatagctcgtaagggtttg

SEQ ID NO: 21462 - DNA, 105 bp, Heterodera glycines
tataataacgctgcggacatctacatttttgaattgaaacatattggtaattactctttctttttctccatattgaccatcatactcatactccccccacccttt

SEQ ID NO: 21463 - DNA, 1080 bp, Heterodera glycines
  unsure (1)..(1080): unsure at all n locations
aaaaatgcattatttataatagcaaaaatgagcgcatttaatccgtttaaaatgttaatacttntcatgaaaaatatttttgacgtgtatttggctctgttcagtttatgagtctaatcagtgaccatcctcacttttttagaccataacatttttggtacttgctcaatccatacattcttaatatgaatcgaaagcttaaagtttagagaagcttttgtatagtaaaattctgggataaaggcaaaaaaaatcattcttgaatatacgcgaaaaatgataaacttctgttacgattttttttcttaatataaatatttgttcttttcttgtatttataaattctcggaactttaagcttttgattgaaaccaagaaaattttgtgttgacgaaaaaaagaaaaatgtttatgcttttatgaccatttttgacaaaaaacttcaaattattattttttttaattcaggaagaaaagtttttggaagcaattcgccatgaaaaactcccactaaaaaattttgaggttcttcttagtcaagaaaatttttctgaatgggaatttaaacatcggatggattttttcatcacaaatacgcaaccttttctcgatttcccaattgttgagcaggaaattgcaaaagaacattcaattaatcataaaaatcgtgttatttttattggcggaatcacaatgccaaagggggcagtgccatatttgagtgaggtaattttgcaaatactgaaacaaaattggaataacccaagaattcataaaaaaaaaattaaaagataattggtcttgaaatggcgaaaatggtacctaaattaattgctaaatacattcgaaaattccaaaaaaaaacaaaattgggaaaaagaggaagaaaacaaaattccgaaaatgtctctgatagaatcgttaaaaaagttcaagctccggcgaaagtttttgaatggtctcgagtttttcatatgcaaattacttgctcaaaaatagatgtgaaaactccgtaaaaaaattttttaataatattttttcgagcgattggatggaaattatttacagaaattatccaaa

SEQ ID NO: 21464 - DNA, 1080 bp, Heterodera glycines
attcaattgatatggctaaagaatttttgacgccatttcgccaactacgaaaagctcttgagaaagaaaattagaaaaaatttattcaaaaccactatatatcttagattgttcgcctagcttatccattatgctgtaaattggccttcattattgagtttcaaaaaagttatggataaattattgtcgaaattttttggttatattattaaaattttactagattttttaaaagtaataaatattagaggacacttagagatacttttctaaaaacccaagatttgatatttgacgaaatttaagctaagttatgatttattatttagcaaataaaattaaaattaaaatttctcactttattatcattaataagttagattataactttctggttttcatctttggtttaacttctcttctcttcaatcaaaattaaattttccaaattttacaataaattttcctcccttcttcaaaccaaacataacattcattatgaatgttttttgcacaaaatgttttagcaataattaaccaaaattacaaaattcaattgcgtgcctccatataaaattcattaatattactaataaaattcattaatattacttaattgtgatttgtaaattttttgatatttttaaatgtttattcaattatttcactttacataaaaaaaattaatattttagtcaattttttaattaagccagctgtgtaaaaaaacggcaatttaagcattaaaaaaaaattgaaaatggcaatggcaataacaaattcagaatttttcttttcaattaattcacgaattttcattcattcatcagattagagagtttaattctttttcgcatattagcccattgtttgtgcatttttgccctaattgtgcacgttcgcccatccaattctatttttgttttgatgaaaatcccataacatttctcattggtaaataggcaaatattatgaaaaacaacaattaaattaccaaaaataacatatactatttaatcaaatatttatttaataacatttaaatcccttctccaacccttgtgtaaataaattgtgtgt

SEQ ID NO: 21465 - DNA, 978 bp, Heterodera glycines
ggcccacaccagggctgggacgcgaccgcgatccgcgatgcgcgatccgcgattcgcggcgttttttttgcgcgatccgcgatccgcgaccgcggcaatttgaatccgcgatgcgcgatccgcgaccgcgggatttttctgtgcgcggcgcgccgcgcatttttcagggcaaaatttttataaagaaaatttattgaagcgattttcttttttgaatatttagatttgaaggtataaaattttgaaaacgaccaaaattccaattttctcgcgcatttaaatggaatatgcaatcagaaaatatttatacattcatcgttcattttatagacaattttcctctttgtaatttagaccaaatgaccaacgaaaaagactctatttggttttattttgacaaaattcacaattcttcttatgccaaatgtaagattgagcttaataatcgcaaaaaccaacctttttttgttgaaaatctgttaacaaattgcacccaaatttttaaaatttcccccgccggcgcctatcggcaccgccggaccccttctttcccaaaagttttttgaaaaagcgctccgaaaaaaagtgatgtgaaaatcaaatctgaatttctattaatattcgatgatttagtccaaaaatgattgtttgaaataattgaagaaaatttgtttgaaaattttcattaatttaatttattaaataaaaaaccaaataattttgtattattttcacttgatataaattaaaatttgaattttttttaaatttttaaaatttttttgaatttttaaaatttcccgattcccggtttttcttgcggtcccggtcccggtcccgaaaaaaaatcgaggtcccgaagccggcttctcacgtcccggcaagtcccggtcccccgaaagggaaaaatttcccggtcccgtggcaccctccttttttggttgcaggattttttttggaatggcctcccaaaaagtc

SEQ ID NO: 21466 - DNA, 3090 bp, Heterodera glycines
aattttctttttttcttttttagaattcatatgattactattttatatatatattattttattttttaaattgttaatttaaataaattgaaaatatattttataatacattttatttttaaacttttgatgacttttgctattaaataattgattttaaaattaaaaataaataaataaataatttttaatttttaatttttcaaaataaaaaaaacattgccatcgcggcacagatgcgcatcagtgccatccatgaagcaattcgggacgacgatcagatgacgctgaagcagctggtggacgattgggacacggccacgggacgggaccaacacgggcggacaccgctgcacatcgccgtgggcatgagggagcgggggcgggagagggctttcggacaatccgtcattggacaatcggtcatgggacaatccgtcattggacaatcggtcatgggacaatgcgtcagtagagactatccgtcagcgacaattattaaaatcttgcgattgcgattattcaatttaatttttaaaaaattggatttcaatttaaattaattttgacattatttatataaaagcttaccttataaatacagattgtccactgacgaattgtccgggagccaggggaagcgcgacgagagtctcgactcggtccctacgattcgagaatttttcgggaatttttttatcttggtctcgggttttcggggcaaatttacattgtctcaattcttggtaaaattcatttcctgcacctttctaaggagggggaggcggtgccgttatggggaaaatgccgtggagacggcgcatggactacgaggactctgattttgatgaaatgccctccaaataatccaaaaatcaaaaacatatgaaatattaaatcccataaaataaaaaaaagaaaagaaaaaacaattaaattttaaaattttaattttttcaatttaaaatattctgccggatcctgtaatattgactccgaaaatggttaattttcataattttgttaatgatacgtgctgtgccaatgaataaattggcatgggatgagcgattaaattaacacacaaagaaaatcacttttcaatttcaattaaggtgttgcacggacgggcacgtgcggcgcgttatttgctgctgatgttcccgcgttgtgtcaatttgacggacaaggcaattaaattaattggaaatagccaaattaattaaggatgaaagaatttttatactagaataaaaaaataaattgttattaaattgctaattaataaaattattctaatcaaataaaatttttattgcatatatttcattattctaggataaaattcaactttcttaatatgtattaatccaatcatatttatattcatattaatttagatttaaattttaattttaatttaatactttaaagcaattatctttgactctttaaatatttaattaacttattactcatcttaatgctcccgactttttttttacaatggcattttctgccggttgctatggcaaaatgcaatcattcaaattcatatgaagaattgagctgttcttccattttttctcatctacatatttacacaaaatcaagagccattttaattaattaaattaaattttatttttattaaattttaattattttaggcctcccgttctccgcttcattacgccaggcattcattcattttttcaaattttctttatttttcgtgtccagttgtcttacggacgatcagcaacgtgcgcaaatgacgcgcattttgtgccgtgccggcgctgagtcggcggcgacggcgacaaaacggcacaatgaaaacgccgcaggggtaaaaaaatggctttcctaaaattggggcacactgaaattgcttaattaccacacacacacacacattaataatggattatgaatttctcattccattctctcccatcagagaatcggatcctgcttttctgaggcccttctaacaaattcccgatctcgaaccaatgtcgagcatcttgaaaatccgagatttcaattcatccgattcaatgttcaaaatgtaattcgcttaaagtctcaaaataaattttctggcggttggaatttcaaaatttggtggcttttttcggcaccaaggctggacgaatcaaacgaaaaaaagcctaaactttcgaacccaaaacgccctgcctgattggcactctcgggctcccagttttttcctaatttaaaaatgatatcacttatatatcatataggacgaacatgcaacgaaaaaggtaaaaaaaaattttttcaattaatttaatcccaaaaatgtgtccccccccccccccccattagcactaatggcttttggtcagaggcgttaaatcccccccccccccccaaagtgctaatgcctaaagcattcataaattatcggaaaaggaggcaatttttgaagagagtttattaagaaaatcgagagggaaaaatgaaaataaaaaaaaatcctttttaaatttgtcatacaatttaaatgcagctattaattaaggtttttgaacattcttcagttttacaaattcacaaaattatttaaaaatatcatttcggaaaaaataacaatatttaaattaatattgaatttttatttcctgaattttatgatttgactggagcaattataaaagcaaaaaaaaaattaaaaaattaattttataattaaaaaaaaaataaatttagcgtcacactgaagaagccgatgacatgttggtgttgaacgaacttcatcgacgcgacggactgatcggagaagaagcggaggaggaagaggatgaagacgatggaggaggaggagacgttgatcagtctgcggatgagatcgaatttgggcatgttgcggcacggagattagcggcgaaagcgaaaaacgcggcaatgatcaaagggtgggtgtgggctattcggctgatcgatatttattgattgattggttgagtgatcggtcaagctaatgattggttgattaattgactggttgatatctgttcacattcgctggatgatgagctgatcacgatttatccaaat

SEQ ID NO: 21467 - DNA, 1723 bp, Heterodera glycines
tttttcagtcccgacaatccgccgggtggcgtaactgtcgcgccgtccccccaaacaatgggcaaaggtcggccaccggcagcttgccgggacagaaaacacttttgcgccacttgggccaagtccggcttttgccgtggcattttcctctcctacatgaagaagaattgcagtgcctcctgtggatggtgctgacagaaataacaaaacaactcattaaatggcctctttcttatttattgcaaattttattatttatttttgataaataaaagttgaatgagagtgaatatgtatatatataaaaaaagccaacataatttacaatatacagagtaaattgacttgaggtttgaactggcacataatgatcaataaaaaggaatgaaagaccaatgatcaaaaagaaacggtcgaagaagggaaaagagacaaaaatgatcgaatgagtcaaatacccccgatcgatccctctcctcgaccatccattagcatttctgcccgctcttaatttgggttcctccgccggcggtgccttcgtcgcatttgtccatcgcccgttgatgaacccgttggtacataatcggcttgtcgtcctctctgcagcccaggccgaccatcagcaaaatgcaaaagctgttgttgcacatgccgctcgtcaaagagcgaaaggcgtcgtccaattcgcacttatccatccccgcagggcaatgcaaatcaatgagggcaacttcgaattccatcagtgttggggccaaatgggcacacagcgaactgagctttactgcaccgtccacatctttgagcacgcaactgatcaaatggaacaaaaaagcattggtcgaagcaaagagttggaaaaacaaaacactacttttcatttttttgaaagaatttgtccatttttcttccgaccaccagcatctttttgcctttccgtcccccgtgcaccgacttgaagcaatcgctcaatgtgctcgttttttgcattgcgttgtcaattcggacagcctcgcttcaaagcatggaattatttatttagatatatattcgaatttaattacttgaaatcaaaaaacgctgctattgttgcttcttcgtctgctgttgtgctgccctgcactctctgtctttgtgtgcttctccctgctgcctctgtttcaaccggtggcacactcttttcttttccctctctctcatcacaatttacaacttcactttcgcttatttcaactgtcttttcctctatggttagactcacaagttccttctctttctctgctgtgtcgtctgtcagttgactctcttcgtctccccttttctttcccttcccttcactctctgtttcttcattgccatcacttcctttttcctctggcttctcttcctccagtctcttctcttccgccctctctttttcactgtcttcctcaactgtttccatgtcgaccaaatctaatcggaaaatctcatcaaaattaatattgctaaaatttcaaactcggattctgctcctcttcttttgtctcgatagtctgctcctttttctcaagccttgtcccgtgtatggtcattccgttgtctgccgcccattttgcaaaattccagccgagtgccacattcccaaacaccaacctgaaaagaaagggcgaataaattaaacaataaataatggcgatgtttttaatttatagtaatgaatcaaggaattttaaaatgccaa

SEQ ID NO: 21468 - DNA, 1502 bp, Heterodera glycines
tttctttgagttttttaattgtttcccatttcgcactcatgtgatttctgaaagaggagagtgggaagagagaagacaccataaggaatttcaggaagatagacagtcgattttcattgaaaatccacacaataaaaggaatgtagcgagtagcgtgcgagaagatgggtttaaaaagatatgtgaggagttcgaaaagacagctaatgaattcggcctaccattaatcaaggaagtaaatgtccttgaagaattaggaattgatctggaaagggaatgggtagagaaaacggcagtctcatctgttgagaaaagtgaattgttagaacgagctaaccaaagtcgagaggctgaagagctcagtgacgaaatggtcaaattgaaggtcatcttaaatgaacccgtgtctcaacacgaacaaggtaagagaattgagaaacctggttctaaacaccaccaacgcatattttggaaccaaaaattgtctcaacaattttttatagttctaattctgtccatgataagtgcaacaatttcaaatccaatgctttgtcatcatagggcacagaaaaattatgatgtcagaatagatagagacacaacccaatgcaaactaattgccaatttgtttgacgaaccccaacgggaattggaagttgacatctatcaacccaattcagaaccgttcacgtttaaggcacatcggtgtctaaaggtcaaacaaagtcaaaaattttggaccaatttactaaacgataagttcagtgacccggttagtgtttccaccctcccaacgacaattgaagattgtcaagaaatgatcaattatgaaaagtgtgaattcggacctctcagtggtcagtcaaatgaacaatttcatacaaaccaagaattgcatatagactattcctggtggaaattcggaaaagacaaatccgaggtaaataactgttatcatgcgattataaccttactaggaaaaccgggatccgagagtttgggctcacccacagaggaagtgagcaaatgcaaattttcaaagggttcatgtcgattaggagataatgcgattctaatttggaacctcgattccactgagcatcaaagagcgtgtctttacaataaagtaaccacagaaaatgggaaattcaccaagagaatgtggatatcaaaaaattcacagttcgctctatcattccaagaaaatgctaagagtgtggaatcatgcggtcacacgcttaaattaagcgatcaaggttttgcagtcccctcgtggcaatttaggataattacgggtaagacaacccataggatcaaaagagaacaatggtggccaagggaaaaacctttagaccagaacgagaaagctcaacagcagctgcacaattgacggcaagagctatttaccaaaataaagaaacgaaaggaatatttcaaaaatggtgaatctgatttgtgggtatttgcaaaatgccaatcaaagcaagatctcagtcacttaa

SEQ ID NO: 21469 - DNA, 2009 bp, Heterodera glycines
gggggattgtattggattgtattgcattggattggatggattgagttaggttgggttgggttggattccgctgccgacccggaggattggatttgtgcaccttcgggataaattgggcgcaggagacggacggcgttggatcgtcgtccattcttttctcccccccccctttccttttcttccattctctcctaattcggtcgcttctgccaatttttcatcggcacgtttaaaattcagccaactcatcagcatttttcattttgcttcttctgctgccgtttctgagttttgttctgctgcttctgcttaattctttcagccagaaataaatgagtctgtccattagaagcagaagcatttccctccccctcctccctcttcccgtccctcctctcctcctttctctctccctcgtgctcttccgtcgctgctccttttcctcttctctctcttcttcttcctcctccgttctcttctgtcgctactcctcttccctctcttcctcttcctcctcctttcttttccttcgcctgctccttcttcccctcctcctctgccttcttccgacttccttttgctcttccttcggctcgaccaccgcccaatgccccgacggccatttcctctcgcgcttcagctccgcctttgacggaaatgaacgcttttacaagttcagctgcgccaaattccacgggggatggacggcggcgattttagaggaaaaatgcgaagcgacggaaatgacgcggatggacgacgggggcgacgcgtatttgagctgcggaagcgaaaaggtagggtaggaattgaactgtaacagtacgcctggctgatctgaaaatatgggtgatcacagaaacaaaacgaaattaaatcatcgaataatcttttggttttctcttttaaatcgatttaatctaatttatttttaaataatttcttaattgtccccttttagtacaccgccggtgtccgcgtggtcgaaggtgcattgtccgtcggtgaccaccaccagcagacagctgaatggtggcaacttttgtgctgccaaagtgactctgttcgcgttcgagcggaggactgtgtggagacgaagttcatcaacgactttcggcgttcctcctcgttcagttcgggcgctcaagtgatccgcagatggcaggcgatgttcgaaaacgggtggcgaaaagcaaaattaattaattaatgaattaatcactcatttgggaatccgctttttctgaagggaccgtcggtggtggcttcaaatttgcccggtggacgtggcgttgcccctcaaaaaacataaaattcgctcggatggggcggaaatgcgcgcgcgcagagaaattccgttggaatggcgacggactcgctttccgaccacgtccattcaggtgaccgttttggcattggcactatgccaccaattcggctcgccatgcattttgttttgatcatttagcatttccatcactacactttcgctgacgaaaatatggcggcggactttcgccgacggcgtgcagaaattgcaaatgcaaaagtgaattcatatgcggtgccaacagttaacgtggaagaaaatggaaaacggcaaattatgacaacaacaattgggaaaaagtcggaaaatacgactacggcacgacggaacagcacatcaacggaacatcaaccacaaaaagttaacggataggagaagacgagggggggggggggatttaggagaaaggacaattgggacaaattttggggtggacaaatggacaaatatgggcgtggacaaatggacaatcgggagagaggacaaatggacaattaggagagtggacaaatggacaattgggggagtggacaaatggacaattgggggagtggacaaatggacaattgggggagtggacaattgggacaaattttggggtggacaaatggacaaatatgggcgtggacaaatgtacaatcgggagagaggacaaatggacaattgggggagtggacaa

SEQ ID NO: 21470 - DNA, 1149 bp, Heterodera glycines
atatattttcaagtgggagaaggaaaggattgctgaacttttaaaaaaacaaaagcagttgaagatgaacagccaagttacggtttgaattaaaaaaattaaattaattttattaaaaaatggattttaatagaaaggctctggagattttgttaaaaatccaccggcgacgggaagtccaataaaaaaagttgtaagtaaatttaaacttggcatttttatggtttcgaattttttattattaaatattcctctaattatgcttatatcattttttctaattatcaaaaggatgtaaatgacgtttttctgcgctgttgcagagcgaaaagagttccaaaaagttgtgaaagccgatgtgtgggttgaaaataaaattttatttttttttcaatccgatttagaattttgatggattaaacaagaaagttttgactggaatgtttttgggaagagataaatgtccgacggaaaatggtagaaataatctgtaaaatgaaaattaattcaaatgatagaaaattttattctaaaaaaaaaaaattaatttttaaaaggatgatttttttattacattattatcatagggtttataaattgtatgattttgcattttttttcggagcataagctatgaagaaaggggttcaaaaatggggaccggtaaattggacaccaagcggaaaactggacaccgccggaattttggacaccaaaggaaaattggacaccggaaaactggacaccatcctaaaataaacccaggaattgagttgaaaaataaatttgggtagggtaaatggattaataattaaggcacttagaagtagatcaggcattcaacatgcaagatgattgatcaatgtgccaaaaaaatgcaagaaaaagggcaatgattggtcaatgtgctaaaattgcataaaatatgggaatcctatccaaaaaaacttttttctttatggatgttatggttgttttcttttgctgaagttttatgtaataaaaacattatttatttccgttttattacgcttataaaaacataagtatgtgcagactaaaataaaatcttttggccaaaccaaaattttgttttatttatttatttttatacgatagtgtccacttttcggtgtccaatttaccggg

SEQ ID NO: 21471 - DNA, 2395 bp, Heterodera glycines
atttttgatatatttttggaaaaaaatcgatttttagggatacatttcaaaataattttttttaattttttacaaaaaatttctataattctcaaaaatcctcaaaatatgtaaaaaaaatgaaaaatatgtacgaaaaattgcgaaatatgtacaaaaaagtccaaaatataaatatgtacatatttaatatgtagaaaaatccgaaaatatgtaaataaataacttttgttcgcaaacacaaaaaagaaagtgtttttcctactaattaaggctatagagaatccaggaaaaaaaacatgtatttacataaaattagcagccctagccatcaaaaaccaacttattatcgataataatgaatatttcacgtctcaaaatgataatttcagtgcactagatataaaatttctgaagtggaaaacttgtttaatggctttcacaattttaacacaaattattaatattttggcccatcaattaagttaatttaatcactcaaaaatggacatgataattaattatttgtgagatcgcgtcttgtgctgttgcggttgcttttcgccgcttcctcctttgccgttttcatctcgcggctcgcctctgccccggcaattggccaccagtttctggaactcctcctccaatgtccgtcgtgcgctgtcactgtccggaatttgtaaaatgtgtgccattgcgggcacatcaaatgttccgtcgagggccttaaagtttcatgaaatccggataattttccctttgctaccattagtgcgccatggacgcccgagtcgacggcatttacaacaaatgcgccaaggccaatctcttccagccatttaatgacccgctcatttgaccagaccattagatctaattgcaaatcgccaattattaattgcatttcattgaattccctctttttcacctctgttgacgttttccgatgcgtttcgccgttcttccaattgcttccgatcataattcaatttcttcaggcacacaatgccgtagtgtaagcttgtccttgaaagaaccatcaaaataagccaatcaaaataatgaaaagccgaggataatattttttgactttttcattcaaattcttttcccaccggtgaaaactgtcgatcattttcattttgctgagatctcttttgctcaaatgttccaacattcgcgcatcaaccttgaaacggaaaaattgatagtaaaaaacaacaacaaaaaaacgattgaaaaagatgtcgtccccgggggatttgagtaccctaattttacatgaccgggtccgatttgggcttctgagtcccatacaaacgcgaccctcaccagacactccatgaactcggtacggtatttgccaagaccaagtgaaggcaaccattcgttgccaacccattcgtggttcatttcgccgaatgccatgccaaagcgcagaatttgcggggacgagggcgaggttaaagcaaccttttttgaaaattggaacgaattaggcaatagttacaaaaaaaaaatacaattaccatttcctggatggccaagcgcaattttaaactgaaatatgaaaaaagttacattttttgtcgggggagggaatggatgatgtgggaaaacatagggaaaacataccttgcgcacccccccccccccccccccccggttacgctcccgtgagataattttatgaccacccaccgatgcagcggatttgatacaccgatttcgcgttgaatctcttggtcagaaagtgcagacattatcgaaccactgttgtggacataattaaatggtaattaataagatttgtcaaaattaaaaaaggagttttaccttttgacattggccctaaaattaaatagtcatttacattacttttgttctctaaactctgtcaaatgcacctgcacgcctcggtgtaccaacttggcattccgacccaaagctcgagccatgccaccactgtaggcccattccacagcgcaaacggagtacgggccttcatagcctgaaaaaaattgtaaagaattctaaatgtgccaatttgttgactaattatatgcgattaaaataataatgctcgagatgtggttatatggattctcagaaatcagagattgaaattaaataaaaataaagaaatataattagtttattcaatgtttcttttttctcgagtctcgactcgaggaaaaccttacttcctcgagcagttcatgctttttcctcttccgcttgtcataatcggacagtgatgtcagtcgatgcatcgattggctcattttggcgcctccatttggcattctgtcgctgcttccgcccgccatgccattgaattccgtgccgccgccacattccgagtcggacaacgacacattctctcctccgtttg

SEQ ID NO: 21472 - DNA, 2867 bp, Heterodera glycines
aaataaaggcaaaatgccaacggacgagaatggggaagcgaagagcagcaatgagggggagggggagcaattggcacaacgacagcagcaacagaataatgggtgagcaggggaaaatgggggcggcgggaggagggggatcccgaccacgggatgaatgacgcaattcattagaagtgttcatttaaatttaaaccactttcctaccgtattcccaataccataatccttttaccgactgtctgctgatactgtgtcatctcgtcctttctcttttttcttcgctttggtcaatccgttcaaaatttgagtgtctctttttcattttgtttcttttttgtaatatttttaagaattcatttgctttatccccgcagtgaaaggcttaacgcaaacaaaaacggatcgccggtctgatgcgctgccaaaagtgtccctttgacattcacttacgcattttcacacttttaattatgcttttcgtttcattggctaattaattattccattaatggcaattggataaattgagcttggccttctccgccatttcattggttttttttgcgttttttcatttctaagagacgaaggagtgattttgctaatcagcacaatgtgccaaccattgctcacttctccattctgaagaaatgttaaaaattaaagagaaatgcccaaaaatcagtttttctccactcatcaataaatctgtcgagaattactactacaattaagcaatcttcatgctgtcttttatcagtcgttctgttcgtgtccccatttggggcattccctccccctccttttcttccctttccccccttatcaccgctccgttcgtctcgtctccccccccccctttccattcatagttctgcaaattcatttcattggaccatttttttttgcctggatccaacattaaaaacaatggcaaatcgaagtttgtccgcgtccattgagccattggtgctaaaatcagcggacactgacaatgaaagcgtattggaagcaattgaaaacggcactcgatgtcaaaggtcagttgtgattttggcattttaatttggcactttctaaagcattcggaatgccaatgccaaggcactcttcgcttttctgctttctcttgtgctactttccctcggcggtgttctgctcattttgttagcccacgccccaaatcagaactaattggtaatttctatcaattttagtctcctcccttctctcatcaatttgctaattcaattctgccaatttaaacagcaaattaattatccaattagcgaattaattaatgagacgaaaattcgccaacaattcgaagaatttgaacaaaagtaataattagcagaaaaccaaagttaaaatgaaaatgaaaagttaagctttgcaagaaaatggaagagcgaaagtgagcgaagggcgaagatgggaatttttggacgaaatttgcgtcaaattgagcagcttaacgtaaaggcaaaggaacgtgggcaaaatgttacgtatggggtgaacggattgacagacattggggagaaggaatggcaaaaagtaattaggggaggtgcggttagcatgccaaaacaaacattaattatgaattgatagagcaattaatgaaacgaagggagggggaactcatttggaagctaattatctcatcaccaaacaaagacgctttgtccgcttggtcccgctgaaagagccgaattcatccgaaaaatggaacccgccttgaaaaggactttcaaaaaaggcatcgattacccaacgcacttcgactggcgcgagaggggcgtcgttacgccggtgaaagcgcaaggtaaaaaaggagcagaaagaaattgggatgaacagctgccaattcgcaaaaaatatgccccgaaggtttgtgcggctcgtgctgggcatttgcgtcggtggcaaccacagaatcggcctacgcaattgcgcacggggagttgcgcagtttgtctgagcaggagttgctcgactgcaacttggcgaacaacgcatgcaaagggggcaacgtggacaaagcgttcaggtcgggttggacaaacaatactctttggaaaagcaaaaaagcacaggttcatccacgacatcggattggaaacggaggatgaatatccgtacttggcacaccgacagaatgtgtgcatgatgcacgaggggaaccgaaacttgaccaaaattgatgtggccgtgttcatcaaccccgacgagcagtcgatgatcgactggcttattaatttcggaccgataaacgtgggtctgtgtgaattagcaatgtcagttcaaaaagcaattccaattatccccttcaggaatttcggttcctcccgacatgaaaccgtacaaatcgggcatttaccatccgtccgatttcgactgccaatttaaagttcgtcactctgatgaaacttttagttttattttcatatttattaggtggttggcctccattcgatgcttgtagtgggctatggagaaaatatttatggagacaaatattggatagtaaagaacagctggggacaaaaatgggggcaggagcacggatatctgaactttgccagaggggtcaatgcgtgcggaattgaggacgaaccaatcggactgatggcgtaaaggaacggacggaccaaaacatttgaattgaagagaacagaaaacgaacaaacaaaaattgaagagaacagaaaacgaacaaacaaagttaatgacaaaatttatttttgtattgaaattttaaatacgaaaatggaaattaattggttctattgtattacacgtccaatcgatgacctatgtagtttcttaggccataacttttttcttactttgtcaat

SEQ ID NO: 21473 - DNA, 2380 bp, Heterodera glycines
tttttaatgacattaatgagccttcaagaaattttatattaaattctttagcacattttaccgtgatagggggatgttctttagcaaattgccttctcaaagccaaatgaaaggcttcttgtgcattgttagtacgtgccaaatttgcaatgattgaatcgtgatgattccatgaagttggcacaaacaatggatctgccccatttggccgaacgacataagttcttaaaggactcattcatttttccaacctaacctagattttatttaatttcctaatatcagtggacctgccaaaatagtcaaagattgaatccgcgttgttttggaattgtaacaggttcattcttgctctcaaaaggttgaaagcaggttgaacctgttcaacccttaaaaatgagagtgcagtaagactgcgaactgcttgcaaaaacgcgtttctggcacctattattgcataaaacaaatacatttgattacattaccaatttcgaaatccaacatgagggtttgtggtgcaatttgaatgtgattgtttaaagcctatttatgagttttttttgcaaaatttgttctacaccaaaacctgaaaagctctgaagtaagtattttgggccttattttgcattaaaatgtaagcgcttgcaaaactagctgtttcaattaaaacatttatggtataaagttgcaatagctgattcggtacaactaaagcagaattttgtattattattcattattgttattattatttttattatttttttgattttatttttttgattttatttttttgattttattcattattgttattattatttttattattattatttttattattattatttttatttttattattcattattgttgttgtgagcaattgccacccaattgctaccctttaccaagccgccaaaacactaaaaactctaaagagtgcgcatattttaacaagcgcgacaatcggtgccctcggtggagcaataactgcacaattaatcgaggacttaatcgagatgctagtcgaaaaatttgaaaataacggtattataatcataaataaacaacattaggttaggtattgtttcagacgacatggatttgattgagccgcttttcccaattcttttcactctcgaaaagaatgaatttttgctagaatccaaagacttcaattattcacattttttttcaatgattgaagacataaccggacggagccatgttaaggaaatttgcttttacagtaagaaattttggaataattaaatttaaataagtaatttagctaaagatggtggggatagaaaaattggacgatcacgaaaagcaatggctatagtgcttatgtatggtttgatgaatggaaaaagtcttgagttatttttatgttcataagttgtatttgtagaagctgttgttgggccttcagcaagccaataaaataaacatattatagctttatcatcctatgctttgcttttttctccttaattgtgctttctatttgttatttattaatttattgctgtgagctttcttatttggtgtgtctacggaagggccgaaacacacttaggatttcaaatttgtaatacggaagggatcgtactgacgaggcccacccttccagttaattttttggcaaaagtatggtccgcaaaagtacggtccgcaattgtcgtccgcaattgtcgtccgcaattgtacggtccgcaattgtcgtccgcaattgtcgtccgcaattgtcgtccgcaattgtacggtccgcaattgtcgtccgcaattgtcgtccgcaattgtcgtccgcaaaagtacggtccgcaattgtcgtccgcaattgtcgtccgcaattgtacggtccgcaattgtcgtccgcaattgtcgtccgcaattgtcgtccgcaattgtacggtccgcaattgtcgtccgcaattgtcgtccgcaattgtcgtccgcaattgtccggtccgcaattgccggtccgcaattgtcgtaccgccgagaattgtgaacctttaatcaaataaataaaatgtataatttttaatttattgtttaatttattaacatataaaataatgacctctgcttcctgctgagttccccttttatagagagatttgatgttttgattaatttccaaattgttttataaaattaaaattattcctaccataaatcttaaattttatttaattatttatttttattttctctcttgccataaatttttctttattcgaatttaaagacgaattgaattattcaataaaaaaatttaatcaattcttttttcttccttttcgaaaaattaagaaaaattatttaaaaattaatataaataaagagataatatgttttaagttaa

SEQ ID NO: 21474 - DNA, 1999 bp, Heterodera glycines
cgaagtgatgcatcctcagatgatctcaatggctgtcagcaacataaggcattgaaattgctctttcgtgatggaatcaaaatcgaagtctttcagcagcttccggtgtaggttaatgaactcgccgaaaatcttcaccattatcggcgagctcgcctcgaggcactcgtatcggtcaatgaacaccgattgaggccttgcaaataatttttccattttcaaaattgtctcgtcataattgaaatcggtgacagcggatgggaggacggagcggctgtattcgcagaatgcggactcgcgcctcgctcaatttgttcacgaggcatttgacttttgttgcgtcaatggcattcggtgccgcgcagtccagtgcgaatttgaagcgggccaaccattccgaaatcctgcttttgtcgtccgttggttcaaatggatgaacatctggtagtgacggaattgtaattgtcggtggagcagcagcaggtgcagcattttgcggtaattgattggccaaaagttgttggaccaattgctgctgctgttgaaggaccgtgatgagctggtccaatgtcggagggttggcgtttgccatttgatatttgacgaattaaaaactgcacatagcagaaccaattccaacacgaggaattaagttttttgatgaatcagcgaagtcagaaatcaacacgagatttctgaacttcccaaaaatgaatttattcaacacgagaataaattccaatggacgcgatgaatttgcgttgaaaattgttcgattgaataaatggtcgaacaagttcgaaataatgacgggcgtcggcagtgttaggaccacaagtccaaacaacaaataaatttattacgcaaataataaattacaaataaatgcaaaaaaacgggggagcggagcagataaaattggggaaaacaaccgaatgaataaagccatgaatgggtaggaataattgggaagggcaaaggtcaatcaataggcatgcgtgtgtctgtctctagcacgaagagagcagacactgcaaaaacagtgatgcaaatgaagaagggaaataaataaatcgggggcaaaatgtgcctgcccgaacacctccccttttaggctgatcagttcatggcccgggtgaaaagcggttcggtttacgacgttggcgttgaggatagcgtcgttgaattgggacgtcctcaattggagcagccaaattgtcctgaatgggttctgccacctcgttttccaattgattgggccctaaattggcattttctgcgtcgggtggttgattgggcagggccggaggcaatggcaacttaaatgcctcatttaatatggccaaggactgatcaaaattgtcggctgtttttctgttgcgcaattgattggcgtgaaaacggccgaatgatccgtcgggaaatttgacttcaaaaatcactccagatgtgccgctgatcactcctgtcttccaatgttgcgaggagcgatggcgagcgaagactttctcattcaaaataaatcttcgatttttggtgccaaatttcttgttgaattgcctttccatctccaaatcaatttcaaatggttagtgtggtggtggccgaagcagatcaattgttgtccttggccttcgaccgagcagcagttcagcggggcacttcaagtccggaagtgaatcgtttggggtcgtccggtaggtgatcagaaaagtgtcgatgatctccttgtttggcttcccttccccttttaattttctgaatgctctcttaaatgtgtcgacaattctctccacttgtccatttgacattggattatatggggccgaaaataagtgtgtgatgccgttggccgcaacgaatttggcaaattccgaactggaaaattgcgtgccagtgtcagaaacaattgtttctgggatgccatggcgcgtaaataaataacgcaatttttcgattgtggccgatgctgttgaatttgtcatctcaaatacctccg

SEQ ID NO: 21475 - DNA, 1334 bp, Heterodera glycines
ttttgaaccttaacgagatttttcgaattttgcaggctaatagagggcacttagggctatcgaatgataccaacagtgttggatttgattgacaaataaaaaaaagttatagctaaaaacgcgggctcgtatgaaaaaatgggtgtcgcgcgcgatacgtctcatcctccgttataacgacgtcaagaacaacattgtccctcaaaaagaccaaaattatttaaatgtcaatgtgaatcccgaaaacgttatcaatttccttgttgatattttccgaaactaagaaatgcgacctttgtttattccagagaattttgttgttttctattaaattatgaatttttataaaattttattttattttttattcattcgacgaacatccgatccatttcaatgcttaacatgcacttacgcgaaaacaccccatgcgaaaatgtcctggcccgaacaaaatgatatataccaagctttttatccaatccccaaaaatcgttgcaaaaatcatgaaaatgcacccccctaaaaaatgaaaaattttctcaaaaattcatctccaaaaatttatttttttaattaattaaaagcaaatttcaatttttgctgctttaaatcttcatttttgataaatattttcttaaatattttgaaaaatcgcgaaataagggcaaaaatagggggcgaaatgtccaatagggataaaacattttaggggcaaagtcaaaatagggatttctagggtcggataggggcgttaaaaccaaaaattcccgaacaaaaaatgtgcttttcgtgcatttctggtcgagtttaagccgcagaaataagtaaaaacctaagaatcctaatcctactcatatgtaataagaaatacggcaaaatttaattacatttttagcgttaaaatacattaatcatatgacctaatcaagacaaatgaactgttgttccttcatcctccatgtctctatgaattttatatttttgccaagatttcactggctgttattttgcccacaaattgctaatttggaaacgttgaaaaattaatttgttcatttcataccgtacaacaaatcgattagcaactcattaataaaacagccatgccaaattggtcagactagtgagaaagcattgagttaaattaactaatagcaaaagccaacggcaacattttccaatcgatagcaaatgaccccaaaaaaaaacaatttcacacaataacaaagcacaaaacgcttgtcagtgagtgagtgcttctgctgctgatgaagtgcgactgggcggggggggggacagggacgggggacgattgagaggggggggggggg

SEQ ID NO: 21476 - DNA, 1173 bp, Heterodera glycines
ttttcgacaatcaaaaattgcttttgctgctcacccaatgcaataaatatcccacaacttaaaccggatattgttcaaattggcacccgaataattggcatgccggagcttaaatctgatattcaaattggcacccgaattttagcggtctttccacttaactggcgccgtctccgtctccccaattgggcaccgttttaacagccaattatacaatgatccatcattgtattcttcgctatatttcaatgtcagcttctcattcgtcatttcgttcaccaattcaaattgttcaattgacgttggttccataaaaaaataaagttgaatattgtaactgacagaagtggtggcacggcgaaatgtctaaacaaaattggtaaaacaaaaacaatttaacaaaaatatggcggcacacctctttgaagttgttgacccattccagtttcagtggacccacataaccattgcgatacaatcgcttcggttggccattttttgttggagtgtgcaaccatttggccaacgcttggccagcagttgcatttggcccatcgtcagcaattccatcggggaacagataaccagaatcgatcgaattcaattgaacaagatcagcgagaattgttgatgaaatgcggcgacgcaatttgtccaaatcagcgccacaaaagccaaaatggcgaatgttggtagcaaaaattggccaaatttgatggtcaaaaacatcccaaattgactggtgacaatattttgacaattccaaattggtgctaattctgtcccaaatttgcttgttggaatagagaaattcaatgacggaatggtcaatgtaactgaagaaatataaaaaatgctttaatatatacaaaagtataaaattgctttatctgaagcttcttaaagcgaattttgatgggcagcggacggtccggcaacggaaaatccacaaatttgccatccatccatacagacagttctgattttggtcctttgcccttgtgaattagtatccatttccaaagtgtcaattccgttttgccatcaaaatgtttgtccaccagcgcatcaaaacggggcgaaatcagtgccattttgaggccgagttgaggatggtcaaaatgagggaaaatgtccatccacacgtcgttccaaatccagctgaaatgcgaa

SEQ ID NO: 21477 - DNA, 1893 bp, Heterodera glycines
tttacagtaccaactttgcccagttcagtccccgttgaataactcattaggctttgacctgagcgcagggtggccagcagacttattgtagagctcggtgagctcgatttttccaaatttaaaaatttcgaaaattttcaaaatttttcgagctaggcctaaaaaacggtttttgggtttttgaattttaagaatttttaacgaattttcccagaaaaacgaagaccacttgcaaaacatagtttttcgagctctatcgactggtatttttttcagaaaaatttcgattttttcccggaaatagaaaaaaattttggcctgagcgggacatttgagtcccgggcccataactggtcaggggttggttttagcgaaaaattgtcttagaacatttttgtagagaattttaaatgctatcgaatggttactacatgtttggaaattttcaaaaattttcgagctaggccccctagaaattttcaaaaatttttttggggtcgaaaaagggtgtgaaaaatatttttctgggctattttgaggtgctgaatacgaatatgatgtttattttaagtttcggaaattatagaattttttaaaaattctttattttttgggaaatttttggccctcgggattttggcctaatatttgaaaattcataacaaatcgaagggttgatcaattttaaaggaataaagccttaaaaatagagaaaaatcatgagaattttatgcgatttatttggttttataatgttcaaaagaaaaaatgttattccagaatttctggaaaaattcgaattttcagaaaaaattcataactcggttctgaaaagatattctggaaaaataaaatactacaaaaatccacaattttttgctctattttataaattttatttcacatttttatcacttttttgagagatgttacaaaaatttttcagaaaaaaattcgtagctgccttctgaaaagctattcgggaaaagtaaaatactacaaaaatccgcaatttttttctctataatataaattttatttcacatttttatcacttttttgagagatgttacaaaaataaaagtgattttggggttcgggccaaaggggggtgaccaggatttttgagtgaaaaaattttttcgacaaaaatcttccaaaaacatgtcattagggctaattgaggctgctgatcactaatatgacatcagatttcacttctgacatcgttaagacctcagaatccctgtgtgattggggattctgaggcatcattttgaggggggggcggcaggttcgaatccggacggtgtaacattatttttctgtgcattttacgttatttttaatgattttaattaatttaaaatattttggttgtaaattatttaaattaatttttttttaattaaaaattttcattatttattttttgaatttgcaaaaaaattaatttcatttcaaattaaataaatattcaatttaatttcatttcaatctaaataaatttaaattattataagcttcaaagtttttttaataataaaaataggcatttattttacaattttaaaaaattattaaagcatttttgtacctcttctaccatttgttgtacctcttcaaatcgctgttgtttttgggccaaaattcagatttttaaatagggcaagttcgaacccggacggtaacacattatttttatatttatttttggcttattttaaatgtttttaattaaatgaaaaaccttttgtaaattataaattattttttgatgaataaaagtttaatttaaaaattaattactattttttaaataaagaatttcgtgtatttatataaattattttttgatgaatagattttaaaaaacgggtgcgaagcgcccgt

SEQ ID NO: 21478 - DNA, 1224 bp, Heterodera glycines
aaatttaaaaattcttgggaacaataaaaatgggccttgcttttccccccctctgctcatgctgcagagcatttgtttcgatgcaaaatttctctcaaaaaagaggagccacttttctggcctaatctggaaatttaaaattctcggaacaataaaatggccattgctctccgcccctctgctcatgctgcagagcatttgttcgatgcaaaatttctctcaaaaaagaggagccacttttctggcctaatcttgaaatttaaaaattctcggaacaataaaatggccattgctctccgcccctctactcatgctgcagagcatttgttcgatgcaaaatttctttcaaaaaagaggagccacttttctggcctaatcttgaaatttaaaaattctcggaacaataaaatggccattgctctccgcccctctactcatgctgcagagcatttgttcgatgcaaaatttctctcaaaaaagaggagccacttttctggcctaatcttgaaatttaaaaattctcggaacaataaaatggccattgctctccgcccctctactcatgctgcagagcatttgttcgatgcaaaatttctctcaaaaaagaggagccacttttctggcctaatcttgaaatttaaaaattctcggaacaataaaatggccattgctctccgcccctctactcatgctgcagagcatttgttcgatgcaaaatttctctcaaaaaagaggagccacttttctggcctaatcttgaaatttaaaaattctcggaacaataaaatggccattgctctccgcccctctactcatgctgcagagcatttgttcgatgcaaaatttctctcaaaaaagaggagccacttttctggcctaatcttgaaatttaaaaattctcggaacaataaaatggccattgctctccgcccctctactcatgctgcagagcatttgttcgatgcaaaatttctctcaaaaaagaggagccacttttctggcctaatcttgaaatttaaaaattctcggaacaataaaatggccattgctctccgccctctactcatgctgcagagcatttgttcgatgcaaaatttctctcaaaaaagaggagccacttttctggcctaatcgtgaaatttaaaaattctcggaacaataaatggccattgctctccgcccctctactcatgctgcagagcatttgttcgatgcaaaatttct

SEQ ID NO: 21479 - DNA, 976 bp, Heterodera glycines
aaaatgacaaattatagtaaaatgacgatacataatcaaatgttttaattatcgaattgattttctcctccgtttagcccccgttccggtccaaattcggcccgctcgccgtcctccgcgcacggagtccttcaccaatacgctgatcagccgcaacaccaattggactccgcccgttcgttgagcattgaattggcctctgccacccattcgctttcaaacgctgtccaaatggcttccaccgggtcgaccaaaagtcggagttttctttcaatttatgcttcttccttcttactgttgctgtccctcttcagagatggctttgcatgcctcggaatgcattgaggagatgacacgcgcatgtgacaaattgatcggcactcggcaattggtcagtgaaattggctctgattttcgtaagggtttaagcagttgtttgtttacttgcacttttagataaacaacgaccccgacatcagcacggacgaacggcgtcttctgctggagggtgttaaccgtgccatctccgccttccgtcaacggcttcattctgtccttggcaacggtgacgaaggtggcgccgggatggacgactgccaaacatcagcgactgctcacgtgggcaaatgggacggggaagaaagcggtggcctgagggtttgagccaaacgcggaggcgtcgtactgtataatatttggcgggtggacagaacgccaatttttgtgtttgaatctgtgcaactccaccatggttgtgtgtgccctcctctcccctcttattacatttctttgcattgtcatgacgtcgtcgcaactgaaattccaaaccctgtcgcattatgtcactcttttttccttctgttgctcatttttctccccttttgcgcaactgtcacaaattatttttgctcccttccgcagtgaccttcaccaatagctcgatgtgccttatgttttatatttcgctacataatta

SEQ ID NO: 21480 - DNA, 923 bp, Heterodera glycines
cggtgactgaacattttcgcccctacatttgcgccccaaaaatttgcgcccctacgtttgcgcccctacatttgcaccccaaacatttgcgccccgattgcgaaccaacaaatttattcgtgaacttgcttgtctccccggctactgggagtgattttatctaagagtcatcctgcacttcccccttcctcttgtcctccttctcccctgagctcatccctcctcttaaggccgcgagccgcctttgaatatttcaattgtccgctcaccatcgcgttggcgatgaaatcccactaggatccgtgctgtcagtactgctccaatagacgcacagcttcagcgaagctccaatatctgctggtcaggaaatgggaacatatggctgaccatgtccgaaggtgccattccatgctaaattggcaaaacccttggtaagacctcatttcggcctgattgtccaggctcgaagcgcggtagatatggtaacaccgtcggaacacttggcccgcggtacggtcgagcagccgagaacctggggacatttagcgaattgcaaattatcatggcgtcggcttacacatccatggcctgaaaagcgtcgagcgaatgaatcggatccgttctctgtgcgcctctcgcgtttcagtcgccgtcgccgcgctcaccattctgtccataaataaatggatgaaaagcaaatcggatgaaagacaccgtggcgcctcgtcctcctccaactgataggcttccgcgaaggacagccaattctcccctcaattaaccatttaattaatagttgaaatcggtggccaatttcccacttatttgctggtcttcagcgtgagagaaagcgttctgcttcagttcgatgccttaaaatgcaaatattgtaaattctcaaggaagacctcaggcagcaagct

SEQ ID NO: 21481 - DNA, 1300 bp, Heterodera glycines
atttgttagtaattgttatgctttctttttttgacaaaaaaagcgattttagataaatcaatgaagagcgacagatcatcatcgcagcaggagcaaatgcgaaagcgtatgcgtcaaaggaagcagcagtacaacaatgaaaatcaaattggtaaattaaaattgttaaaaacaattgttgaatttctttttaaattttctttgtgcttcttaagacgagaacataacgccccgaaagatgggacctttatgctccgatttcccttcgccttcaaccgcaccaccgcttaaacgacacattgtgcttcataattgtggtcggaaggtgcaaagtgctggtcgaacgacgagacatggggatggagaagctgctggcaacgaaccgagctcgtggctaaatcggaaattctacattgtggtgaacagtaagtgtagcgaatttttcattactctacttggaatttaaaaaatcaaaaaaaggcccatcagaatgaggttttatgcctaataaatttagacgggaaacccatcgaagtgtactgcactgatctgatccaccgggtgaagcagtgcccgcagcgacagaggctgggcgtggaggatgggcaacgatttctgcgagttgtggacaggtggcgggaggagtggaatcacggcgtgcagatgccgttaggcaccggcactgacacctttttggccgagcccaccaatctgtttcccggattggccaggacgaaaaactttcaactgtacaacacatgcattcctttttaagatttaatatgatgtttattcagtccatcgaaattggtcgccatggacacatccgtaaacaaccggtacatcgacgaaaaacactttcactttgccgcgaaaccgcccaccctctattacaacttggacgaggaggatattttatggctgaagaagcgaccaaccgcagttggtgctgacaaatgtaaagggaggacttcctccattgctccgcggacattcgttgatgcgatgaactgtttcgaactgctcacttacaaggtgggagaatacatatattatcgtgattataaggccgccgcccccccccccctccttaaaaaattcaaaaatttgtcgtaaaaacatgttttaaggggttttctgaccgctgatcatgaatttgacatccattattcgggtccgcggttcgaaattgttcaaaacataagtagaggcgtgatcagcggtcccaaaacccccgtaaaaggtttttatggcataaaatttttttaacttttttttcacaaatgcggggggggggggg

SEQ ID NO: 21482 - DNA, 761 bp, Heterodera glycines
ttattcactataaaaggtttccatagcaaaaatatattcttaatgatttttaaaaataatatcgtgtatcagaatgacacaataaatactgcagattaaatgcggtgcctgatgaacatttgatctggttcatattattattaactctatttctcgttacaaagaaatttttaaaaacgaaggaccaggtaaattcaaattttttactcttttctaaaattcacgacaaagccttaaatcattttagaaaattaattgatatggctgaatctgttgtcgaagatagaattaaaaacaaaattatttctatatttttattcactataaaaggtttccatagcaaaaataaattcttaatgatttttaaaaataatatcgtgtatcagaatgacacaataaatactgcagattaaatgcggtgcctgatgaacatttgatctggttcatattattattaactctatttctcgttacaaagtaatttttaaaaacgaaggaccaggtaaattcaaattttttactcttttctaaaattcacgacaaagccttaaatcattttagaaaattaattgatatggctgaatctgttgtcaaagatagaattaaaaacaaaattatttctatatttttattcactataaaaggtttccatagcaaaaataaattctaaatgatttttaaaaatcatatcgtgtatcagaatgacacaataaatactgcagattaaatgcggtgcctgatgaacatttgatctggttcat

SEQ ID NO: 21483 - DNA, 955 bp, Heterodera glycines
atcattcgcgcatcagatttgatttggcactttcccattcacgaactcattgaaatacctaagttaactaattgcttacaattcagagacaaaaaaaataaaataaaaccgctcaatgccggcctcctatttgtccgtgaaagccaaaatctccctggccaagcctcgccgatgtcaagacagtttcaatatggtatttgaaaccattaccgacaatcaaataggacagagcgccatcccttcgacaaacagcaatgcgctccatttgcacacgaaacgccaaaatttccgccggcaagccattttcttcataaaccttggccgcgaactgctgttttctacggcttgtgccgggctagcactcctccaccgcttgctgggcctctcctgcaccagtagttctgtcttgctggggcctgctacagctgctcattcagaaaagggatgcccaaacctcccgaatcccagactgccgaccattttttgtcgtcgagcaaatacgacagcaattcggcgtagaatttggccgccagccaaaattcgtaagttccaagcatagttccaaatttttaaattacccattacaccgtccccatacccaaattccatcaaattacacaattgaaaaatagtcatttatttataaatgttaaaaaaaaaaaattaaaaaaccatcaaatacaaatgtattttttcgctcttccatttttctggtctcgttttttttcttccttttttctcgtcttcgccgtgtccgccattcaatttgattcatcaaaattgtcgacgcgccattcaccggaaatgacataaaatgataatgaaatattagcaaattaaaaaaaaataataatttttttgaactgcttgaactctatatacagctcggaccagatgccttgctgaaaaccatgttactattttgtccttaccataccaatttttaaatctaaaa

SEQ ID NO: 21484 - DNA, 997 bp, Heterodera glycines
atttcaaaaaaataaaacaaaataaatatataaaaagtttataaataattaaaatttaggtagattttaacaacccttgtgctcaaaaatttctatattattgaaaattaaaaaattaatgtatggaaacctgacattcttattatttagtcaattcttatagctgtttaaacgtagaattaaagtgtactatttctgtatggacttagacctgaataccggcttagttgggcccgaaataacaagagacccgtctaattctatttaaactcataaatttttaagtattgaatagaccgagccttgtaatgttataaattctaaataatacatatgtatggcatatatagaatgaatggtaatgagtttagcaaaatagcatgcttaatcgagtggatattcgttaaaaaaactttctattcctaacttgattaaatttactatgcttttaaattagatggttgcaatttagagacaattaaaaatatttttattttttaaatccttaatttggtgcccaaacttcccggtgcccaaatttctggtgcccaaacttcctggtgcccaaacttcccggtgcccaaatttctggtgcccaaacttcctggtgcccaaacttcccggtgcccaaatttctggtgcccaaacttcccggtgcccaaacttccgcccccccccctagccatccctattatatagtattcagtttatataaaaatattaaatttggtggttattttaaaaaatttttagccgatcagcacaaaaggccagcggcttcaatgaacgctaccatctttgtgccggcagccgatcattgggtggacttgaagtgtttttttttttactttaaatcagggacgtaattattatttattaataagtgtgaaaaatattatattttaacaaatcgatataggattactttttctttttctataaatttaactaaaaatatttatcctaattattgaaaaatagcaaaatttaacctaat

SEQ ID NO: 21485 - DNA, 1786 bp, Heterodera glycines
ttaaatctattatattttaaaatctattaaaaagtcagtctccccatacaatattaataaaataaataaataaatattaaaattattgtctgcaaatttataatttataattttagcaatagcaaatgacaaaaatttaattctttctccataattcctcatcaagctaatgtagaatttatttaaaaaatctaaatttattacatcaaaaataaataaataaatattaaaattatttgcattttttaaaatttttagcaaagacaattgataaaaaaacaatttcttctcccaacattcattctgttaattaaaaattcgaaattttaaatatgccgaatttctaaaaacctaatttattacaatattaaaagtaataaaaataaaatattgtctgcaaattaataatttataatttttggcaatgacaaatgacaaaaattaattatttctccaacattccctcatcaggctaattcatatgtgcagaagaattaatgcacgcacatataaattttgtaaatttatttgaataaaaaataatatatataattaattaaaacattgttgcacttagttaaaaagagtgaatttttttaaacataattaagaaatcattaattggttggttaattggcaaaaaaaaaatttcaatttatttttccaaaaattttgccgatgatgtctccctgacgaccataaaattgggggattacaacttatgaaccatgaaaaagtcacggttttagcgaacttttacaaacattttccccattttataatcaatccaattttaattgcaaaatataaaaaaaaattattcaaaaactcataaaatattttaattaaattttccccgcataaatttagccgccaattttggcaccagccaaatttgccatacaactctttttacacttattagcgcggtaattcagcaacacaacaaaacacgggcctgcacacgcggattgcgcagcgcatttggaggcgcgacaacagcagcggaagcggaagcggtggagcaagcggagacggaagcggtcgggagcgttatcctccgccgcaaccgcaccagcggaagagcaacaacaataacaacaccaagaacaactataacgacagcaacaatgttgcgggaagcggaaacggaagcggtggcaaaacatcgacggtagcggcagctgcggcgatggcacatggaggcgacctcaacaatggcacggacagtgaccgtcgaaaagcggtcggtgcttggtagagccaggcccgggacggatccccgcgccggatttttcaggatcctagtccgcaataacgcattttttggaaaatgtgggatttgcgggattaatcccgcgggatcttgttctgcatcagcgggatccgaaaatccttgcatccaaggacaaatgcaactttcaaattttagcaggacaagcgcaagcggagtgcgcacagcacaagtggtggtggcaattgtttgacgcgccggggaaattcagcatggcgcttcatcgcctcaaaatcggtgatcccattgagtcggtgagattttctggaatttttttattactcataaaattttggaaatttgttaaaattccagtacattcatattttacatttaacttttaaaagcataaaaaataatttgtgtgttgtgtttaaatgagtttctaagtccttgttttattttagaaaaatttctgtaatttttttttttttgaaaatttcctcccctacaaaggcattaattaatacccccggcattttttaaaatttt

SEQ ID NO: 21486 - DNA, 1125 bp, Heterodera glycines
tattctcattcacatcggcactaaatttttattacagctcaactaggccatattaagcttatttccagaaaatctcgcatgaattctcattttaaattttttatagatttttaaatgtttggatttttttttggcttaccaaaattcatcgaacctggctctttctattctcattcaaatcgccccaaattttttttacagcttaactaggccatattaagcttatttccagaaaatctcgcatgaattctcatttttaaattttttatagatttttaaatgtttggatttttttttggcttaccaaaacttcatcgaacctggctctttctattctcattcaaatcgccccaaattttttttacagcttaactaggccctattaagcttatttccagaaaatctcgcatgaattctcatttttaaattttttatagatttttaaatgtttggatttttttttggcttaccaaaacttcatcgaacctggctctttctattctcattcaaatcgccccaaattttttttacagcttaactaggccatattaagcttatttccagaaaatctcgcatgaattctcatttttaaattttttataaatttttaaatgtttggatttttttttggcttaccaaaacttcatcgaacctggctctttctattctcattcaaatcgccccaaattttttttacagcttaactaggccctattaagcttatttccagaaaatctcgcatgaattctcatttttaaattttttatagatttttaaatgtttggatttttttttggcttaccaaaacttcatcgaacctggttctttctattctctttcaaatcgccccaaattttttttacagcttaactaggccctattaagcttatttccagaaaatctcgcgatgaattctcatttttaaattttttatagatctttaaatgtttggatttttttttggcttaacaaaacttcatcgaacctggttctttctattctctttcaaatcgccccagaattttttttacagcttaactaggccctattaagcttattccagaaaatctcgcatgaattctctttttaaattttttataaaatttaaatgtttggatttttttt

SEQ ID NO: 21487 - DNA, 1414 bp, Heterodera glycines
  unsure (1)..(1414): unsure at all n locations
cgcgatccgcgattcgcggcgtttttttgcgtgatccgcgaccgcgacaatttgaatccgcgatgcgcgatccgcgaccgtgggattttgttttgcgcggcgcgccgcggattttttgggacaaaatttttaaaagaaaaatttattgaagcgattttcttttttgaatattagattttaaggcataaaattttgtaaacttgactaaaattccaattttctcgcggatttaaaatggaatattcaatcagaaaatatttatacattcatcattcatttttagacaactttcttttgtaatttagagccaaatgaccaatgaaaaagactcaatttggttttattttgataaaattcacaattcttcttatgccaaatgtaaggcatgcaattataaagttgacacagagccgaaaaaacaaacatctgatttgcatcggcatctaaaattgaagtaccctgaatctacaagcaaaaggacgaagctttacgtaaaaagaaggaaaaaattgagaaacacgacaattctcaaccgaattggtatttttgaatgaaaggaagacaaatgaatcaggtcccggggcaagcaaaaaaacaaaattcagcacaacgcccattaagaaggcttttagtaagcaaaaagtttaaaaaaaattttgttcattgatttcggcagaatgggatccatcagctgataggacaaaggacatggaaaaaacaatattgaacaaatgaaggaacaaattcgcgaatggatgagagcggatttacaaaaaatgttttcagagtttttaaacacgacgttggttcgccaatcaagtacatcgagtagttgttccgtggaaaaccctgttttttctggccttttaaaagttttaattttattattttccgtaaagattttaatgattttagtcatccagtgggtcatcaaatctctcaattaccgccgatgatcaatcgaaatcacaaaatgaattttaagatgcgcttcatcaaattgaaaatatttgagagagccgcgagtaaaatacagtgttgatccttttcaatggtggaaaaagaatgaagcggaatttccaagcttgtgacggcttatgaaaaagtatcatagttcgccgccgggaagtgttgagtcggaacgcctgtttagctgtgcaggatttattttgaatgacctccgaaaaagcctctcgcatganaatctcgaaaggcttatttttcttcatcataatattgtcctttacaattttgattattgataatatgggaattttctaattatgcttttacaaatgtgcgatccgcggcattttttgcgcgatccgcggcgttttttgcgcgatccgcgaccgcggcaaattgaatccgtgatccgcgaccgcgggatttttctgtgcgcgccccacccctg

SEQ ID NO: 21488 - DNA, 1889 bp, Heterodera glycines
acggcttgaagaacgatgaagccaagtcggagtcgtaagtcgtatgcaatcagtcgaaaagtcaaagttgaaaaccgatgatttataaaagacaatccgaagaaaaatgaagaacgtttttatttattggagagaagacaaaaaaccaaaaaaaaagcgagagagaagagagatgaataaaaaaaaacaataaaacataatcaaatttgaacacactaattaaccgcgaaatgtaatcgttttaaaattagtcaaattaatgcaattcccggcgcccccacaaagtgtccaagccacgaaatgtccaaaagagtaaaaacccacgaaatgtccaaaatttttcaaaatttataaaaacaaaatgagtctaatttaggatttttagggttttcggggtcgctgaatacgaatataacctttatattacccgttgcctaaccttaggcccatccgaataataaaaaactcaaattcgagacttggacatttcgtggcctggacattttgtgggtcagcgcaattcccagcacgaatttgacttcaaatgacgcttaaacaatttgtaccaacagaacaccgaacggttggtgtaacaatttgcgcttcccccactacggcagttcgttcagtccgctcagacatttgttgccgcccgtttatgacgacggtacatactagggttcagccccgactccgagccccccgacccgagacgttttttggacctattccccgacccgacccccgacatgtgccccccggcggtccccgacccacgactttttgccccccccccgacccccccgacactaattcgggggattggggactccgagcgttgtaaaaatttaaaagttagttcatccacgaagggggaaaatattgaaaatttttgagtttttgaacaattttcttaataaattcattaaaaattccgaaaaacttttcggcggcgcctatcggcacctcctgccaccaaaaagtattaatttttcttaataaattattccaaaatcgcaaaaattggtcctttttggacaaaatcttttaacaaatgtcactcaaattttcaaaatttttcccgacggcgcctagcggcaccgccggacccatttgttcctccaaaagttttttggaaaaagcacgccgcaaaaaaaaaaaaaccagtttttgaaaagcaaaaaaaggtcgtcatattcgacgttcagaccccttcgcaaattagcaaatatttcgatggattcctttctatttatggtaaaagccaacttggacgcactcttgctggcgctagctaacctttgaatttgattaataaagtgaaaaaaataaaatttatgagcatttaaaaagaaaaattggatttttcgttaaaaaatttgttgatcactacccgatcggggtccccgaccaccgacaattgagctccccccccccccgactcgacccccgacatgtgcccccgatggtccccgacccccgaaatttttgccccccgagggctcggggctgaaccctagtacatacgcaaaaggcttacgtttcattattttaattaagtaattaaactttaaacatttttctttttttggttgtaattgttaaaatatttatctttgcgattaattttaatttattcatttgtttatatttaatttaattatttaaaatttttaaaacaatttgccttcatttttcatcttttaaatcctttttaatattctgatttttgatttataaaaggtgtcgacgcgcctcgttctcgtgccaaaagcggtagccttttgccgtccgctcgtctcatctccaatgccatccacctcgatcaggtaatcgctaaaatgatcatcgttttgaatgtgctttaatcactcgaaatgaataaaaag

SEQ ID NO: 21489 - DNA, 1269 bp, Heterodera glycines
taagccggtatttaggtctaagaccaaacagaaatagtgtttgcttaactctacgtttaaacaaccgtaagaattgactaaataataagattgccaggttcccatacataaattttttaattttcaagaacatagaaattttgagcacaaaggttgttaaaatttactaaattttaatgatttatataacatttttatttatttattttgttttattttttcaaatcgctctctctctctctggtgcccaaacttcatgtcacctacgacccgataattttcaaaaacacacccctgagaaatgtaaattttctaaaaaattcacctccaaaacctatttatttattcacatattgataagaatttgtgaatttaaaaatatttatctcaatactgttttgttaaagcttattttgttaccattttggataaaattttacgatttaacactccgctaaaattgaaactttttggcacaaattttcccatttttagcacctattttcggggtttcataaacctacctattttagcagctttcagcacctaaaaatcgcatctctaattattaacgggtagttttccagttcaccacgaataattcgcgatcccgaactgcggcaaagtgaatccgcgacctcgggatttttctgtccgagccccacccctgactgggactcaacctgcagaagaaatatccaattatcagggctgtcaaaaatatgtaaatgcatattttggcctggacctggacctggatccaggaaaaatccaggcctggatccaggtccaggccgatctctagaaatgtctttaaatgagtttttaagactttttgttctggaactttttcttttatctttttccgactttttatgaaaattttgcccccgacaaaggtgtctgcccccgacattttttaattttctccagccaacccagacaaacttagtcgaccccgaaccccgacttttccaaccccgacgtcgggggcccaaccctattatgcacctattcttatttttatcggaacttcaatctcgccaaacattggcatttcattttcattttcacaacctcggtactcaaatgtacgcaaatattttagtgtaaaattgccattttttctccttttcggtagttttagtttttctttttaatgccaaattgctgttttatgtacataaataactgttgtaaattttgtgttctttttgctctttcattttcctaattgtctatgctttaagttaatcaaagttttttttg

SEQ ID NO: 21490 - DNA, 3472 bp, Heterodera glycines
  unsure (1)..(3472): unsure at all n locations
tcactccgttgcattcggcactgatcagggtttccttgatcgctggtctgatcaatgccgatgatcaccaaaatgggccttaaaaatatgccatgtcatcccaattccatcacttcttcttcatcactttactttatctgctgatctcactgttgtgccaaccatattcaggtgggaatggcatcggatcggttgcgataaatatttaaaattttcgctctttcctctcataaaaacccttggtgccaccggcgcagatggtgccattcgaaatattaggcatttcatttctctaaaaattttttcaagtccatgccgagcctccgcttcgtgtcaccgacggcgccgatgtgccggcacagtcgcctattgcttcccctccgggcgctgaggacggcggcgcccaaccatcacttagcaacagcaacaataacgacaatgatgtactgcttgaaccgtatgggccctcggcattcccggccggtgatcagcaacagcaacaacagcagcagccgaacggcccgaagaagaagaagcagaagcagttcccacaactgatcggatgggttgatcggcccggcgaacgcatcggcgagcaatgcgatccgaggatgaagccggcatgcaccgtgccaaactcggagtgtgtgggcggcgtgtgcgagtgcttggccatgtgagtttttgatggtggtggatgtactgtttgctgtctgtacaaggccataaagtcgacacgaaattacgattacaaaacttaatttatctcattcaaattttatgctaattttcccccgttgttaggtattaccccgacacaccctaccgatgcgcaccaattgacacaggtgaaaactgacgactaattaattaagcaataaaattttattttcttaattttcacaaaacccgaatcttttaagcctatgttttctttttctcatcaatttttttgttggcatttttaaaaaatttttaattgtctttcttgatttaaaggattttttggcatgtttaaaattttactttcacagatttaaaattttaaatttttgtggcattttttanattttatctttccagattcaaaaaagttttttcgtaatttttcctanattttcttgcaaaattagattttttgcaaaaattacagagggttcgctcggccgactgtgccgtcgtggcgtggactgtcggggcaacggcgagttctgccacacggnccagcgcaagtgcgactgttgtgcgaactttgcggctgtagactggcgatgcttgccggggcatgcgccaggcggaatgtaagtgccaaaatttaaatttaaaaaaaaaaaaataaaaaatttgggcgcccaaattttcaaaatttggttttctttgggaattctttttaaaaaagggatccaaaataaaaacaaaaaaaaaaattttttgggggggggaaaaaaaaaaaaaaaattaaaaaaagggggcccaaaaaaaaaaaaaaaaaaaggggggggggggggggggggggaagaaaaaatatttttttttttttttttaaaaaaaaaaaaaaaatttttttttttttttttttaaaaaaaaaaacccatttttttttttttaaaaaaaaaaaattttttttttttttttttggggggaggaaagaaaaaaaaaaaatttttttaaaaaaatagtgttttttgtttttttttttttttttttttttttttttaaaaggaaaaaaaaaacacccccccctccgggggcccccaccccccccccccccaaaaaattttttaaaaaaaaaaaaaaaaaaaacaaaaagggggggcgcctttttttaaaaaatttagaaaaaacaagggtgtgggggccccccccaataaaggacacaaaaaattcccccccccctttttcccctgggcaaaaaaattcccaaaaaaaaaaaaaccccccccccccccaaatttttcccccccccccaaaaaccaaaaccaaattttaaacaaaattaaattttggggggccaagggtttttgggggccccccccccccctaccattgggaattcaattttggagggtgggcccaattccttgggcccctttttggccccaaacccgtgttttggaagagggcaaaatacaaataatccctttggttgaggggacgcggcgcggcgcatcagcagcaggcttcaatttctgcttaacatcatcatcccattagctgaatttgggatttatatgtctgtctgcgcgtgccagttctaaatcgggggaatggttcagttcatccgtatacttcagcaggggtgggctggcccggatgccagaaaaaaaaattcagaaacccaaaaatttgcggaactccatacctaataaagcttagttggtgctaagcaagcccttactgctttacacatatacaaatctatcataatttgtagatcaagtaccctttttggaaggttagttaatttaaccatttcccatttaaattagtcaaggaaatgccatttggcgaatgaaaattaaaaaaataaatattttttctaaaaatatttatattttgaataattgcttgtaaaataattcttggcgagcattaaaattctaaaataacaatacataattgttcagactcacgcattccaaaaagctcaaaaagaaacccattatttaaaccatgccaatttcctttattgtttttgtttcgtttctcatttcggccttctcgaacagttaaggggatattgtgcttttctcgagctttagcggacacataaacacactgatggctgattatgatgagaatgagcacctcttccccccccnccccccgcccccgccccactaatccgtgccgattgccccccccccgcccgccctcatcagtcgctctttaatgtcgtgccccatggggccgactgggccacccgtgcacccctccctcaggggacagattattgcgcggccaacccataaattgtacggttgcgcagggcacggatagggaagagtctcccgccggcgttgtcggcggcactcccgggggcgacaaattgaaatttgaaggggtaaaacaacaattcattgatgtgaaaatggggggggggagggcacagctcattagacggacggacggacagcagtgaaagcgatgaaacctctgctgctgagcgacggggtcagccgagctaataacgaagaagcaagaagaggaagaagccacgggcaacacaaagtgaagggtgccaaagtgcgacggtcactcacaatgccaccaactcactcactcactctcaatctcccccattgtgaatccctttaatcgaatttgaataagcaaatccaagcgatatgcctgagctttcgtaagccttactcgggtaatgattcaaaaaattttctgattttgtcggatacataaattgggttatgccaaccgtaattattggcaaactattccccaatgaaatgctaat

SEQ ID NO: 21491 - DNA, 1323 bp, Heterodera glycines
attttgagctattatgtagataaatttgccttcgctatttgaaaaaaatggtttcgaaattccgaaaattgcaccaaaaattcaagtacgatataaatagaaaaccgaccttgaaggccattttaggaagtgtcgtgccttctaaaatttaataattcttattaatttccataaattattttaattttctaaattaattgaattaatcttcaaataattcatttgtattatcgattgaattaatttgaaaattttttataaatgactatatttgttttataaattcttgattttctcaagtcgaaaataatattgatataatatattttcaaagacatatttttattttaaaaatatatatttgatgtcttattaatatcttactttttttgtgtcattagaaatatgtgaaattatttatttttatgcatttattcatttttgattacttatattttaaattgattttttaaattatttattatcttaacttttaattttatttttaccatcgtcttctcttttaaatttagttgcggcacataattagttataaagctttttaatcttttgatgctgcatagtttttgaaaaaacttgaaatgtgatatttttgttaaattttaaatgtttcttgagtattttctatttttttattaatatattttttctttatgatttctcaaccttaattatttgatgatctgataccctttcaaatatttataataaaaatcaaatttaatttaaaattaaaagcgaaacaaaatattttttaattatatgacttatattatttatataaaccagataaaactcaccaaattacattgaatataatatcacaactagcgggtgcgtgaaccgtcggatctgggcctgggataaagcgcttcgcgcttcttgagcttcgctacctaggctgtgaagcgattcaaattgatagaagatgttagggataatttatcggaattttaaaaaattatcagcgatttttaggccgcttcgcggccttaaagggcggattcgagcccgttgtaagaggtaaaacagtgattagaagaggtacaacagagattaggagaggtacaacagagattataagagacctttctcgaagtaggactcgaaaattgaaagaatggaaaaatttaaaatgttattctaaataaaattttcaaaatttaattaatttttggcttggaaattcagatttaaacagagggttcggaattagattatgagacgcatccgaacaattttttagtttcaaaaataccgcaaaaaaactctaaaataaatttggggcaaaaatcataattt

SEQ ID NO: 21492 - DNA, 2547 bp, Heterodera glycines
  unsure (1)..(2547): unsure at all n locations
aaattcatggattttaaaacttatttattaaaaaatctttgcattttcttaaacaaaatttgaaactagctcggaataaccaaatgatggcgtggaattggtccatttttatggaacattctccgccccaaatttatgcgccataaaattttgacgaggcaaaaagaccaatttcaacgcgaaattaatggaaaatgaaggtcattctgcgcatcctgatcctagcgaattgggaatttttaaggcattttttgtaataaaatatgaaaaaaaaatctttaaaaaagtaattaatttaaaaatattatttgaataatgttataaaaaaattttaatgtagagctgatgactttcgaaggtagactgaaaaaatagattaacatttgcaataagcattccgttttcatattcctaaatattttcaagaatttaatttttttaatgatttaattatgctttctaaaaatatttaaaaaaataatattgaaccttcgctattagccgtcgccttaaaataggctttgcccgtgcagaggacacccccaccaaccttgaaaaattttaaactcggggccagtaggattagggtcaaattcgggaattgcacctcggaatggtgtttatgattaaaaatctcaggatcagaagcaggatcagaaaaaataaatatttactggtcatttcccgagcactattgcaacaaatccattaattatgtaaatttatttttatttttaaaattttaaatatatgtaatgcactgtaaacaaaaaactattaaacaaagcctacacattaattgatgatgactcactcccaattttcattatttcattcatcggtcaccgaggcttttccatcgtccgccgctgggagcggaggaattggattcgtaaaatgggggagaaaggagatgagacggcgaaagtaattaagcagatgcagcggcggtggaaagcgaatttcgcaacggagagaaatgacgggaaacaatttttttttttggaattggattttgcattaattttggagacggactttggcgatggttgtccaatcgaatgaaataaatttaaacaaaaaaaattgacgaaaaattatgaaatggaaataatttaatttattaaaatgatttaacaaaataaacatgacaggaacaaatcttagtaattaggacaattggcagtcgacaggacccaaattgcaaaaagctatgctaagaatttgtctaatcacccactgatcggaccgcctttcccggtcgctttcatgtgcaaactgcaaaaattatcaaaaaattatgcttacaaaagatctgatctctacaggtctacgttaaatggtttagtttaaggatttagatacaaaaaataagaacaactcatagaaataaggacattttgtagccctgtcgttattgcaaaaaattatgcaaaagaatttctctgatcaccactgatcggacacaatttccgattgctttcatgccatttttcaattcattaaagcattgaacccaagccaagttggcaccatgccatcattaccgatcacagcgatcaaaacttcgcaggtgccattgcaaatgttgaggagcagcatcgacaaaatggaaaaacttaatttattanatggatataaaaatttaatttaaatttaaaattattttagtttttcaatttccattcatatgatcaattttgtaatggccaaaagcaatgctaattgagtcaaactcaaactttttcttcaatctgatcaattgaaagagttttcttttctgtcatattaaaagttgatttttgcaaaactttttttttaggaaaataatatttattactacaataaaaaacatttaaaaagtacaagagcattaaatgggtctgaacaacaaatacagcaaatggttcgaattagaagtagtttatgattgtattaaaaaacatttaatgaggtaggaaaaattaataacaaaaattaatagtgaggtaattaggggagtgattaaacaaagtcaaacgcattggacagaaactgcgtttttttaaagatggaaaatgataaaatgtaattggacgacaatttattcttaattaattgcataattaatagagccaaggaaaaaagcggggtaatgagtttttcgataattttttaaaaattacatgggatctggaaactaacccaaaaattaatttggtgttattttccgagtcgacttaagattttgtcaaaattccatgcttaaatgaatctaagaatttccagaaaatacattaaaatttcgtcgtttataattgttaaaatcccaaaaaatttttaattagccttaatcatgtccagaaggtgagcttccgaatcctaattgttattttttcaaaattccaggctctattaattaataaattaaggggttgatttttgcaaaaaaaaatttaaaaaattcctcatcgacctcggtaattgttgcctccatttggcctaggcttttccacaaattttttgcaaaaattgttcttcctcctcaatttgttttcgcccctttcg

SEQ ID NO: 21493 - DNA, 2430 bp, Heterodera glycines
  unsure (1)..(2430): unsure at all n locations
cgccaaattcaaaaattttgtttattttgcttaaaaatttttacattctttgtatattgtttgatagcccaattttttctctattagcctagaaaatttttaataaaattatcaaatttattctaagtagggatacgatttttaggtgctaaaaactgccaaaataattagtttttaggttctaaaaaaccccaaaataggtgctaaaaatgggaaaatagatgccaaaaaatttcaaatttagggcgtaaaatgacaaaattttattcaaaaagcaataaaattatgccaaataagcagggatcatttttatgtaagaaaaatcgcgaaatatgtaaataaaatatgtataaaaaatgctaaaatatgcatgaaatatgtactaaaacttccaaatatgtactaaaatatgtaaataaaaaaatttttaatggttatttttttggaaaaaaattcctcgtaaagggtgaaataggcacaaaatgccataaaaataggcttagaatcactttttagtaatttaaattaatttttaatatctcattttttgaaagaaaattgcacaattggcatcgcctaattgaccttctccgtgacctgacctctcttcctttctctacctacaaatgggtagtggaaaaagaaaaggcaatttatgaaaataatgtatgggaaacgacattttctgccgtccaaaataatttgaccaaaaaagaggacataaacttaattaattaattagtagcgcaaattttctcatttgtataacacatacatatatatgaaatattctttatttatttgttttgttgagcaccaacaacagcagttttcaacatcggcatcaaagacgacgaaattttcagtaccagtcccgaccagccctagtaaaaattaaggaaaattataattcatactttaaaagtagaatgacatcaattattagggtaacaattcattactcaaaagtaaaacatttttaaatgcaatttattttatcatttaatctttcaataaaaatacgaattttttatttaaaaattaaacaataactgtatttttattaaatttataaaaaaggccgcggtggttaaaattttttgaatggcccaaaaactgagaccaattcatgttttcatcacagacagacacatcggatggaagatattatgcatataaaaaaacgatatttagtgtgtatatatgccatttaaaatgccattaatgggccggccatgtgccgttcgacgggattttgtttataggttttcttagtccaatccgacacatccgggattgctttcgttgtctttgtacgagttcattcccgaatcatgggaaatgttctcgtcttgttaaggccctcggtctcgacatttaataagacttcattcccgagttttggtagaggctcttcagcaaagataaatccaagttatgccaagaaagtgctacaattgccccgattttgtaagtttgaattcttttaaaaatataacaatttttaaaaaaattcgttgaaaattccttttctcggagatgccttcggggccaaacctaactcctctaatttttgttaaattcccaaaattttcaacaaattgttaaaaatttttgcatttatgagactgagttgtgacaaaagaccgaaagtcgttgctgtagaatggactccgttttccatgcattttgccaagggctaattaatgaatgccattgcactaatttttggtgtccatcggtcgcgtcgcaccacggcattttacatcaaaggccaacattctctccaccaccacaatcgtccatccccattgctcctatacgtcctctgccgttcatttaaaaatggcgtcgttttatgtgtcctttgatcactggtcactaattggccctaattaggtcatttatttgccccccccttccaattacaagcccatcttcactaattgcctatcacagcccattagtcacagtcattccttcttctgcccactatattcagtcttttataattttttaatttgggtaattatttttaattgaagtatattcattaaaaagatcatttatttataaatttacctactgtaatttatactgtaaaatcgtgcgcattaaaattgtattacgtaaaagaattggtacttagttttattaatattaatgactcactctcaataattagtgcccccattttcctcggtttatcaaaacaatttttaattttttcgatttaattttactttataaaaatttagctttttcattttttcattggacttttctaacatttccgcaaaaaatgtcttcttctgctganttcatttttgagctccatcaatccttcaacgacacaagtacaatacaatngaaaaattaattagcattnaattatattattnattaattattgcctaattaagtttggcc

SEQ ID NO: 21494 - DNA, 2175 bp, Heterodera glycines
  unsure (1)..(2175): unsure at all n locations
tcaattaataaatggatacaatcggtcgttaatcccttttttggtactgatcatttgctgatcaattactttgtctcatcctctctactcatttcttgccaaatgactcactcactaaaaccatttgtaatgaatgcgaataattcaggaactgttggacatgattctgcttgcttttggcatgactggggaaatgatttattccgtggccggcttactcggcctcaccggaagtgcccggacggaggagcgaaattgggagcagatgacgctgattcttcttactgtaagcgattcttttgttgagcatactgtatctaattgtaattgtatccatctgtaataattgtgccaaaaatgttttttaggttcatgtcacgcgaattttacaagtaaatttgaaactcaagtttaaatataatttaatggatctaaaggttgggctccaaagctgccttatttatattgcggtaattttgcattttctgatcagtgacaaaagcattcaaaaaattatttttttagggaaaacttcgcattgggaatgaccctattttgagggaacggcagccgggtaaaaataaaataaattaaaattaagtttaattaaaataaataaataaaataggaaaacaggcgatcacttttcttctgttggccaacatttcaatgtttctgatgaatttgctggaggcggaaaaggcgggcgttagcgatacggtggtcaatttttatgggaagagaaattggtaagacggttagtcggtaattgatcgattaaaaacattttcagggtgtttttggtacggtcattctccccactgaccattttctaccgtttccacagctcagtttgtatgtgaaggaaaagccaaataaatttcagagaattttgaatatttgaaaggtctggcagaaatatggaagagtacgtattcgtggaaagagtgaacaaaaccaatcggaagaaaagaacaacacatttttgtaacagttcagagctcaattcaaattaaaagtgttacggtagaattatgtattgtatatttaatgtccattttttgataaaatatttaaaaaaaagttaattgcatccatattaagagaatcatttcaaaattacatttttaatttaaattttggggtaaaataatcggccgaattaaattttatagtttgtgatggttttaatctttcagtacgaaagattttaatttgttgacgacatttgaaacgaaaaaagagataacatttcaaatataaactgaaaatgggccattaataaattatttaaattgtctttgctcattttattcaactttttaaattaattttattttctgtctgtcaaatgcttttcttctcccgacttttctttttgctaattttctttctctccaccacaaatggcacaaccgaaacaacaaaaaatgcacaatcggcgccggaaaagaaaaagctcaaaattctcgtctattcggtaatccccgcgcacagtcacatgcaatttatgggcgcaattgccgactcattggccgaggcggggcacgaagtggtgaggaacggcggaagacggacggacagaatgttgtaattaaaagcaattaagcatttcatcaaaacaatgaacgacgagttgcaatggatgagcaaagccgagagcaacgagaccaaactgtccgccaaagtttatcgggttgtgctcaagtcgcgcgaagcgactgtcgcgagttcggatgtgctttatccgttcagtgggggcaatgcgtggccaatgctcaacgcatgggacaacagattcgctaggattttcgatttgtggccatatttttgcaaaggcaattaattattcctaattaattgttttacattttcttaaatggaattcactgacttttgcagaaattgccttccgtcacgaattgctggacgaattggccaaggagcgctatgatgtcgccatttatgaactgttcgatctgtgcggtgctgccattttcgagcgcatcggtgtgcgcaccanattggcaacacttaccgtgccaatgtatcaaacgaatgccgcccattttggcatccaacatttgccagntttgcgccaagtaaaaaaagaaactaatcaaaatgaggagaatcacaattttcctgttcaactaaatttaccttaatccgcta

SEQ ID NO: 21495 - DNA, 1139 bp, Heterodera glycines
tgcactaaggaagtgcaagttgctttgcatatcgctcaggcaccaattgggtttgatctgttgtttggaacgaatgctttgagttctttgggttttaaactttttgatgacacaacgaacacaaaaatcaattttgaggaagtccagctaagcaagtcggactctctgactgtcatataccagacaattttggccccaaagtcaactcaaatagttgaattgggcattaaggaagagtttgaaggcaaaaacctttttctctggtctgaaagccaccaaaattttcgaattgagccaacagttggaattggaaaggacgggaaagtcattgttccgatgacaaatttttcaagtctgtcagtcaaattggaaccagggaattccatcgggaaaaatgaagtcgtgaatcatgtcgaagaatgcgaaaatttcctttcagcttcgaacgaatgcttcagaattaattgtgttgcaactgatgaccagaatgtgtcaatcgacaaaattttgatttaaattctggaaaaagggacatttccagattcggaaaaacaaaatctgttggaattgctttcgcaattcaagaatattttcgctgtttccgattcgcagttaacccaaacaacccttgttagcatgaaattgagacaggaattgcaacaccagtgagatcgaaaatgagaccagtgccttacgcatatagagaaaaagtggccgaaatgttgaaagattatttggaacgggatttaattcgtccttcatattccccatgggccagcccaatcgttatcgtaccaaagcgcgatgggtcgctccgtttttgtgttgattaccgtgccgtaaattcggtgacacgaaaagatagtttcccattgccaaacatagacaatactcttttgttactgggaggcaaaaaattttttacaacactttattttatgtcaggctattggcaaattcggatgaaagctgaatcaattgaaaaaacggcgttcgtaactgaatttgggctccacgtgtttgtggtaatgccattcggtttatcgaacgcagtggccacttttcagcgctttatgaatcgactttttgaaggaatgatcagtaaatttctatttgtttatatcgatgatgtgtttaat

SEQ ID NO: 21496 - DNA, 642 bp, Heterodera glycines
ggtattcttggcgggtaatacgctgccaccctcaaaatgaccccagcaaatcccgaggggttgggtacccaccaaaaaatcattggcccacgtgcttcgtgttgtcggaatggtgcaacactttttttgaaaagcggcacgtgtgtaagaagtgcacccaaaggtcgatgcgcacgccgccccattcccgcccccacctacagcctgaacatccccatcaacctccaacacaactgacggtcgcgaagcgacgcacgcacgcctctcctatgcatcacccgtctgcaatgaactattttctgatcaaaaattgcttaacttccatagaagggctgaatgaagacaaagaaaagtgattcaaaacaaatttacaaatattaaaaaaaaaacaatcattgtattcaaatttgaatgataagtaaaaatagccaaataaaaatgaaaaatgtctgaccaaattaaaaaattaaaattgaaaaagtgaccaaaaatttaaaacattttcacaactttcggtttcaaaactaattaatcaatatttagttggtgaaaaaaacattaattactgattacaaaattcttaggcaaatatgaaacaaagcattcaatgccggcataaaaaaagacacgtaaccagcgatt

SEQ ID NO: 21497 - DNA, 2143 bp, Heterodera glycines
attcgcctttatcgccctttacgcccggccacgcggtgacgcggcgtacgtccgcgtcggaaaggccagcgaaagtgccgggggcaccgggcggtcccggaagaccaggcggacccgggggcggcatgcggcactcggcgatgcactcaaatgttgaaaagattaaggaggaaaacccatacaaaaatggcagactcactgtcccgggcactcccggatcgcccttttcccctttgggtcccggtgtcagctgagcgccgccatcccaccgcccgtcggcttcggacggcggccacgccttagggcgcatttgcgtcactagcacattttgtgtttttgccggtggtggcactgtcgtgtacgctattgtggtcggagttgtggacagaagcggtgctctttctgcgtcggatggcaccgccggtcggtcgccgtcctcaaagggcgggccaatgccactgccgtcgccggcggcgtcactttcggtgtcctgaaaaggcaaaacatttggtaaagccgaagctgcagcagctgaacattgtggaaaaacagaacacgcaacaaaagccgacagaacgactgacaaattcggacgagcaataagcgaccaattaattgatcgtttaaaactggaaaccgatcaaacaatcgattggcccgatcaatcgattggtaaaagaatataccaatcaatcaatctggactggtcaatcaattggaagagcatcttcaaaatgattattttaacagaacacacaataccaaaaaagctgctcaagactcatgattaattctcgaacagaactaatacacatcaaatgaccaaacactgcttttttttcgcatttctcttaatttcaaattatatgcttttcaaaaaatcaaaaatgtttttgcaatttgaaatttaattttgcaaaaatattttctttcgtttttgcttttcaaaatttaattaagcacagaaagcaccacataagcacatcaatccgacaaatgaccagtgtttgggctgccccgttcttctgatagtctctcctacgcgttttccactaaaaatcatttttggcacttttctttggcattttcccatttcttgtgccattttcttttccaatacccaattctcattgcattggttcgccgcttctgccgggtcgtcgtgcagtttcaactcttgaatggccccctaaactcgtgaatttgtccctctttttgctcacccctttttcccatttgttcgcctccgcttcagtacaatttcccattttgccatttccgcgtgtgccattcccttccaatttcattttggcattcaacgctttaagaatgggtaaaatggaaacggggctcaattgacgtgttgtctcctttatggcagagttgttcgacttctcttcggaacttttggcattttgtcccgtttttcgcccatttgtctctttttcatattcttctgaacttgactctgatgaactctctcgagctttagagacgttttgtccatttttggttggcacttttgttgtggcgttttgtccgggttttcgcccatttgtctcctcttcttcttcttctgctgaactcgattccgaagaaatctctcgttctttggtgacattttgtccatttttggttggcacttttgttgtggcattctgtccagcttttcgtccatttgtctcctctttctcttgagatttagttgcattttgcacagttcggatgatttctccaacaattttatcatccttttgttctgacttggtgacttttcgtccatttgtagtgatattttgaccattttctgtgatattttgtccgctttttgttgcaattgtctcttttcgcccatttgtccctcgtttttctgctccgtcttcctctttctcctcccctttttctttcccttcttctctttgttcttcttccttttccctttcttcttcctcttcttttcctccctctctttttttcgcctccctctcctgttttcggcctctttcttctcgccctttccttttcctctctcatcttgttcccctcccctccttccacttatttcttttccttttattctccttttttcatcctcttcctcatcccccttttttttttccttccttctccttttttcgttctt

SEQ ID NO: 21498 - DNA, 2548 bp, Heterodera glycines
ttgggaaagttgagcagatcttgtggccatgtgcattgcacgaagcgttggatggtctgttcaagaagggcacacagttgcagcgtattggaggagggacacggggcagcggtgagaggactccgtactaacgcctcaagcacctgggaacacggaacaatgcaagtggaaaagagacccgagtaaataagacttggtaaagaaaacgagaacgcatttcgatgctccacttccagccaaagacaatgttttggaggcgaaagttgtgcagttccaaaaagaccttcaatttgagggaaaaatggattcgttgtaaaaaaattgcacggaccgctaagaagtcaattcggacggggtaaagtttctgttcattttcattcgttggaacgttggtggcataatgaagagcggagaaaatgtgcgtgtaaaagatggtgccattaaggtcgatctgacatggttaatagcagaatttggtaatagttgaaagaaccgaaaaactgaccaattccgtgctcaacaaaagtcgtgccaaactttccacgagtgccggggttggcaatctgaaaaaaactttataaaaagacaaacaaaatggagtaacatttgaccaccttatcaatgcaaaattaggtgtcgcatctttatagaataattggctgtagagacgaaatgttgacttgtaaatttgcaatttggcatggaaagtaagtgagtccagaaaagtcaggtctaatgcacgcaaattctgttcagttcgccgtccgccgggcaaaacccaacacttttcgggttgatgaggctaaagaacaattgaatgaaaagtaaaagagcctttgtataaataagcacttgctgctgatgaacaatgctctggccaagaatccgaaacaccgcggagctgacgtgttcctcgaacacctcgcgattgttgctgtacgaattggcaatgaccgccagaagggccaacgttttgtccagcggtttgtttgcatccaactgtttttctgtaaaaaataaaaataatttgacgataaataatgttcagtttaaaccgatgaaatcaatgagtggtttcagtttctccggtggctgaggctgactttcttccgaagtggacgcaatgggcaaagcgacaggatgcaccaaattgatccaaatggcggcaggagcaaaaaatcggacataaaattaacaaaaagtcagtcaagtcaatggccaataaatgaagaaaaaccatattcagagggttctccgtggaacaggtggtagcccaattcatgttcttgtcggtgtacaaaacctgataagcaattggagtggaaaacccaattcttgccaatttgtaaccaaattacgttaaaaatgtccaaaaccaattcccggttctgtgcgcccaacccaacgacggagagcatttgtgccccgctttggccattttgttgctgctgctgttggaccaaattcttctcgcgagaacgggcgtaggcaaccaattggagcagaatccacatcaattcgtccttggctcgcaaatactattaaaaggattaaataaacaaattcggaaatggacgaaattacttgacaacttctcaactgtggcagcaacattttcaacagctcactgaaattgaaaaaataaattaagaaaaataataaacgacacaaaatttgacctcaatgtgcagttttgcatgtacagagcatgggtgaccaagtgggaaaggtgcagccaattgtactggttgacaggcgccagcacgggctgttccgagtcctccatggcgcacatcgcctccaaaatgagcagttgaatgacctcatcacattggatacgggaacacggagtctgtgaagttgacgagcggagaatgtgcttaattggagaggagtgtgaacaaaactcactaaaaactggcgattacattcaaattgtcttggccatggggctgtttgaagagaatgtactgcaagtaggtttgtggggtggaattttcactaaaaatgatttaattggaaatgttgagttccaaaaaactcagggggattgttagagttgagtgatcacctgctgtacggcaagtgcgtcttgaagtaaagtttgcattgcttttcgtctaatttccacgcactgcacgtcggagaactccaagagaaggagggcgaagcgggcacgggccacatccaggaacggccgagcatggaaccaatttcggcgagggggcgaaaagaagcgatcatttcgcggattttccaagaaacgcgctaatgatggaaaagacaatgaagggtgcaccccaaaatctcgccgccgaaatctcgccgccgaaatctcgccgccggaatctcgccgccggaatctcgccggccggaatctcgccgagacaaaatatcgccgccgaaatctcgccgccggaatctcgccgccggaatctcgccggccggaatctcgccgagacaaaatatcgccgccgaaatctcgccggccgaaatctcgccgcagaaatttcaaaaaaaaaaatttcaaacttagaaattttcaagg

SEQ ID NO: 21499 - DNA, 2177 bp, Heterodera glycines
cccgtttgggtgactgagtcgaaaagattttcggccccttttggtggtgatactgacaatgagcaaaaaggcattggcttgcgactggacaacctcagaccggaatttttacacgtccttcaaaagtccataagcttttggttccctgttcaacgatttgttcttccgactctgcttcaaatggccaattccgtcctgcccccacgcgatttggtcatttgctcaccaaccggtgatttcttatattttccctattttgatatttttcccacaaggcagtggaaagactctttgctatgtgctgcccattttaaatgctttgcgaatttgccccttttcgacttcgtcagtttttgctttggttgttgctcccgtcaggaatttggctgaacaaatatttaaagttttccctcgtcgcaaaatccctgagaatttcgcattgttttttaattaggaatttgaaaaactgaatctcttcggtgctgccattgcgttgcttggtcagaatgactaccgaatcgaaaggcaatggcaccgactaaaagctttaacagcaattcttttagaagtgttcttttcccaaacggaatgaaaagtagcaaagcacacgtaatagtgacaacgccgggacggtgagtatttttcattccgtttgccaaatagccaatctcctacagtttcgttgaacatctcatggatgagaatggccatttggacctgtccatgctcagataccttgtagtggacgaagcggaccgaatgcaggacactgcccggatggaatggcttggctttgtcgaaaaatatgcaaatggtaagtttattttttctgattttcatacgatttaaattcatctctcttaatcagtcccttctgtgtgcactttgaatgtatcttcgcttacggataattcctacaacaattggctccaacgcattttggtctccgctacgctttccatggacgtccattccctccacaaatggaacctccgatgtccaattctgttccaagctgagaaagagataaaagtcaaccaacaaactgagaattcggcggaacctgccgttcttctgccaaattcactcactcataaactcgtccgttcgcttttaatgatcaaaaaatgccctcttggttttcagattgtctgtaagcaaaacttcaaaccattgcttctcttcagagagatcgacttaaattttgacaaatggaacagaatcattgtttttgtcaacaagaagtttgtcgtatatctgacgatggaaatgattaatttcagacaaaccagtcgaaggctctcctctctcttggacgctttgagcaaaaaaaagctaactgtagccgaattctctgccgatttgttcaaaagccgcagaaaaaaattgttgagagaatttcaaagcggtgcggtgagtgccgagtttatcctttggacacagcgtccggaaacagctcctgtaccaaaaaagatttgcatgtgtggctcagtggtttttgtaggaaattcaagggacaaagggcggaggttcgagtccgttgtgctacatgaatatttttatttatttttgtgcaaaaaattaaaaaatgacgatttttgggaattatttttggaggtttttaccaaccaaattggtccatcatggtatcattcgaaagctcctggtgaggagaagctttttctaagcgaatgctaaccattttgaagcattagaaaaaagttatgggcgtttgaaattttgttttttgaataacttttctaatcgacccattttcaaattaatctgacctatcattagatgcagaaaatttttctctgtcgatatataaaatttggtttggatttaacaagtagaaaaaattttttaaacaggatgaagcaaattcggtttttctctattaatagagatgaagaaatagtacgccaaaaagagagatatctttttctctgcactctctatttattggtacacatctcgctttttcggacggtgtgtggaggaatcatatcattcttaaaaaatcaaaattcccaggtccgtgtgctgatcgcttgtgatgtcctttcacggggcatcgatgttttggacgtcgattgcgtgatcaattacgacctgccgataaacgaacgcatttacgttcaccgagctggtcgtactgccagagcaagaaagaa

SEQ ID NO: 21500 - DNA, 2588 bp, Heterodera glycines
  unsure (1)..(2588): unsure at all n locations
cctttcccctcccttttccaaatctctcactttctttgccgatctttcccccgattcgaaatgccttcgctttctnttgtccgtgcgcggcctttgcttcgcttcgacccctgcacaatttcaaccccaaacagctgaaaaacaatcagcagcagaagaaacatcgcgaaaagtgcgggcgatcggaacattttaagggactgaaaaaagaaaagaaaaaagggggagaaagaatgagtgaaggaagggaaaggaggaggaggaggaggaggaggaaatgaatggaatgaaaggagagacaaattcaatttggaaaaaaagggggggggcggactgccaaatgaggaacggagggagaaacggggctaataaatgaatgagcaaaaaaataggggcggacggacgaagggaaaaggaaaggaaagactaagaaaagatactcctcccccggggggcgtgggaacgcatttaattgagagaaaattgagaaaattgaaaggggaacggagagggacaagtcatttgacaattcattgcctcgagcagagaagaaactgttttattgacggaatggcaaataaaacataattggaaaatgataaaatgacacataaatttatgattatttcaaacaaaaaattcgactgaatttgtgcgtgccgcgggggttaaaaattataaaatggaaataaatgggtgaagggggggggggggaatgaatattcaccggcggattggctttttcttttttttgcgttttccgattcactgattggccaatgtttttgcttctgctgagcatttccttctccgtattcctcttcgtctctgcccctttgtttctctgttagtttatctctcgtcgtcccttttctgtttccgtttccaatgtcatttttctgttcccactaccgtagtccacctttcgaccgtactttgaatgaaagcttactgtattttgctgttttcgccccgttcgcttccatgaaaaaaaggaattaaaattaaattgtaaaaaataatggggaccatcacttggtcaaatgaatagcattggctgtacgggggaatgtacaggtgaagggtcaccgtcgggtcgacgtgcgagggattttccatccgatggattccgattttgtctgaatttatccgtttttccggttttgtctgaatttcatccgtttcctttgtgatttattcttttttgttcaattttgcctgctttatctcttcaaccaaccactgatgtagctgactccgttcgttttgaacagcgccgtccctgtcgccctcatcggtccctcttcttcttccttctcttcttcctcttcttcttccttctcttcttccttttcttcctctttctcttctttttccttctttggccatgcaaatcgcgtctccaaaagttgcccatccaaaactttgacgaagcattgcgcagcactgtggtcgtggatgctgaaaatcgttggagttaatgcgctttcggttagccgacatttgcggaccgacatttgcggagaccgacatttgtggcctaattgtcaaaaaaaatatataatgctttttccaataaattttcgtaattcccaaaattgaaataatgactgaaggtgataattaaatagtgcttcttgctctaagctatgccaatttcggcataccttttttctttaatcggaaaatttacccacaactaaacgaaattattacatatagtttattgggcaaattgataaaaaaatgctttatatacaaatcatatcacaaaatatataggacgcaaaattttttgtgtttcacctactagccttagtctaaagagcttagattttgatcaggcatacctaacaattaatatcaagaacaaataaaaaatataaaaatatattttatatctttaaaaagcaaaattaaaatgaattactcacattatctatgacaacataattcttgtaaatcatgaatttataaactaatgcattgcacaagttgatcagatcactacttaagaatgatcaaaatattaaaagaaattgtttccggaaaacacaaaccaaaacagaaatagtttttcggaaaaatacaaaaaacagaaatagttttgtggttaacaaaaattaaaaaagttttggggaaaaataataattgttgcggttcgttttttaaaatatagaaaatagtaacactaaaagagaatatcaggttttgtggaggaaattatccgataatgttgtggatggttggaaaatattaaatgtcgagagtgcgtatttttaacaataaaaatgggtataaatttaattaaaatttataaattatgaatttatatagaaaatatggatgtacaaaaaagatttaaaatgtttgggttttaatcaaacccaattattccattaatattatcataatttaattgggtaggtaaaaagtaaaatgaatttttacagtaaataaattcaatttaatttttttaattaaaacagaaaaacaatttcttttgtattgtttttttgacttaaaaatatttaatttaattanaaatgcattanattttgttgaacccggaaatcatattatatggc

SEQ ID NO: 21501 - DNA, 2394 bp, Heterodera glycines
aaccattccctgttttgaatacgtaaatattttgttaatgcttttccttcaataaatatttctctctcttcaaatggtaatttgaatggcttaaataaagccttaaacccggggacaacagcaatgctgattggtgggacaagcaatgggtggcaacaggcaacgggctacagatggatgggccggcgatggtgtggcacaaaatccgggccgtggtgaggaagggtgagcagggccaagaacgccaagccaattctcgattttaatcagcaattcaccaaaatcgcctgtgcggattgaagggaagaaggggcaaatggtgggccgagcccacggattagcaattgaatatttatgtgaaaagtgggtccaattgggataatccgccgccaaaaagaatcgagaacggagactctcgcacatccctaggtgggacgtccggcggtaccgatagggcgccgccggtagaaaattttggcatttttaattacattggcttttgataaagttaaaaaatgttggaaaataaaaatgtttactaactttttacttttgttcataagcattgacaaaaaaagaaaattagtaaatttttcgctttatttttctaatgctaaaaaactggcgagttttagatgccctacaaaatatttttatagatcagaatcaaataaaatcactgatcaaatggatgagagcattctttttttccattttctcatcgttgcatatccaattccaaatttcttggcaattattttgtcagtcacttttgggtttgcttcttttatttcataatattgcttcatcttcatcaatttgtcctcattggaatatttcggtggtgctttaatataaaaattaaagtaaaaatcgaaaaaatgcacttacttttattgtattttggtgccaattcttttttccactttcgaaatgtttgtttagaaatgcccaattccttcacgaattctttctgtttgccatgggcatataaatctttaaattcatcaaatcgttcaatgaattctttctttttgtcctcataaaaactcttttccatctttttatttaaattcatttcttttttccatttgtatatttttttgcgatttgtgcctaataattttgcaatttttctctcaattttgccataatctttccttttgtattttcctttttgcttcaacttttctttaattgcttcaaatttcaaaattatttctctctttttgtgatcatttttcatttgatcatttcggtcatttcccatttcttcacccatttgatcaactgctgctgattgtgagttctcatttcgttcattttgttcaattttcactgtttgctcactttcttttttgtcccatccgttgccaaatatttcatcaaaatttggtcgaattttgtcggagtcaattacaaaaataaagaaaattgtaataaatattaaacacaacaaattcatttttacataaaatggaaatatttgtttgaaatattctataatattgtttttttatattaatattgctcaattttttctcattttattgacgttaataaacaaatcgataatgctgaataatatgctaacattggcttttttcagtccgttgcttttcatttattatgaatgagtggcgagtgattaatttgttatgtaatgacaatgtttttgcttctcatccgctggcggggcaaatcatacggaaaaatcaaaaaagaaaagaattgcccggagatttgcagggtggggctcttggtgtcatggcccggatcccgtcaatttttttctaactttgtcagcattcctgctccctgatttcttactcggggaggaaaggataaccgtccagtcttttaggagggcttaggctttgctttttttatgcgagagcttttcggcggcaaggctaatagaccccagggaagtagggtcgttctcggcaataaattggaaccgctgcggagtcggtccgcttgcttagcacgaccctttcagagtctataacaattgagtaattatgatcaattagggagaaccaatcgactaagaccagggcgctaccccggagagaccattaagcgaaatattatcatggattatgtgcgaaaaagccgcccaaaaagaggacaaattcccctcatttccattcatggcccggatataaagcattttcctgctacctgatttccttattaaccgtccagtcttttaggagggcttgggccctgcttattttctgcgagagcttcttggcggcaacgctaatataccccagggaagtggggtcgttcggcaatacatcggtgccccctgtattgagtcggtggaaatggcggtcaaaagagcgcggagtttctatcgaataatgtgcacggcatgattaagag

SEQ ID NO: 21502 - DNA, 1274 bp, Heterodera glycines
ggggtgagtcggtcgtcgggtggttggtgtccgtcggaaaagcaagcggcagcaccgcacatcggcacactgcctgggctccgagttgggcacgggcaaaggcacagaaaattgtctgatcctcggcctgtgtttgtcccacaggtcagccaggactccaatttttcccaccaccatgacaatgacttcgacttggagcagcgcaatcgcgaggccatcaaaagcaacgcggagcggcaggcggcgcaacagttggaaaatgccaaagtcagcgaagggggggggggcacggcacggagaagcaaaacccgacactctttaaaagggattttaattaactactctcaatcttgggccatttaatccgggttctcgattttgaggcattgaaaaatctcgatgggtagcactcccgacccgattctcgatattctccccaggcaaaaataacttattcattttccttaaacattgctcggggtaaaattttcgctcggtaatcgatcgttgtaattgatccataccaattaattatgcttgttgattgattgaactgactaattgtgccaattatccccgtccagtacaacccggtgctattcgccgtgcagaccaacgtcgactttgacggcaccattgacgacgacgcgccggtgcacggctgtgccgtgtcattcaaggcaaaggagtttctgcacattaaggcgagcaaaacaattaaaaccgaaattttaatcgggtgatttgttgcaggagaagtacaacaacgactggtggatcggcagattggtcaaggagagctgtgaactcggctttatcccgtcgcccgccaagttggaggcggtccgccaggcgcagcagggcggaaaaggcgccaaattgtgagcattttttaaaccccgcgacgggacaatggaaacacacaattatttccaaattcattcatatttgtgtagccagatggcctaataattatttgatttagctttgtgtttaatttggttatttttctgatcagagatttgcgtgacttttagttgatcagccagatgattaaaatctcgaacgaatttgggtatttctgatggtgattttagctatcggatctgctacttattgatccagctcttgctttgtcctttctgctgatcactaattagaaattctcaaaaattttacccacgactgataaaatgattagattcgatcaaatcaaccatggtttgaaaaattataattagtttatgctaacaaataaatgcactaattagtgc

SEQ ID NO: 21503 - DNA, 2067 bp, Heterodera glycines
  unsure (1)..(2067): unsure at all n locations
ttgtttagccatttctccgttcgaccactctttctgcctgctacanaattcgacttgaactttttgagtcaacggaaattgcgccctttgaattgatgaacgaacggaccaatgaaacgttgacattggataaagaagaaaacgatgatggatgtatcgtttgggtgttgaagcgttgccaaattggggggacggttctgtgggaggacaaaaatttggataatttgaacaatgtcgactttttgctttttgaatttgggtgagtggcaacagcacattttctttgtttaaaataattaacattatttcacttaatttaggccattgtctccaccaaaggcgggccaaatgaacgcaaaaagtcgtctgaaaatgaataccgggccaaacgggagaaaaaagttgatgaaatatgtattgggaaatgaccgatgaatggaaactgatctgataattgctcttatttttaatggtcaaatgttgaggcaaaaaaggcaatgatgagcaaaaggaaaaggacaaattgcatttaaaaataataattataataatattattagagcccggacgggaccgggccccgcggggatttaaaaagttttgttatgtgacggaaaaaatttatgattgaaattcatcacattccatttccttcccttcataagcatcttaaattcataaagtgatcacaaattaaagggaaatgaattatttatatgtttaaaaaaatttccacatactcaaacaaactttgatttacaacgcttcttttacgtctgattttgctttttcaacaatgttgactttgcattgtgaaaggaattattttgaaattgaagcatcattaatttatttgacgtgtttaatcttaacttttatccaaaaatctaaaattaaatttttttatgacttttcaattccgagacctttgcatttatttttaataatgacttgaaatgaacataccacattgacattatgaatatatttattcgacgcctcatcggtcttaaaaacaaaacccaatttttaaaaaaaaattacgaaatagaaaaatgaaattcaatttcgcaaattacgaaatttgatacaatttcgtattttttatggtccggcgtgaaaatttttatagatttttacattcatatcaaaattttaaataaagacatttcgccaaaaaaattattaattttttcaaatttggggcagtttcactggtgaaatttagtcccgtttttccggcccaaattcccgggatcgggaccgggacttggaaaatggacccggacgggatcccggcaccgggactcccgtttttccgggactcccggtcccggcggtttgcccaaaaaacccgggaccgggaccgggagtcctggcaaaatcccggcgggatcccggtcccgtccgggctctaataaatagagacaaaattaatagtataagaatacaccaacaaaaaaatttaatttataataatggaattatatataaataaatgtttaaattattaaaatttaaaaaaataaaaatttctttttattagcgacataatttttaaatcctaaattaaaacatttattaattatcttataaatactcagcataatttaatttagattattgaccatattatatcagtttttgtattataaagttttcgaaattaaatgtattagtgaaacttttgaatatttttacttgatagtatttgacacattcgaaaactcgtgttagaagcgtaatgcacaaacattgatattgattggtcaattttagttttgtttttctttgttattatttaatttcttttagttaattacaataaggttcagtttaattttatgtaatttgatttagattatttcgtattttatatttccttcgtaattaaaatattttgtagtttttatgaacgcttgaaagttcattactttggcattcggcactaattgaaaaaccaccagttttgatgccgttgaagtttgctaattgttattctgactccataattacatattattagagcatgatgttacttcctgttgntaaagtttgtttatatgt

SEQ ID NO: 21504 - DNA, 1617 bp, Heterodera glycines
ccccccgtgtccatcgctttcgttcatttccctcccccgccttctcatctcttcgcccctccttgtcccatcaccccctctcagcaaattatgcgttgaatggccaaagtgtccattacgcaacattaaagtgtaagggatgagaacggccgcagaatggcaacgccaacggcgaggattggctgccgtaaatcgtttggcgctacagtggcttggcttctcacgcccatccactggcgtccccccccaagccattccctctgtcattttgttttcattcttcatttctgctcaactctactccgccgtcagccagccggcacttcaatcatcggcttccatcaaatccccatccaatttcgtttcatttttgaaattcgaatcatttccctcccccatttccatttctgtttttgaccaatttgtccctcatttattttgattagtccaccatttttcattgaaaattggccgtctcctacagttcgcctctgaacggcccccaaattttacccaaattttcccttggccaatttcccccatttcattttaaccgcatttatttctggtcaacacttttcactttctggtcaattagccccttttcaattctggtcaaatccccattttccatttccctcattgctcaaaaatgccccttttaattactgagcattccatttccctaattatccattatttatttgcgcacttcgtctgatcgtgtcttccctcatttgtcattgatcattttgcgtgtttttgagcacttccatttcccctcatattcatccgatcaattatcccatttctcttttgatcagtgccgcccccgcccatttattgatcaaatgacacaaatttattttggttaatgccatccctcaattttttttttctcaaattgcgcgcaattctgagcagcgtatcccttcctctttaatcagtgccattcttcccccccccattttcttttgatcaattttccctcattgatcatgtgtccctcattttaatttgatcaattggccctcattgatcaattgtctcccatttttatttgatcaactgtcctagtcagtcccatcccgcatttcttctgatcagtctcccacccctctattttcttttgataatgaccctatttattttggtcaatccccgtttttggtcattgtcaaattgctcaagtcttccccagttcgcctctgaacgaccccattaatcccgaatttttcccttggccaattctaccccaaattactttaatctcttctatttctggtcaacaacttccctcatttttctggtcaattaactcctttcaattttggtcaaccccccatttctcatttttctcattgctcaaaatgcccttttgcgggcaattctctgatcagtggcatcccttccccatttttcattgatcaaaatgtcccaattttttttatcagtgtcattccccattcttcattgatcacattgcgcacatttcgcttgatcagtgccattcccccattttcattgatcaggcacattttattttgatcattaccttccccatttttttttcttttcttgaatcaaatttcgcatggcttttggtcagtccccttc

SEQ ID NO: 21505 - DNA, 1738 bp, Heterodera glycines
  unsure (1)..(1738): unsure at all n locations
tggtcgagctggagtcgggccaagccctggaggagatcatcaatttttggctggttgtgttgcatttgtgtttttcttttgccttcattatttttgaggtcgccaacccttttgttggtcttatttntcattntaattggaaaaaggggtgtcgtttccgcacgactcggcttactggtgaagcggcgattaattttcatttctaaatattaaccccaaattatttactattttggcaaacggaaatgaatggagtaattatgtggtgacgatatgtgctttatacgcatgtttatttgctggcgaatgggaggagaatcggaaaacaaggtcatttggccgacggccttatgcaccaaatgaatttgccgcttttattggattagcatattagataatataagtagataactttttatttaaaattactgttcctaaaaaggcggaaggagtggaaggaataccaaatcatccaattcgttatgtaatcaaatcaaaaattatttgagacccaaaaaaggcaaattactattattgcacataaatcggaaaccaaatttattaggagacaaaataaaataataaacattactgtaatgacgcataaatcggtaataaaattgagagagcttatgttttaataatacaataccaagtctatactgagccacacacaatccccaattcgtacatggtagaacatcgaaatgtatccaactttcttcatgagatttgaattgtagaggtgatagacttcgttttcatctgaacggatttgaggatggattccaccgcgcaccatcactctcgccggctgcttcagacatgcgggtagatcggttggctgcattgtgcccaagctgatgcgtttgcggacgctgaatgggtttgatgacccaacgacgtactcaatcacccgcccacataattccgagaccgcagcgcacttaaaaattcaatttcaaaataatatttatctctcttccttacatcattatttgtcgtatgaattaaaatgtcgtttggagccaaatttttgttgtattttccaaagcataaatactgtagaatttccataaagaattcggccgaaaataactgctcattgacagggaaatacgccgaatccaaatagtcttgctcaaagttcaaattcctcacttcacaagcagaattgaatttcgcattaatgacagacttaaaatttttttcaaaaatgtatggaaactaatgattaaccagtcgatttttgaatttattgtactccttttctcttgattgacgcaaaatctcaaatttccaattaactgggtcaatcttcgaggaccatcgatttttttctatataattaattacaaaaaataaaataaaaagtcattaatacccgctattccgtcaaaaaattgcatcattgggaggcacatgatcagctctgagactaattcagtcggaagtgttttagacgggaaaccatagcatttcattttgacaaaatattataaatgattcttgatttttgctgattgccgaaaaacgtcgagactggtacaaaagtgtaagctcggagggacctctagcatgaaaatgggcgtggttatctttcaacacaagccgttctcgaaactcactcattttacacaccttgtctattcgagaaatcattctatttttttacacttgctcccgagtcatcttttattccttccctccctctttctcatctatttatttaattatt

SEQ ID NO: 21506 - DNA, 2152 bp, Heterodera glycines
  unsure (1)..(2152): unsure at all n locations
aaaaaaaaaaataaaaataaaataaaaaataaaaaaaaaaaaaaaaaaaaaaataataaaaaaaaaaaaaaaaaaaaaaaaaaaaaaaaaaaaaaaaaaaaaaaaaacccccccccctccccccccccccccccctcccctccccccccccccccctctttcttttaaataaataaataaaaaaaaaaaaaaaagaaaaaaaaaaaaaaagaagtggggggtgtttgtgtggccccccccccccccccccccccccccccccccccccccctccccccccccttccccaaaaaaaaagaaaaaaaaagaaaaaaaaaaaaaaaaaaaaaaataatagggggtggttttttttccgcccccccccccccacacacccccccccccaccccccacccccccccccctcttttttttttttttttttttttttttttttttttttttttttttggtggggggggggggggaagaaaaaaaaaaaaaaaaaaaaaaaaaaaaaaaaaaaaatacgctcgccccggtttcgtctcccctctcccctttttttcttttctttttttttttttttttttttttttataataaaataaaaaaaaaaaaaaaaatctcgttgcctctncgccgcccagggggggggggcgaggggaggggggggggggggggcccgccccccgcccccccccccccccccccacaaaaaaaaaaaaagaagaagaggcgcgcggggggggggggggggggagaaaaaaaaaataaaataaacaaacccccccccccccccccccccccgagggaaagaaaaaaagaagagaaaaaagaagcgccccccccgccccctcccctccttctacttttattttttttcttatttatataaataaaaaaacanaaaaaaaaaaaaaagtgggtggtgtttggtgggtgggttgaaaaaaaaaaaaaaaaaaaaaaaaaaatctctccgcccccccgccccctctttatttttggggagggggggggggggggggtttttttttttttttttttttttttttttttttctcaagaaaaaagaggaggggggggctcccccgggggcgggtggtttaaaaaaaaaaaatatttgtgggcctcaaaaaaaaaaaaaaaaaagggggggggggggggggggggggggcccccccccccctatataaaatttttttttccccccccacaaagggggggtttttgggggggacccccacatattttcaggggagaaaggaaaagaagatttttttggggaaatttttttttttcccgggggggggggggggggggggtttttttttttttccccccgtttttttaaaaaaaaccgccccctttttgggggttttttttgggggggggggttttttggtttttggggggggggaaaaaaccctcacaaggggggggggtttttttttttcaaaccttcttggggggggtactcttgggaaggggttttttttgggggtttaaaatttttgtttgggaaaaaaccaaagtggggggggcgggaaaacaaaaattacaatttttgaaaaagggacgggggattaaaatgtggaatagcgggaatcagggaggggcattgcataatgcaattcttttcccagggaacaaacggctaagttcgggtttttgcggcgaagcaaaaatgaggggggaagggggagcaaaatggaatgggaaggggacggacgcttgggcggatcgaagttcagtgggaggggacgatgggcgagancaagnaagtggggagcatctgcatctgctggagcgtatggcattttgtgaacgaacgatgatgatgaatcggatacattggaagatatgtgataattgtttgattgttcatctctgtacatatgcccgttgtaaatatacatatatattgtattgtgctcttattgtcctatgtccggtagataaacgatatgaattcactttacatttttagtgccagtttctagtcttataaaggccatagaaattttgaattctgtaatttgacactccgtctgcattctcccttttgcgaaatttattgaattcgatcattttaaaatgtatgaaccaaattctccccatttttcttagttttgaaccgngttcaaaaatttaggttgaccnntgcagg

SEQ ID NO: 21507 - DNA, 2364 bp, Heterodera glycines
tgtcgggtccccaaaagtcgggtccccaaatgtcgggacttccaaatgtcgggatccctaagtgtcggatccccaaaagtcgggaaagtcgggtccccaaatgtcgggatccccaaaagtcgggtccccaaatgtcggaatccccaaatgtcggaatccctaagtgtcggatccccaaaagtcgggaaagtcgggtccccaaatgtcgggatccccaaaagtcgggtccccaaattaaccctgcggcattttttgtcacatatttgcggaccattagcaaattctcgaagaccattttcatgagtctctagacagttggcaaccattagcattaattgctatgagatagatatatcaatgaccctggggcattttttatcacatatttttgcggaccattatcaaattcccgttgcggaccattatcaaattcccgaagaccattttcatgagcctctagaaggttggcaaccattggcattgattgttatgagatatcaatgaccctgcggcattttttgtcacatatttttgcggatcatatcaaatcacgaagaccattttcatgagcctctagacagttggcaaccattggcttgattcctagccgcttgttggaattttttgaacctaccaaatacgcgtcccgaaaaattctgagctgatcgggaaacgcaaacccaattcgtcgccttttcgtctaattgatttttttgtagtttggtacacaccttcagtgtctgttattgactgctgatcgattcttcctcattcattaactcattcttcgctcaacattctgtgaaagtgttccttcccctccttcctcctcaacggttcattcacaggacggggaatgagaatgaacgactgactaattgaggaaattagcggaagaaagtctgctgacccaagcacaaaaggagagaaggagcctttctttctctctctctctctttcccttttcaatcgcctttaatttttcgtaaatttcatcaaactttgccctttcgtcgtctactgccaatgtttcccccccccctccgtttttttaccatgaaaaggtcattcaaaaaatcaacccaaaagacatttgcatttatttgtctaccagtttaaaaataaataaatgaattgattgttatggatggggtgcacttttcaaatgatattatattaaattgaaagcattttataacttatatgtacatattaggtacatttttttatttatccactttttattggtcccttccttctcacacttcttcctctgacttaacatatcactcttttcgccgtttccttctgccgatggatttggtcgcttcgtctctgcattatgttggcagtttttttgacgtggtatacaaatcaaatcattcaaattcatcgtcattttccctctcaaatttcgcgtttccttaggtcgatttggttgtgatcggtgcgctcgctgtctttgccattgcctattatgtcagaagtcagtcgctgtccgcgcacaacaaaatcaaattcccggagagcacgccgacgctgcgcaacggcggcacgctgcaggacagcggcaggacggaccgttcctttttgggccgcatgaaatcggaggaccggcaggtgcattcttttttgtttcatccttgaaaagacccctaatgggggtagtgaaaccctggttacagaatccatttcgtccacctcccccatttttgaaatttcccttaattctggcacatattttatgtcaaaaatggaagaatttaatttttgcttttgatattcgtttggcaaaaataaagtaacgcaaaacaatccactgaaaatgtttgccaaatttaatatatttcatcaatttaaaatgctccaaaaagatcgtttcggcacccttaaaatttttattcggctttttttgaaaccgattatgctaatatatttcttctcaaaagcatttgccttgtattttttacatccccccccataaaactcagattttgattttgttcggctcccaaacgggcaccgccgaggaattggcaggccgcatggctaaggatttgtgccgatacagcaaaaagtcgttgctgatgcacccggaagagattgaggtggacgatttgccgaaaattgtctgatctgtccgacccgacgctgctgctgctcgatcgccacttatggcgagggcgacccgacgaacaatgcgcaggcacttcatgaattctttaccaacgccgacagcgaactgaacggactgaaatatgcggatagagttttgtaatttcaggaagaaaccaaactggggcggaccattctcattgggtgattagattgcggtccctaattatacttttttctggggttttc

SEQ ID NO: 21508 - DNA, 1658 bp, Heterodera glycines
cttatgctgtgacaatgaacagttcgatattttgaaagagcaattggaacgcgcgcgtactattctctggcattgtccgagctgttacgcaaattttgtcaacttttggtgggtttgaatacatttttaattttacaaatggtactctctccgtccaatttaaaattgttttatgttgataatgcaggggtgcgatctgttctgatttgtcagaaatgttctatttggagcgtccaaaaattttttgaaaatacgcgccgcaaaaaaagcgtttttaaagtaaaaaaaaaattgttgcttggcttttatttgcaaaaatcggcttttttgatgacaatctgttaagaaatccgaacgaattacaaatttttccggcggcgcctatcgacaccgccggacactctcccatcgcccatttccctaaagttttttggaaaaatccgcctgcaaaaaattcttaaaaatctgattttttgatcagtgcactgaaatttacgaaataatttttgattaaataaatagtaaaaataactgatttgaagcaattaagcaaaatgttctggttttttatcccaaaatctgatattttttgcaggataataaaaaaactcatagagctctcgaaggataacaaattcataacaactttgactagtaaagaatttatatctcagaatgctggcttggttatatttttgctcaacaggtgccaattcgcgtgttcgccgtatcaggcacaatttgtggaaattgttgagacgcgtaatgatgccaataaaatacgtggcgatgattatgtgtcagaagtcgattattatgtaatcaatccttttttgcggataacaaatgtttttatatgacactttttaggtaaccaagcgctatgccaacgaactttttgattcatgcaaaactgtaagtccaaattctaaaaatcaataaataaactccaaatgaatgattgaacattcttacccaacacattcatttttccaatacttttcaattttcccattttatttattcacagtatttgttcgctctaatcctcccctttttctcttgttttcaaaggtgcacctttcgacccttgacttttcgttgagagttctctgcggcactgatattgacctctgcacgccggaaaagttgtaacatttatagttgctaaaaacttcaaatttaggggtgtaaaatcgtaaaattttaccaaaaaggtaacaaaattaagtcgaaccagtattgagataaataatttttaaaatcacaaattcatgtcaaaaaattaataaataatttggagatgaatttttgagaaatttttcatttcataggggtgcatttttgaaaaaaattttgagtcgattcttaagcgtttatttttgaaaattttcaaaaagttgatccttaggggtgtattttttctttttattgcatttttgttaacaaattttgggcataacgtcaaaatagttgaaaatagtttttttcaaaaaattttatagttttttagttgctaaaaataaaaaactataaaatagttgctaataactcgaaaagtagcttaacaacagccgaaaaacatgtgtttttcgtgaatttcaggctacggggagctcaggaaaaaaatagtgaaaaaactataaatgttatcccta

SEQ ID NO: 21509 - DNA, 2004 bp, Heterodera glycines
cgacagataatcgttttgcttagaccattggaactgtcctcctcagggacgaggactcttttggaccgaacgcaattgtctaatattttacgatggacgacggcgaaggacactttgacgtggaaccattcagcggccgagtgtttgtgcgaaatgcgcgactggccgatctgctggagggggcaaaagggcaaaatgggcacgatttttacgaacacggcaagtgaaaaggcaaaaaaatgtgaaggggggggggaagcgaaagattacggcatttacaaatggcacaaatgggggggggaaaggtcaactgtacaaacgaaggtagtttcagtgctggaaattgtcgcttctgacatggcaattcatcccgagcagcgcaaaactgcgcgacaacattttcggattcgaatccgcgacgtcaacacgcactcgccggtgttcgaccagtccggctaccgcatcagtctagctgaagttgtgacatcattgaaaatgatgacatatttggatttctatttttgatgtaaatgcattttcgtcagggcaattcacccggcattgaactgctccaactccgtgcgtcggacggcgacttgggtaaaaatgggcgcgtcgagtttcgacttgcggttgagacggaccttctctcggtggaccccgattcgggactggtccgggcggagcgcacttttgaccgggaggagttgggcgaccgcgtcactgtgccggtgatggcattggaccggggaacgccctcccgcgcgacatttgccaatctgaccattcttctgacggaccaaaacgatgaagcgccccaatgcggcaaggaaacgcatcgcttttccgttgcggaagacgcgcctaatgggcaattagtgggcactttcaacaattttttggtcaattacattcccaaggtcggctgtttggatgcatatgattcggatgagtttggcacttcgaacagccaaatccgtttcgaattggcacaatccgatgccaacgggccgttccgagttcatgccgagactggctgcctctttttggacctccccggccttccacttgactttgagcagcgttcgacgtacaatttgagtgtccggctaaaagacatgggaaaaccgccgcttgaagccgttaagccttgccaagttcgtttttctactcccatttcgatttaattaaggtttaaggtccaaattctgctcgaagatgtggaagagaatgcgtttccgcctcaattcaacgccatggcacttgaggcgagcgtggaagagaacgcgccggcgcacaccgaagtgatccgagtgcatgccgaggaccccgaaggggccgctgttcggtaccgactggtcgccggcaacggactttgctgctttcaaatcgaccccaaatcgggagtgatcagcacgaaaaagggtgagtaacagacaaacccgagagagagtgatagcaaacaatatttgcagaacttgatcacgaactgcaacagcactattggctgactgtccgtgccgaagacactccgttcagtgccatcggccgaatgcttcgcgcccatcttcagctgtttatccgcgtgctgaaccaaaatgaccgactgccactgttttctcagccaatttatcggattggaattgcggagaattcggaggaaaataaggcaaaaacggcattaatgcagagatgccagatcatgtttttgatcatcaaccgagctctaaaaaatcccatttcataattaaaattcgcaaaaaaaaacctcaacaggcgatttctgactgggaaaattttgaaaattaaaccctcaaaaactgcaaaatccgtaaatgctcattttcaaaagggcctagtcctcatatctgacactccgattatataaattgacatcaatcaagaaggttttgattaggtggtattgaaagtggaggccacagacggcgacgatcagtgggcgaagccgagtcagcagagtgatcggctgagatactccattct

SEQ ID NO: 21510 - DNA, 2380 bp, Heterodera glycines
tttaattatatatatcccttccccaatgttcttcatttattagctaattcaaattttcatatttaagaaagataaaatttaaatttatcttatgaaaattttatcaactctaatcctgtttttcccattttcgtgtttttgcttatttattatttcgtgatttgatatataaaaataaataaaatttgtggctttcaacgcaacgcccttgttgtgatgtcatgatttttgcgcatttcgcgcaacgaccgaacaccgttcggttagtgctcctggaaccgtaattttaatccagatggatttttacgagattccagacaaacgctctcgctcccgccaatttcttaccaagttttcattattatttttgctttgtttaatgaataggagtttttttctttatataaattattttttctagtaattttcattttttaaaatttaattattttctaagtgaattaaattcaaggtcacattattcttgaagtttctgctatcatttagttcatttttctacaataaacagtcatttttcagcttaaaatttataaaacttggaaatttaaagaacgaaattacattaatgaatttgatagtatttttatcacataaatatatttatcaacaaataaaaatctcaacaaaataaaaattaatcagaaattgttgtttgaacagatgttccagattatttgcagtttaatttaaccaataaataataatcaaaaattcagaaaacgtaaagagaaaagggacaaaaaggcgtgttgagtcgatccaaaaaaaaaactcagtgaattaaataaataaatttaataatccaattcacaaaatcacggtgctgtccggtctgagggtccttcggcagatgtgcccgacccatgacgtgttccaagtgaatggaccaagaaaaagacccggcctgggagataacccttgaaaaactgaataaaaaattgttcttaaccaggccggtccggattccggatcaggcacttttgatgccccggaagaggtgcgatcggcttccgggaaaacgaccaatcaatcattgagtttttttttggatcgacctagcacccaaaaaggaagcgaaaagtgacggaagagaacacaaaagtgaaagtgatcagagaattttataaatgataaattgaaaagaacgctttaaaagcgaaacagaaacaaaagttcaaagaatggaggagaaattgaaaatttagggatatatttgatttggataaattttaaaataaccgaattttgcaaaatttctgatatttttgacctattttcaaatattcaattttcacgtgaaggttttcagtttttggcacatttatttgtgcctttatatacttcgtggtgaacaaaaattttcgttttcatacttttcgttcataattagtggcttaatgccgggatatttaatgccattaattgacagctgctgaactgcagtgccatgataagcactaaattatgcggttttaattattttttgcataattattttttacccaaaaaatgattcaccaaaattcaaaagaatttaactgttaactgcccagcccaacaaattattctgtgaatcattctgagaaaccacacaaaaattgtcactgctgttaaaccaatccaaatgcttttggttaaccataattttaagccatttaatccaatcattctcattttaactgtggtaaattgtaaaaatatttaattaatttatttatttattttttaatacagcatacactgaaaaaaaatgttcaaacaaatgaaccttttcgttttattttttattttttcatcatattcttttggcactgtggagggatcggcttttacggatttttttactgatttgggcaataaggcttgggtgagttaaagcgtttattcctttgcattttttttgtttctaaattaaaaaaaatatacatttaaggaaggattgaaagaagcaggagaagcaatcttggatgggataaatgaagcaacgaaggcgctggttatcccagggtgggaatgtgggccaaatgatccaaaatacctcgatggaccgtcacacgtacattaattcttcgaacatttattcatacatacaactttttaagcttgcaacgcaaacaatggttatgttcacaacctgtgtcttcaaaatgagttaatctatttgaaaattcacaaaaaaaaacaattgaatttagctgaaatcaatcaaatgttgcaagaccacgacaagtatgtttgaaaaagataggaaaaattaagctaaattttattgaaaatcaatgaaaaataattgaataacaactcattatttaatgttttttttgccccaaaacataaacccgaattaaaattaataaaa

SEQ ID NO: 21511 - DNA, 1833 bp, Heterodera glycines
atgaaaggtaaattaaaaataccttctgattttgctatgaaaatcagaatttttccggttattaagtttgaaccttaataatcagaattattctgacatgaaaggtaaatcaaaaatacattctgattttgcagtgaaacccagaacttttccggttcttaagttgaaccttaataatcagaattattctgacatgaaaggtaaacccaaattattttgtaatgaaaaccagaattattccggttgttattttgcacctcaatgtcagaatattctgagtcatcagaatactactgaacatgaattgtaaatcaaaaatacattctgttttgctatgaaaatcacaactattccggttcttaagttgaaccttaataatcagtattgttctgacatgaaaggtaaattaaaaataccttctgattttgctatgaaacccagaacttttccggttattaagtttgaaccttaataatcagaattattctgacatgaaaggtaaatcaaaagtacattctgattttgcagtgaaacccagaacttttccggttcttaagttgaaccttaataatcagaattattctgacatgaaaggtaaacccaaattattttgtaatgaaaaccagaattattccggttgttattttgcacctcaatgtcggaatattctgaggcatcagaataagcctttgattcccgaagattgcaacggtcggttcgaactgcgcgggtgggcagggctcagttgagtcacaaatgatgggtatattttaaaaaatgcccaaattattttgaaaattaggttgggaccggtaattttaaaaaagccggacatagaaatgccgaaaaccaaaaaagtcggcattggcattccgatttttaaacataccctcaatttgttgtcgataatcaatgttgtagcgaagaattccaaacagactctggtcctgtcgatggcaagtcaagttcggaggaatgggcatataaacgcacttaatcgtctgtccaattggcaccatacagtcgggctcggcggcacaaagcaaggccatgcaattttaaattattttatttatttcaattattattgatttaaaatctttattggtctgggatttaaaatacgagaattcttataaaaaaaaagaagcatttattatgcttaagactgggtattttcacttgtcaccctctacccccccccccccagattctttaatcatcttttatggtaatttgaaggctgaaattttggtggactctattttaaccaagctcaaatgtcaaaagtgaaaatacattgttgatcactaaagatactcaaaataaatatttctaaaaaaaggattgttaattcggcgatgttgctatcgcgccaataaaattttaaaatttttaagagattttaatagttttttgccaaaaagaaaattaacaaaaatcctcaaatctcaaaaaatcacaaaacacataatcaaatattcttgttcaaatattagtcaaaatttgacactttaatgggcggggttatgaagaactacaatttttactaatgttcgagtctaacttttatcccaagtttcattttatcgcagaacttaaagccgttttttatttattttaaatttgggcagggggagtcccaaagcggtgtgtaacatttcaaaattgagccatttgttctctctaaaaagcctcgccatttcatcgtccgccgctggggttttccaaaaaataaaaggcgacaaataaagtttagtcataatttgagacggaaaatgttaaggaaaatgaaaagtgaaagaacaaaatgacaaacatcccagccccttt

SEQ ID NO: 21512 - DNA, 1904 bp, Heterodera glycines
taaaaaggacgcaccagtcggcccttcataaaggtgaacaaagtgcgccgaaagcggctcaacgtgcacaccaactccacgtggaggacagcgacacccggacgcacgacccatgccaaaattcggtccaacgggcaaaagtcggcaacgaatttgcgacattgcaccgcgagcagaagcgcgtcgaacggaggcaacacgtctttgttgctgtttgcggtgaagaaaaagtcggcggcagcgtccaaatttggcggtggcaatgtcgcggaatgcgactgcggcaactcgctctaaaattgttccgatccgtcaaaattatgtgaaagtcaattgcaagaatttgctcaccaaaagttgggccaatgcccctacgtccagcataaatcggcaagtaaagtccgctgggaacacgcccgacccatccgcctgcacattcggaaatttgtgcggagtttttgtcgtctcaatgtcaaaggcattgctctgtaaaaaaaatttgttttattgaacatttttcggcatttccctcccatttctgctaacctccgtcagtgccgctgttttcgcgttgggctccgtgccgagcacatgcgaccgaccgatgatagcgcacagtcgcgcgtcgtcttcgccacaacttccgcctttgttcgacatgaacaaacgtctcccaccgccgaagtcgtcgccattatttccgtctttgtgcaccattgacgaacgtctcccaccgccggaatacatttttaagctgccgataaaaacaaggcttttgtttgtagtgttttgagagccccgggcccaactccatctagtgaaattgcgaccactcattagagcagttaattatgtggagaaaacaaaactgtaccgcaagaaaatgacttcctccggcggcacgtccccatcgtcttcaaagcgttttcccacgacggagacaaacaaattgaacagtaacacactgtcgccattgtcggcgaagaaaaagtaaacggtgacatcagaaaagtcggcagtggcatccaattcggacggtggcaatgacgcggaaaagaactgcggcaaatcgctctaaatgtttggatcagtaaaaatgccaaattgcggttggggttttcttaattccctgaaaaatcccacgatttcccgtccccactttcgtcacatttctgctgacctcagtcactgccgctgcttttgcgttggcttccgcgccgagcacatgcgacagaccgacaaaagcgcacagtcgcatgtcgtcgtcgccattatttccgtctttgttcgccatgaacaaacgtctcccatcgccggaatacatttttaggctgtcgatataaaagcctttaaaaagacaaatatcaaaattttcggccaatgtaaaacaaatgggttgtgctttatacgttttaataatataattaaattgctaattagataacaatacattcatgtacacttttatacaactgttcttcaactttctgttttgtccactagttttaatacacgcaaacacatgtgtagatacgcgaaatacactccttaaaatcggcggaagtgaaagtgtgaaaggcgtataaaaatcgatatctcattctacagtatcctttttatgtattggttgctgcaggaggtagagaaaagatgaaaaagaagggagagagagagatggacaaagacggagaaagcggggaagaaaaagaaatagagaaatatcagctcactcatttatacctgaaaattattatgttagtaagactaaaaaaattattgaaatttattagagtcaattaaaggatatttgttaaaattttattggttttaataaagcatcaattacaaaaacaaatgattaaatttaaaggtgtcagcgtgattcaaaaaaagaaacattaaat

SEQ ID NO: 21513 - DNA, 1998 bp, Heterodera glycines
cgaagcaccgtaatttgaggacaaacagtcgaaatgaatgaatgggccaaatgaatgaattgagtgaattggacgaatgaattaataatttacggtccgtcccatcgccgaccgatgaatcaaaagccatggattgcctttgactgtaaaacgggagaagcaatgtgatggtcaacagaccaaaaaggggtaaaaaggagaagcatttggcactgtccgtgccgaacttcgaattcgtcactctttctctgatttttgctgaatgccttttggtgtcgtcatccatcggcttacctccgccattaaatttggcttttcctccgccattaaatttggcttttcctccgtccattcgttcgttcaattggctgaccaatgagtttctctctgatgaggcgacagatcatcccttcccatcatttgtgtatgttttcgacagatttgttgcacaaaaatgggaggagaggacaaatgacgcggtcgagagcattgggcgatcggtgtcatggagggattgcaccacaaatgccccaattcgcgccaggacaccccaaaatcccaacaaatccctcccctcagcgaaggccatctcaacagcttaaaaaatgctgcagcaaatgcataactttgaattgtattccgtcccattgtttgggtgaccaattaattaattgacctttttttgttaatcgatgataacaattaggacaccctttagagcagagatcgcatcaaaaattttccaaaataagcatatcactgatcagagaccaaaaataatatttttggagcattaaatgcggtgattataaataatttgtaaattattggattaaaccaatttatttttgatttaaaatttaagcttttgggccgacggtgtcgaaaggcgccgcagggaagatttttgaaattaatgcgatttgttaacaggttttcaataaaattggcaattttaaaattaggtaaaattaatattttttaaaattatttttataccaaaaccgaagaaatatgtataataagcacgaatattccaacatggatccaggtcaaggtttttttttcaaaatgtaagctctacaaagaaatacaccccccccccccccctctccctaaggattgattttaaacgtatgaacttttctaaatcaattttatttatttattaattctgcatctcccgtagttttataatatttgtgtgtgtattttgcattttgtgatttttaaaatgcaatattaaggctttttgtttaatatacaaatgattgtcctaatgtttgcaattaacaattaacaacaaattgctcacttccgaatttgacttggcattgtgtgcagcgaaagcgccgaaagtgcgtttgcatgcgatggcggctgagggaggacgaatgacagaactgtttgagacaatgggagcagcgaaaagtgcctgaagaagcggcaaaatgaggccaaagaaaaaagcattggcaaacagaaaaactgagaaaaacgaacggacgaagcgaaatggccaaacctttcaaatcgggacgcttcaggggagaaagaacgcccgaaagtttacggcacggccctccgcccttttggcattccatcgcagtgaaaagggcgaactcagtggaggacaatgtcagctgacgagtccatcccaatgggtaaatctgtgctgatttgcgaatgcgcttttgctgtctaccatcgcttccttttaattcactcgaaatgccttcagcaaaagttcattttggcgatcggttgcgcaaatgcttctggtaattgcaatggaagagatgggcggaagaagaggaagaagaagaagagaaagaagatgagcttggagaggcgaggaaggcacttccaacgaccgaccgacagatcaacgggtcccttccccccccccccccaaggctgacccgaattcaatcgcggaggactcgtccacccaatcgacggcgctaaatgcactcacctcctaatgaaaagaaaagg

SEQ ID NO: 21514 - DNA, 3363 bp, Heterodera glycines
aagccactttcaaattgcaatggttatcggacaacgcccatatgatgagcgcgccaagtttggccccaacgggatggctataagcgaacatttattgttagacgaatgcctgaccttggaacagggcatgtaaaacatttttgaataaattttcagcgatccatttttttttgcttgaaattttgttagaaaatttttttgcagaacaaaggttgccgataaattttttttaacttaatagccgaattctgaattttatttttaatgcaatcttaggtttttcttggaatttcttgaaatttttacaaaaaaattacaaaaagttcgattaaaatttgtttttcctggtgacgttatgtttcggcgaaatgcatttcagcagcaacatttatagtgcaccgttccgacccctacgaatttttttccccctctgatttaatggaatctcttacttttgttgccgttcaaaaatgagacgatcatgttatagctgagcgggctcaatttgttggcatctttcaacaagccgttgaactgtttcagcgcttcattcttaaaagcagaaagaattcatggtggtcaattaatttattctattcgaaccctgccaaaaaactataaatataattttgtgttttttttttcttggtcatattcctgacggtcaaaaattaaaataaattaaaaaaaaccgttacattgaaattcgtctccattctgggcatttgttgttgttgttgtaattgctgttgttcagtgcttatctccgcaaacaaattgttgaaacatgcgctgctcgttgacgacgctgaggaggaggaggccatcattgtgctgcttgggttggttggaaatggatgcgagccaactgaaagaggggacaaaatgatattaattgtaagaaatatggtttagcttaattagttcgaacaattaaactgccagaattgtaagactgaaactttaaaaaaaatttctggttggggaggagaatcggcgccaattgtaaaaaaaatcgtggggctcaaaattttttttgttttttagatccaagttcgaatccattactatgtagtaacattttattttattttttaattaatcaactgttcaagtccctactgatcaattgagttcacacaaattcattaaaattccccacccatcggtcgaattggaaccgtttgttgctggtgctgttgctgattgacaatggcattgctgtactgttcggaaatgttgttggtggtgttgttgttattgatcaagcagagttgtgcagccgatggatgaggaggaagtgcaccaccaacattgtcaccgtcattaaccaagccaacattggcaccaccaaaagtgccagtaattggaaccagaatagcagaagctgaaatgaaaacagaggtatgaatgtcatatactgtattataaaaaagaaccaaaactttgaaaaaaaggtacgccaccgccaaacgactgaattctattttttcaaaaatagccacaaaatagaatgatattttttgacgaaaacaaacaatgtttaactctctcgaagtgcatggaaaaaatgatttggacccgaaaagaaaaaaataaataaccgggttgccatttcacaaattttcttctttttttgtttgttacaggcatgcgcaaacaaatatcaaaagcccaaaaagaaaccgtcatttgcgccctccggcattgttttgttttcgtctccctctttgtcgttgatgttgttgcattcttctgcctcatgtttgcgctgttgtcgtgccgttttctgtggcgatttagccacagttgcgcccaatttgttgttgttcaatgacgagtgtctctggttgttgttggtcagcgaacccttctataaaaaaatttaaaatttatttgtataaaattcttaaacaaaattgtttaaacttgaatggatatgaaacactaaaaaaaaaaatttttttttgccctacaaaaacttaaagtagtttacttactatttaaaaaataattttttttttaaatttcttttaaatgatcttctagaccacgagatctagctctctacggatggtggtataacccgaattggaaatcagacatttacagatcaacaaatgcagtccggcatttgcacttcgaacgtttgcggcacatgacaaaatcggattttgcggtcaatgaaattttttttggaaggggggtcccaggttcgaaccctccccacgacattgaatattcttttctttatatattttcctttcggaaattactaaacacaaatacatatgaacacgatcgtaaaacaatttcttcaaaccaaacgagacaaaaaaaaatacccgtaggttttgttgctttggttggtcccccccatccgccattgttgccaattgtgtcgtttgtggtgcccccgccggtgccgttgatgatgatggcactgctgttgttgctgcagttacggtggtccgccggcgtttgttcggctgtggcaactcggcaatgtccagcaattgggcaccgccagcccgcttcggcagtgtccgttgttggaactttttggagtcagtggtgaacccggtggaccattttcaacgcattggacgatgacgaaagacctttcattggcactgaatgggcgaaaaattttttttttttttttgatagacacaattcatagatgaagcggtggggggggggggactcgctggcaaagggcggccacaaaatgagggaccctaaacacgcattaaaaatttcaagatttttcacgcgacccgccccactggtctccaaagattttttgtcgaaatgtgtaattttaaatttttttttcttttcaattttttttcataaagcgacaaaatttgatatttattgaactcttttccaattccgcacattatcaaaggttaaattttgataaaaactgcctgcaaaatgcggttgcaccgaaaataaaaaaattaattaaaaaaactgacaattattatccaactttttggcacagttccgtattttgattggaaatgatgacatcagcacgccgtgactcttccgatttgccgggttactttgctgttcagcagctgaagacaaaaaaaaattagcaaaaaattccaagcaatttataccccttttgaatttgcaagaaaaaacattggatcggaaaaaataaagtaatcgtccaaaaatactcaaattttaaatttaggaataacgatttttccgggagaggtggacaaaatatcgccgatcaaaacaaaacaaaaaaaatctttttttttaattttcgcgagtttcatttttgcggcttttttggcgtcgaatttttagcgatgcatcggataatttcattac

SEQ ID NO: 21515 - DNA, 2609 bp, Heterodera glycines
gcttacattaaatttttggaatcaggtgaatttccggcaggttttgatgagaatgaaaaagagcaaatgaccattttcgcaattaatttatgtttaaattctggtatactgtactttaaacctcatggacataaaccccgaatttacataccaatttctctcagattattagtattcgaatcttttcataattctccactgggaggcggacatatgagcactaacaaaactgttaaaaagtgccggacacggtactttggccaaaaatgcaccaggatatagcaatttggacaaaagcatgtgttaattgtcagctcagaaataatccaacaccggcttatagagccgaaatgtcaattactccggctaatacactctttgctaaagttggattagatttagctgggccctttccgttaacgataagaggcaataaatatttattaaacattgtatgttggtttacgaaatacgtgatatcagtcccattacctgatgccaaagctaggacgattgctcgggcatttctgactaattgttatttaaaatttggagggtgtaccgaattggtaacggatcaagcaacctcatttacgagtgagttctttcgagaactgtgcagcttgctttacattggacaaaaatgcgcgacacctcattggtcccaaggaaacgctataactgaatgaactttcagaacttttcacaatattttggctatgatgaatttattgaaatggcaaatttttgttataacacctcagttcacacatcaacaaaagaatcaccatttttcctcatttttgggagggatccaatatttagtgttgaccaaattctattcccgacaattagagacccagtagctttggatgattcatggaatttaagcaaaaattggtcaccactttaaggactgcctggaaatgtgccgcagaagcgaacgaagaagcacaattacggatgaaactacagtacgacagatttgtgcgcccgtcaaaaatcatggtaggcgacagagtccttttacgtaattatgccggaaagcctggcacttcaaagaagctgaatttgccatggaaaggtattttccgtgtcgtaagtttggacgggattcacgccataatcatttcctgtctatccccccaggcaaacccacgaaaagtccacattaaccaattaaaactttgttttgaattgccaggacctgcctgtaccaagccaactcttacagaagatgaacaccaagcccctgacagagcggaagctgaggagctcaccaacatgcccgggtattatcatcggcctcaggcaaatgcgaccgaacaaaaagaaacctccgaaaaagcccaatcagaagtggacgacactaaccaagaaacaatggacaacaacaaaaatgaagaaacaacagagaaatcaaggcgtttaagagattgaacaacaatacaacgaccgaagcgcttctcagattgaaaaatatgttaatttaattttttttttaaatgtagaaaatccattagtggaataaaaccagtgacataaaagccgtaataactttactcagacttatcatacagatctgttttatagttcattcgatagcatagagtctcatgaacaatcctacgcgaccagaattttaaaaattttcagtttttaaaaaaattattatgtcttaaaattttgaccaagaaatttaaaaaataataattattaatctttgtatattttaaaattttctataaaattatgagaggtaattattttttaattaaaacctgataaataataaagtcaaagttaacaaatttttaattataaaataacaaaattcacaaatggtcaaactctttgcattccggctggatcagtccaccggacatctcaatcaattctgcacatttggcacgaaaaaatgggccatgatcatgctttgtgctgctgccagcacgcggccactgtcttccctgttggcattccaggaggtgaagaccctcgtgcgcgacagatgacacgagtcgcctcattggcagcgaatggtgcagcgggtgcaggccgacttgcgccggcagactgcttgcccatgccgttgcgagttcctctggcttggtcaaatagccgaaagtcactggccacaattccccttaaagccggaccggtaaaataacctacagtaacctccattttttcaacttttcctttagccaattatttaaggacatttcaagtacaatttaaacccaaacaattaatttaatttgattataatttcgaaacttttcctcaaataaataaatatatatatttaaaatcatttttaatcattttaaataaaaacattaattgcacacatttatgcccctcccctaatggctttctcggccattacaccgatccactgatagtcatctcgcaatttttctttcccattttttcccttttccatccttacaatcattcatttttgcatttggccgtttttctttccccatcttccgccttccccataccaaataaggcaaacttacccaagaattggccgagaattgcccagatttgctggcaaatctcgaagaatgccggatcaccattcttcgccggcacat

SEQ ID NO: 21516 - DNA, 2079 bp, Heterodera glycines
ctcgtcagtcgttcgggtacacttttttgtgcctgaaataaaaaatgtgtatattaaaaattaataaaataataccaataaaaaatttaattttaattgttaccatggcctcgatttgtaacaagtgccgtcgaaggactcgaagtaatgtttgaccaacgggtggacaatggcaccgctggagagcagcacaatgttgcgctcgacaacataggcaatttgtgggatcagacggtctgaaaaagaaggacaatcaaaccatggaaaaatgaacccaaattcttaatgaaaagaaaaaacaaatgaggcgaatttcacaaacgaaatgccagtcaaaaaaaattccttaaaattcaaagtgaattcatgaaaatggaaatgcttatgtttcagggaatttcaggacgactttttaggcaaaacagaattttctcaaaatatttttttcgcgaaaagacgaaacttttatacctttctgaaagaatggcaccaaaatgcgtagtttcaatattgcatattcttctgctttaccccgagtgtcgatgagaagtgtgtagttgggctcgtctaccggcacatcgccgtgcactttctttatccaccactcgggcgccttcgccttctcatcccacgcgatgatcactccgcgatagttgtgaatccgatgccggaccacctgaccaacgcggtattttatgtgcggaggccggggatgtcgtggctcgtcggaacctaaatttaaagatagtttgaaaaaatccaaataaacagggaccaaaattcggactatcaaatatgaaaaaatccaggtccaggttaaacatgaaaaaggctggattttggaaaaaaatttagaatttattatcaggtaaccaatgtattatttgagttatcaaaaatgattaaataaattaaaaacacataattattgtaaattaaatatttttagatttttaagcaattaattgattttttcaaacatttatttgctttttaaaataaacttcaaaaaatccaggtccaggtcgaggcttttttcaaaatttcgagttttaatgatttatttaattctcaaagggtcatgttttgatatttgaaatatttcctactatttttgcaatttcgtacaccgtcataaaaaaaattaaatagccccaaaacggaaatgcatttttaaaatgataaatacctccgaacagatccctgctgacttcgcccttctcccccaaactgtcctcgtccactgtgtcttcttcgcctgcgtttggcatttttccgtggcccatttcctccatttcgtcctcctcctcgaaaaggtcccatccgccgaaaatggcgctgaaataacggccatacacttctctgacttgctgcacaaatctaaaccaattttagaattttatttcggtatttaaatttaatgcaataaaattaaagataatttgctgactcgtgcaggtaaaattgtgcgtcggaggtggaccgagcggagagataaaactgcagaggggcggaaaaaagaatcgccacaaaaaccaaagttggcgaaagttccaccataagagagtgaaatgggaggagaagagaaaaaaaaagaaaggaaacttcgctaaatggtgggaaagatgaaagcgaattttaagtgccaaaaatcaaaattaaaacaaacgtaagcaaacgaatcataacaaatgaacaaaaggccaattcacttattttagccaaagaaattaaacgtaatgtttggcgaaacgtttaaaaacaatatttgaaaaaatggagtttttaacgaccacaacagcacgttaagaacttgcttcttgatttgattcgggccattcagtttagtgattttactcagtgagataaattaagataatacagatagaaaggaattttggcatttgctaatttattgttaaacaaaatgaaataattgagcgaaacaattgaacaaatttttcgtttccttcaaacggaaaaacaaagtgactgataaatggtcaaataaatcgtcattggtggtccatcgcaattcaacggaacgtctcttcattcaacaacccaattgcttgtaca

SEQ ID NO: 21517 - DNA, 1644 bp, Heterodera glycines
ctcgcacatccatggcaattaactatggaaaaaaataaaaatgatgcattcaaatatttgtttgcatttgtaaacaaaatgccattaaaaatggcagagttgaatttgaatttttcaaattttctcttggcgaggccctcgccgtcgtccttcccattctctcgcgcgtctctttgaccgccgcgcgacagagaacggcgctggggaggaggtgttggatggatgggattttccaaaggtatggttggggctgggctctgctggttggcttggttggctgtgataggctatgggttgagcacacggctcaatgaattggcgagggggggggggacaacgccgggggggtaataatgggcatcggcgacggcagaacgaaccccgtgcaaaccgcgcccgcctttttgggccgacgacaacaccctttttataatggaaatggacgctgctgaaaaaggaaattggggggcagagaacgttttaaaattagaaaaaataaataaatcgattaaaaggttaattatatttaattagctatttatatttgataatatcggcggatgggagcggtaaaaatggcacgaattcgatttttctggtcgggccaacaaaaacgcaagggattttgtagaaattgaagtgctgtacagtttaaaacttaagtaatttaaattgaaaaataaatttcattattttatgaaatttaaattattaatttaaaagagcatatttatttatttcaaaaatttttcagaaatcttcgaaaaaatcataattattcatatatttacaaaactttagtaattaatagggccgcaacttttagtgaaatctttttttttgctcaatttttggctgaaaattatgtcactatttgtcactatttcggactttttgtcactattttgtcactattttggcatttttaattttagttaactattttgggatttttcgtcactaaaagttgcggccctagtaattaaccattttttaattgtttaaaagaaaagcaaaaaaaaaaatgtaaatttttgtggcagcgcctcaaaaattgcgcagtttcatatagcgcagcaaaagatctttctttttcttcttttagccctctaaattagccctatttgagcggcggggagagaatatttgcatttttggtcggccagccaaaaagcgatgggaaaatgtacaaaatgtttgtggcaaaggtcaacaaaacggtggccggccccacagttttctccatttcaccacacaaatccatcggcggacggatcaatttggacacagcaaaatgcgcaccgtttaattgagtccccggggctgaattgcgcggcgaatggacggatgagaaatttctggatttttaataattatttcgtgaaaaacattacaaattttgtaattattatgcgaagttttatagatttatttaatgtataaataaaattcttaaaaatcttatgacaaaacttagcaaatcgttcatttcctgtgattggctattttaaaataaggaattttatgaaaattcaactcagatttcatgcttttagataaattatgaaaaaacattacatctttaatgtttgggatgaattagaagcaagaaaatttaaacattttttaattactcatttttct

SEQ ID NO: 21518 - DNA, 2444 bp, Heterodera glycines
tcaaatttcagaatcgagtgattaaaaacaaaaacattttaaggaggacacgcgaaaaccgcgcatgaatttgctgaagcagcgaaaaaaggtgaaagaggaagaattataaaaataaagaactgtaaaattattaatgagtagaaaataaatttatattttcaactgtatatatatattttttgtacatttaaattaaaatttgcttaattctccaaactgaaaattaatttttagttttctaaatttcttagaggcttctttctagtaaaaaaacttaaacttttttgaatttaggaccttttaaaaattgtaaaatttcctgaaagaaattcttttattgaaaaacttaagtgatttttactagaaaaatattgtaagaaatttataaaactaatgtatcttcatgggacggtgcagggggggggggggcgaactgctcccttttctagcgcccaaatgcccgggtcccggccaaaggatcgggaaaactcgggtccaaaatttgcacgagaaagttccgacattttagtatttagattaagccagggtgaaaatggcatttaaccgggctcccatccgctgttatggcacaactccttcatccccgatcgccatcccttggtttttttcttgagtctgatcacttacgggcgcattagtgtctgtgtggcatttcagcgaatttttgatcatcgggtgatgaagagcaatgatcaggaggaagaggaagagaaggaggaggaagaggatgatggagaagaagcacaagatgaagcagaagaggaagaagctgttgtagttgttggcgaactgatcaccacaaggaaaaggtgaagagtttcgtttcaaaaaagtttcaaatttttatgtcttaaaattggtaattatccccctacatttcgggagaaaattgttgagggagagggtcgaaaaatagaaaatttcgccgtagggtgggtggggggggctgaaaaatcggcaattggtacctagttttttatttgacattagataacccataaaatccaaaaatcctggaaaaattgctgaagatagaccctaaaaaagagtcgggaatttgggatgacgggataaataaagactaacgccgtccggtgacctaaaatgccgctcttggtccggaaatttggccaataagttgttaaatccataaccgatcaatcatttgtgatcagattaaggcgcaaatttcagaccaatttataatcgtaaagcactcacaaatcgttacgactacaagcatcgatcactgcttgatgcggccgactttttgttggaaaaagtggcataaaaaagccattaaaaattaataatttgcccattttagcatgactttgatgccgcattgaaacactatgaacaaattttggccacaaacgaacatagcccaaggcattttaaatggaaaaataaataaataaatatttaaacattaatttagagcactttttggccgtggacgtctccaccaattgaaggccgaatttggagctgaacatgatgatgattcggagaaatttattaaaatgtaaaattaataaaattatttaaatttaaaattttttccagggcattgcccgattacaattcagtgctggaaaatgaagacacacctgatgaactattcaagtgatttgtgattatgtacaaaattaaaaagtgaaatttaatttaggaaaataatttaatatcaaagtttgaaatttctcaaaaaaaaacctagaattatttttacaagaaaatttcaagaaaaaaaatttcaaaattttttgagcggttttttcaaaatttaataaccatttactaattttttttttaattttcaaaaaccgctgaaaaatttgaacatttttttcttgaaattttcttatacaaaaaatttttttgaaaaatttctgagtttgaaaattaaaaaaaaattgacgtttgagaaacaaattggacgaaaaaagacagagaaaatttgttcccattctaacgatgtttaaagattaaatttccgaaaatctttcgccctagtcagaaaaagtaaggattttttggcaccggttttccgaggagttaagcctaggccttggaaaaattttcaattctcgagataacaaaaattaaaatttaggatgactgtgcaatattttgtggaatgtgcaagacaaatgggtggctatcatcataaaattttgcaggtaaaatttttttaaattctctaaaaatttgaaaaattaaaaaataggcccaaagggcactggtggaccgatttccggacgacgcggacataaaatgcgattttggcgtcacatggctgggcatggccaggcccgagaaagcagcggacatttttcgaaatgtgaggagaaaaaaattttaaaatgcttaaaaacagaaaaaagacttaattaataaaaaaactaataaaaatt

SEQ ID NO: 21519 - DNA, 1611 bp, Heterodera glycines
aaaaaccatcaaatgaataattttgacagaaaattattcataatttcgtctaaaatggatcaaattttataatattgatatttttcgatagccctatgtgttttctattatcctgcaaaattaaaaaaaaattctttaagtttaaaaaaagttatgacctgagaagctcaaaaaaccaagttttttgaacatttttaatcataactttcttgaaacttaacgaaactttttggaattttgtaggctaatagaaaacacttagtgctgctatttaatgatatcaagaattaaaaatttagttgcttttgggcaaagttatatcaaaaatattttcatttgatggtttttgactaatgtcatagcaccaatgataccgtacccatccacaaggaccacaaaagtggcatggacaatgaaaaagttcctctgcgggtagagaggttgacaagtagagcccggttttgggaaaaattaaaaataaaattgaacaaaaaatttgtataaaaattggaattaatcgaaagaaaatttataaatggaaaaaagaattaaaattaaataaaaataaaagaaacttaaagcattattatgaaaaaagcaggaatttattgaacgaattgatgaatttaaaagaatgcccaaaaatggaaaacagaagcaatttgcgaaagaattgggcattgaaattggcaaaagtgaatttaatttaatttttaattttaattttaaatatttcagggtattctaatgaaaaaaaatgaacaaaatgattgattatttgaaaatgaagaaagcaaatccgtctttgagtgataaagaaattgccggattattgaaaatctcagtaacaaccctaaaaaatggaaatataaacttttataaatttttctattagtctttgtgatgaattgatgtttttcatgcttaactaaaatccaatttatttttcgctcttcatctgttaaagagttttcattaagactgatctgaccgcaatcgagacaatgatcgagatcagtctcagaaccctggactattggcattggtatactcttttttttgtctgcaatttcattttcataattgttatttatgtgcgaaaaatttgggtcttgaaaaatttaattaatttgtaaacttaaaaaaaaattcaatttttctcaaatttctctcttttttaatgatataattaatttaaaaataatatatgtaattataaaatacttaaaaattaaaatcacacaattttatcaaatttttatattaaaatgttcattatttttctattttttgggctgatttcctcacttttttgccccaccggcgctgggtgaggcgtggcgtccgccagccggccgaatgccgccgactggaaacactcgcattggctgtgccacccacccaccacattcattcttgtggcattcatccattgtgcccattccagaagggcataaatgatacggtgctgggacgttagtcaaaaaccatcaaatgaataatttttgacagaaaattattcataatttcgtctaaaatggatcaaattttataatattgatatttttcgatagccctatgtgttttctattatcctgcaaaataaaaaaa

SEQ ID NO: 21520 - DNA, 1919 bp, Heterodera glycines
ttgtgaaaggtgagtcaatccctcccgaaatttaaggaagcgtcaattttgggcacgtatttcttgccaattgacgaatccatcgacaattcgtacattcagcgtgagaatatttttgtgggatattaccaatgggtaatgaatgatggcatgtcaagtcgaattagtggtcaaatcaaatggttaaaggtgccaattgtgctggcagcacaagcgttgctcttttaccttccttcgttcatttggaagtcgtgcaatttcagcaccggtaatgaatccgttgcgaattcgcccatttgtccgtccctttcggttgcccgccttaggcattaacgtgaaaagtgtgctgaacagtgcggcactcgtcaaaaagaagttcgacaagggcacgcgaagtgcccaagtggaaagagcagccaaccatttgacggtccgtccgttcggtgccaattaatggcgaattaatcggtgaccgtttcaggaggcattggacatgcaaagggaactgaagacatgtgagtcgatgctgctgtgcaagtgctgtaccgcttctgttcagctgccaccgttttgtcccgccttggaaaacgcaacggcgttttccttgtctgtctgatatttgttcaccaaattgttgtacgtcgccaacgtgttcctgcaatttgtcattctgaatgccttccttggccctcagtacactttctggggcattggaattctctctgacatttggaacggaagagaatggagcgagtaaaaaccgaaagctttgcgattcgcaaacgcaaacaaataaaaaggtccggccatttccctcgcgtcacaatgtgcgatttcaatgtgcgcgtcctcggcaacattcaccggtggactgtccaatgcgtgctgatgataaacatgttcaacgagaagatcttcctcttcttctggtgggtctgccgttgttcggcactctttcgtccttccgtttaggttttggttcatttttgtcggccttctctctctgctcagccttttttactgggcattcgccactttggtccccgcttttcagaaggcctatgtgtgcaaatacctccgttgcgtgggcattattgcccattttaccactcaccgagaacagcgcttaatcgactctttttttcgagactttttgcgcactgacggagtctttctgctacggatgattcaggcatcaactcaaaatttgcatttcgtccactgataacaatccatgaatttgaaacacagacaaacggaggcgatttgttagtcggagagatcgttgccgcactgttcagtcgttaccaaacaaaaattgaacggcacagcgacccaacggcacagacagccgtaacagcgggcgttgaaacgcccgggtcgactacactttaatccaaacaattatatgacattttagttcagcgatacaattatttaaaaatgaaaatatgtattaatcaactttcaatttttctatatttgataaaaaaaaatccataaagagcggatttctaaaaattaataccgtaataaatttaaattttattgacgttgacatttaattctgccttacatataggaatgcaattttgaggcttaaaaaccgccaaaataggtaggtaggctttaggctcttaaaccccaaaaatagccatttaaaatggaaaataggcactaataaagggatcgagccattcccctaaccagccaattccctaccggccaattccctaccggccgattccctaccgccaatcccctactaaggcatttgggccatttccataccaaaagtgttgaatattgataaacattgagattaaaacacacaagaaaatttattcactgctttttagaaagctcgtcaagagctttcggatgataacaaatttatcaagattcgatcgttttaaaaa

SEQ ID NO: 21521 - DNA, 1208 bp, Heterodera glycines
  unsure (1)..(1208): unsure at all n locations
aaagttaatacatttttttcaaaaaactgcaattaataattgacatatgcatctgttatactcagcctttaattattgtttttatttcatatataataaaaaattcatnaatcaagcaatacnaaaacgtggacaattttcacatgcatgnatcttaattcttcaccgaacgctgatttaaaatttgcttattttttgtttatcttttattttctttatttttgaataaatttttttcaaatacaaataaatttatgtacttgcctttttattttatgaatattccatcaatttcaacatcgcgctacatccatatcaaattttttgagtaataatgaaatatttaattgatattgttcaacttggtattattcgttaactgtcataaattttctaaatgtgcacataattgcattataatataatcaaataaatatgaattgtaatattaaataaaacacatgaatttaaacggtatcaattgatcattctttcattaaatgaaagttttattgatatatttattattttcttatttcatttatcaatatttttaagcgtttcaatgattttgaatagtgttgatttagagcttgacagcttaatattattatactttcgatattttcttatttaataactaagatttttatatttcctatgaaaatactcaaaatataaatatttgttttaaataactgaatttaagaattttttaaattctggcctatatttattacattatcaaaaattatttccaatctcttgtattttggcttcaatatcaacaatccatttttcgatttatctattaacttcattattattgttattaatttttaataaatttaacccgtttctgagacgcatgattttaaaaattttaaaaaacaaaaatgtggaataaaactgataaggtctttgcattcctgtcgcaaagaaataaattaagtgttttaagtatgtttggttttggaaattcagtatttgggtccgcaatgatgataatcaccgctaggaaatttttaaaaaatagataaataattattttttgggttaatttttgtaatgatggagactttttagggaattttgttacgattaattttttaaggctctaattaatgtatttataaaactaggtttacaagcggtcgttgcaccagtaggggaaatattccacatcttttgtaaatcccattaatgaa

SEQ ID NO: 21522 - DNA, 1853 bp, Heterodera glycines
tagtgcgccattagtcgccgctgcggtcacgtcgaaaggcggcagcggaggcttcgcggggatgtcttcgacgtcaatgggtcaccccccgggggggcgtcggcgacattcgccgtccctcgagtccccccgtgctccccggccttccgctgattgaaattcgtcgtccgtcggcactttcgcaggcaaaaaccctttcaatattcgattgcttatcaattgttcagcccttttcattcctttgctcattcagttcgagttcggttacttcgtcaattcgcctgaaattgtcagtgccagccgaggcggaagtggggccggaagtacggacgactgcgccccgctgctgctgagcgggggaagcaccgcacaaatttgttcccgaaagtcatccgacggtcagtctcatttctccttttcacagccattcaaagaagcattctgatcaactaatcattttctggtcagctttttctgattctgatcaatcaatcgttctctgatccggccaatttctttccaattttccattttctcttatcagtcatccttaccaaatcatttttgccatatgtgctttgtcccatcagagtcctccatgtgcgggtggagttctcgtgccagttcgcgcatgtctcaacgttcttcctccgggggtcttcgtctgtccactttctccggcggcacttccattgcctccgacaactcgggtccgttcatcttcagttttgtgcttcgcaaacgcgcgtccaccatcggcacgcgcattccgctcccaaagcgtgccatctcgcgctccagcggagacagcctccgcgtgccggaaagagaagtcgtcgccgtttggtcgttcgtatttcgcttctcttttcagttgctttgtggcatcgaaatgagcccggaattccaatgcatgcgccaattgttgctcaatttgctgtgcatgtacagcaacaaagactccaattttgtgaacactttgcgcacttgttctgatgtgctgtgccaggcgttgaacactccgcaacatccgacggtcaaaaattggtttggcatctgcgaattgaagctttacctgtgaggatattcggataaaggtgcgcggacattctgaatgtgatcaacggacaattggagacggaagcggagtgcaagttggagagcgaggagcgcagcaacgacgagtatttggatgtgagtggttgggacgcggggaatgacagtcaattggggggccaaaccccggcccaacaacagacactcaaaacgaattcgaattcacacaccaaaaagcctcatgtttcagctccaagaccaaatcatttcgggctcattgccatgtccgaaggaggaggcggcactgctggcggctgtccaactctgtgtggaagagaattggccgaacaacaaacggacccaaaccatccgaaggcatctcctcaagggacagttcggtgagtgcctttccactcacattccttgtttgtttttcaaactcaggtcggattcgggacctcgcccagaaaattatggtcactccatgggaagttgaccagagtttgtactgcacgccgccgcgggcactcagtgactcagccgcgacgaatcgaaaaacgtcgacgaacccacgcacaaacagccaaacggaccgacaagggagacgacgctcacttacgctgttcagctgcatgtacggcatgcactcggcggggaggagaacattcgatgccaataccaaaccaatttttccatcagcagatcgaagtcggagcaggactcaatgctaagcaacgaagcgcaggcgcaatgcattccgctggactttcgcagcgatcgccgaaccataaaactga

SEQ ID NO: 21523 - DNA, 1665 bp, Heterodera glycines
gcaatccggtgggattttcagtttttggcattccatccaacgggctggggatcggatttttttttcaaaaattggaagaatttgcctttttaaaattcaaaaagttgttacatttgtgggagcagctcgtcaccaatccatgcacagttttcctggcaaatggaaaaattcttgaaattctttcaatagtattgaggaactatagtataatatttttaatcatttttagggatgaaagtgggcgaaattctccgcttggccaccaacggagacaacagtgatcccgccacacgaacctcaaatatcaatgccctttgtgtgcatctgcaaaaagtgctcaaattccatcaccgactttatcaggtggacaaatattttcaaatggaataattttagttttgaattttaaaataaaatttattttttaaaaatccattaatttggcttacggctaataatttgggagaggctaattttttaaatttaatttagaatttatttaacgggttttttatttttggaatattggttaataccaaacattggcacaattaaaaaatattccgaaaacaaaaaaaaccgccaaaaaataaacgctttattaaaaatacagttattttccccatttttcagaaacacatttcgccccacagtttcttccgtttgttgaacatgaaatactccgcctattatgtgactgttgtttacctcttcaccaagtgcctgttctttgtcaatgttgctgtccaattgaacgtgttaaatcggttggttttaatttggccatccatttttatttatttttaaatttttatggctcagtttcatttccatattcccaaccatgccgttgagggtcctcccgccctacttatcctatttttttcaaaattattgaatttttttatgttttgcccaaatttattgtccgtcatccatttaaattaaaaatttgactttttcctctataatattttgtttgaggcctccaagttcatttctgaggctcggtgcatatataaaaatcttttaacgggtttttttagaaaaaaaatgttttatttatttattttttccaacaaatttcttaaattaaatttacaagggaacattccgaggcacgcttattgagcacttcttcatcagctgcataagtagctggtacaattttggtcacgcgcctcgaaactattctgtttctctttttgaaattcagaacccattttgcggaggcctaaagtaatgttacggtagtctcatccttgagggggggggggggctataccttaaattcaaaatcaatttctcgtgcctttaagagggcaatggtgaccaggtcctggtcatgaattgcttcatgtctgcttcttgcctctgcaaaaactgccagcacgtgttgttcgattttttcgaacttttcatatttggtgccccctttctggatgtagtgtctgatcctattaaaggcttataaaattggatgggaaggccgaaaaaccttgaaatttcttcgtcgcttttcagctttttaaaacgggttctgattcttttatatgaagtgccttcgtccagcattttggagattttcaattgggcttcaaagggatatttgccgtttgtcgggatccgtattcccaaatttatccaaattttgctcgtgtcaga

SEQ ID NO: 21524 - DNA, 1655 bp, Heterodera glycines
ggagagatagatactgtagatacgctactataaacccggatacggtatatgaataattttactgttacacgtattaataagttcaccttccaatagcaaaattggagatagtgaaatggctggcgtcgcatcaaaaactcgttaaacatttttgacgggtcgcgtaagtgaggacgacgatcggtgaacttgtccagacgacacctaaacaatgaattcaacccatccaattttcaatgggaaattggactggaagaccaatttccatgtttgaatttgtcaaatttttggtcccattgaaattccgattcccaaaatttttgtgcaaaaccgtcgcctcttaattctaatgaaaataattagggtttattgggtcataataaaatgactcattgcaacaaataatcgatggtgtgcataattctaatgacatcatttagcctcggcgtttaactctctaattaagccccggatgcttaactctaattcctgcaattagtgccatcgctaccttaacatgcaaagtgcccgctttgcctctatgaacattgtgccatcggtgaacgccgtcgtttcgtcgtcatttaaaatttgttcgctgttcattttgtgccgaaactgctctttacattttctattaaaaaaataattggccaaatcgctgcccatttgttcacacagttgaacttttatgacccaattcttcaagcgagcaacccaattgttcaccaattactcaattgttcacaaatggtgacccaatttcccaccaaaaattcaattattcactaaggaacccaaaaactaattgctcatgaaatttgggccatttttctcaaaaaacattggcctcgcttctcttcttgccttcggcaccacaatgtttcggccacaaagaagcgaaagtcgtccaatgcgcgtaacagaaacgccacacagtccgaccaattctcggcggtgtattcatttttggcaaatctgcaagtgccaaattcaaatgttggcacttagtgggaaaatgaattttaaatttttaatacttaggtattaagaaaaaaaaatcggttgatccctaaaaagcgaatcccgggcctggacccgaaaatcccggcctaattacggtgatcacttcagattaattaaataaatcaaacttttttaaatttcgtatgaataagaaatatttttttacaaactgataaagttgctcaaatgtcaacgacgggtcttcataattggcgttcaccgaatgcgtggcgagcagcccaaaatgaagtgccaacaaaaatgtttttagcataatgccaaatatagcggaaaatattaaaatttttcaaatctgttgccccaattttcaggggacactttgataaaatgggaataaaaacgggccaaatgatgagatggtttgggacatcgtcggtttaatcgatcggaatggccgagtgtgggagagaattgagagggataataaacccatcaattctttggccagatggacaaccaaactttggccatatgttcggcgccagatctgacacagaattcctcttttttgaatctgacacttttctgaactcataatttcgcgggagttttacgcccaaaattttgagaaatcccggaatttgtaatcaatttttccaaatcgtaac

SEQ ID NO: 21525 - DNA, 1059 bp, Heterodera glycines
ctttgtcagttgcttttatattaaaaattagcgaataatcttatccaaatttccccctattaatactgaggcatcccccgggggttgttctatacggcttgtatgcgtctctaattataacattcctcgtatgaacacctgtgaactctgctttgacattctttcgtcaaactttgtcaattgctttaatattaaaaattagcgaattatcttatccaaatttaccactattaataccgaggcatccaccgtgggtgtctgttctatacggcttgtatgcgtctctaattataacattcctcgtatgaacacctgtgaactctgctttgacattctttcgtcaaactttgtcagttgcttttaatattaaaaattagcgaattatcttatccaaatttaccactattaataccgaggcatccaccgtgggtctgttctatacggcttgtatgcgtctctaattataacattcctcgtatgaacacctgtgaactctgctttgacattctttcgtcaaactttgtcaattgctttaatattaaaaattagcgaattatcttatccaaatttaccactattaataccgaggcatccaccgtgggttgttctatacggcttgtatgcgtctctaattataacattcctcgtatgaacacctgtgaactctgctttgacattctttcgtcaaactttgtcaattgctttaatattaaaaattagcgaattatcttatccaaatttaccactattaataccgaggcatccaccgtgggtctgttctatacggcttgtatgcgtctctaattataacattcctcgtatgaacacctgtgaactctgctttgacattctttcgtcaaactttgtcaattgctttaatattaaaaattagcgaattatcttatccaaatttaccactattaataccgaggcatcccccgggggtttgttctatacggttggaatgcgtctctaattataacattcctcgaatgaacacctggaaactctgctttaacattctttcgtcaaactttgccaattgctttaatattaaaa

SEQ ID NO: 21526 - DNA, 2115 bp, Heterodera glycines
tgttgtgaaaaattttgcaaatttttttcaattccgtctaatttcccttctaattttgagtcaatttccagcaaaatttcctgtaaatctttgatcaattcattgttcggcgtgtcaatttgatcaaatttaatttcgtaaatttctaaattgtaaatttatacatttaaaaattattttgtattaatacctttttttgcaccatcaacagatttgaaacaattaaccgaagtaacacttttaagaaaatgaaaaagaaataaaattttataaaaataaattttcatcattttacgaggcgttggataaatttgtattatttttttttcaaaaagctaaaataatgaaaaaattttattatatgaaaaaagtaatagacatcaattattatatttattattttgataatcaattattgatttgggataaatggagagagaaataataaaacattcattgattttcacagcatatattactaggactggatttttaggcataaaaaatcgcgaaaaaggaggcagaaaaaaaatcgtaaataagcattaaataggcacaaaaataggcaataaattttttattaacgcttcttaggtagtaaaacacgtaaaaacttaatcaaaacacttaatcttggttatatttcaattgtaaattaaatttttaaatattttatgagtttagttcgaatacggacaaattttaaatcaaaaacttttcaacaaaaaacaataattattatatcgatcaatttttcagaaaattttttaattcttaggggtgtatttttgaattttcgcgggtcatttcttaggggtgtatgttttcttttattgcatttttattattgtttattcacaaatcctgaaaataggcaaaaatagggattgtaaaagtcatcatagacaccccaaaccaagcggaaaatgcgttttccgtgcttatcagagcgtattaaatgcgcagaaatttaggcatttgcctaaaaatcgcatccctactcattatggacgagttataaatcttagtttttccagctaatttatcgatgcgaaagtaatgaattttcgctttaaatttaaaataggaatttttataaacaatttttctttcttttttgctgtttcgatatctctcaaattgtcagcggacaaattaagtcccataatataaaaatgaattttgtagaaaatttagtctacataaacaatggacttgccgcgttgattttgtgtttcgggagaataattattaataagttgtttgatcgtagggtaattaaatgcataatcgttcattatttagaatggggctttaaaagaagaaaaatgctataattattcttttattattcaaaagttttgcgattaaccgtcggaaaagatctcgtcaaagtaccaagaaacattacattatcactcgtcatctgtgttcccaatttgaaccgtactcgaattgtccgcgtcctctgtcacagctccaccgtagtcgaaaacgaatttcgattgtaattaggccaattaacgaatttcgcccttttaaagcattgttagcaaagagaatggcaaatttttctcctctttctgacaacactgccccaaaaaaatttttatccgaccttgaccaactacaaatccccaaagaaattgacacagacaactccattcccgactacgccaagttgcttattaagcagcttcactcccttttgggcaccgcctcggccctaattcattctcaggttgtggcggtggatgcggtcgaagaagaacgacgacagaactgtcgttgtgacaaatgtgcccgagagcaaatcggacacagcggcggagagagcccgggaggaccgtgccgttgtggacgaaattttgaatgccacggacgttgatcaggcaccaattgtcttccgtgtcggcaaacgaatggatggtcgaccgcgccccctcaaaatggaattcccgagcaaacatgcagcgcggcacgtcatccgcatgcgcggaaaggttcaagcattgaatggtctccacaatgtccgcatccgcgaaagcatgaccaaggagcagctgtcgtaaaggcggaaaatgatcgaagaatgcgcgaagaaaaggcaggcgg

SEQ ID NO: 21527 - DNA, 2341 bp, Heterodera glycines
  unsure (1)..(2341): unsure at all n locations
tgcgccgcttctcatattcctcgagccgtttacgttaattttctcttagttttctctgctactcttcattntgccttcactcttcttgtctcagtttgcncctctcatgcaattgtggcgacagaaagcttaccgtttggtacacggaaacggtatttncctgctgctgtacaggcgaacaattacatattgtgggttccgtgtacctaacttaacacaaaaaggacccaaaagccatgtttttccccgcctgttagggtaaattatgcctgacagcccaaacatccaccggcccctttgaacaccaacttgtttggcaagtgcactttgagtttgttccttttatttacaacaaagcctgcgtattgctcggcaaaattacaaagtaagagtttatcatttgaccaacaagtataaatttttcaaaaacgtccttatattgtggtgtgccaactcggttcatctttcttcatccttggtccatcggattccaaatttgatggaattgctctggtgttattaaaaagagaataattatctttagcaaatcaatgcgagttttcagcgaaaacaggaaacagggaaaacgcaaaaatgagagggtgttaaatcttaaattcagtcccagtcacacaaaagcatttttaatgaagaagaataagaaaaattaatcaaaaatatactctatatttaaataattttctctatcctcctccatcaaaactattttgtatgactgggactgaaatccagcattatctcatttttgcgttatctctctccctaaatttattattccgctgaaacaaattttaaaaaaccatttaaaattgtgttgatatttgcgtttaggcataatttatctatgcattagatatatttataactttttagttattttaaatattaaaaacaatttgcttaaacgactttaagaaatagagtaataaagatttttgaattatgttgaaaatatttagtttaattttatttatttatttttaattttctatatctatgctttttcttattatgtttgttttaaatctttaccctcatttctgactgggacaattatttcccattccaattagatttctgcttaataagtgcattttaattgtataattatgttcattattataaaaccataccaaattggtctagaaaagttgtctgtgtgcattttcaggttgacattttttaaaatttattatcttaattattttatttataacttttttatacttaataaatattttttaataaaaagaaattattcttaaatttgttttgagtgttatgtaaaaaaccaacctttgtcctattgaccttgacatattatgttttttaatcaaaattaccgattattattttaaataacgttaagacaactttgttaattagtattattattatttgctgcacacaccactttgtaaacagtttcttaatatcgttatcaataataatccagtaacgtagaatggtttatattcgctttttaataagtcgcgtcatttgttattactttgtataatatttatcatatttatggttttaaattttatttattttgatggaatatgaaattaataaatattgaaaaattaaaattatacttcattaatttttaaaaaatgtaaactctttttttaattgacgttttaaacgcatttccaattagttgaaattatcaattctcgctatttatttcgagaaaatttttatcactaaatagctcaaaagtttttttgttacaatattaagttctatattttattaaaaagtttaaaaaatttttataatttgtctaaaattcaatctaaaaatattttagttctttgtaaaataacttttaactaaattggtctaaattctcaacaaataataatctctcattactaaaacagccaaaatattcgtttttctaacgaacttacgaagttccttttcctttaattatgtaaacaagtggttaaagtcaacatattaaaaggttaattaatttaatatttatttattactatgaggatggatggtgtttagattgaggctttacaccacatttcaaaaataattaaaaaagtttaataattaaccaaaataatttaaaaactttgaaaacacataactagaaaatgatttaattttaaatgtatcttctaattttaatctaatttggaaaataattcattcgttccattaaatttattttaaacctgattattatgtattattcgtattgttgatgtcgaccgtacaataacaaaaaaaaatatttaaaatggtaataaaatctgcgaaagaatttattcgtttattttactgttgaaattct

SEQ ID NO: 21528 - DNA, 1761 bp, Heterodera glycines
agagggagagagagagagaaatagagacagggagaaagagagggagagagagagagcgggagagagagagagaaatagagacagggagaaagagagggagagagagagagagcgggagagagagagagaaatagagacagggagaaagagagggagagagagagagaatagagacagagagaaagagagggagagagagagagaaatagagacagagagaaagagagggagagagagagagaaatagagacagagagaaagagagggagagagagagagaaatagagacagagagaaagagagggagagagagagagagcgggagagagagagttaaaaccgaaaaaatgcaaatcgacaatataattcgccaaatgagttataatagaattggggaaaaagtgaaagtgaggttgacagaaatttaacaaggaaaaggaaagagaagaaaggagaagagagagagtgggggggggggggggagggtacggtaccaaagggcggaaagaacaaaggaaaatgatagccgaaatgagaggcgaggaagtgaagaagcacttcacattaagctgaacagaaaccctctaaactaaacaaaaagcacattttcttgctttctctctctctctcttcccccatctctctctctatctttctctctcttccccctctatctatctctctttctcttccccactttttttctttctctccgtttcactcttttctcactcttttctttttctcttttgcccttttcttccaattggcaacattttgtgttggctgaatagaatttggcgaaattaaatggaaacgaagggaagaaaatgagacggatgaccatcaaaaatgcacaagtaatgacgaattgggggggggggggggtggtcatcgaaataattgggcatggcccgcaaagcaaagttttgggttttcggtttctttccacgggtacagtataattcgtcggatttccaattaacaaatattacgctttttctgctgcttcttcgtcaaaatattcttctgtttttcactatcattttcactttcgatggcacttttatctttttaaaataatcattatttcttattttcattttttttctttttgtttcttttatttgcattttcattttcattttccctctttcccatattaattaatttgatttctttcaatttcccctttctctccccctttaagccctctgctttctgttgctccccatgccttcgttggggtgtgtttttaatttgtttttactcattttcactcatttgccattttgccattttaccccgtacaatttaatccccgattccgacaatgaccccccccccttttccctcctaatttggctgtttactgcacagtttcgtcattcatttgtcacttcatccatttgtggctgtttttcactcaaacttcgaaaggagtacaatttgtggggaatgagctgaattatgagtgaacaattataattcccattatcaatgtcaacaccgtttttcttcttttcctttcttttttgcctttatcaattatttaaaaaataacccaaaatgtaataccaaatcattaattaattaattcattaattatccttccttttgcctaatcagcaaaaggaaaaagagacgaagcaatgaaatgaatgaatgggtgaagaacgatggtggccattccaatttctgctgcaaaatgtgcactcattcagtcgccctcgggcgccgtcgtttgggtaatttatgctc

SEQ ID NO: 21529 - DNA, 2970 bp, Heterodera glycines
tcgctaagtgagcgcagccgacttggcgaaattccgcaacatcaaatgtaccgtttttcagtttctgcgcaaattgctcgtccgttttgatcagtttgatcagtgtttggccatgcatttgcctcatccatgccccatattcggcacaatgctttgccttcgcaatttgttgcggctttttgctgcgcttcactccggcaaagttccgtcttcgccactctttgatcagttccgtttcgcttttcatcggctgatggcccaccacaatttgctctatttgacttctgatcgccatgatcagatccaccaactcctgctcgtcctgttctaattcttcaatttgctgatgatcaaacaatcggtcgtaaaaactatccaacatttttacgcttaatggtaaataaatttgcacattttccaaaacttttgccgaaaatgattttgtgagcaaaaattgaccgttaatccaactgataaataagcaaatttcggctttcattttgccttccattcggataaattcgttcctgtcgtcgttcagcagaacattctcataatgggaaatcagctgctggttgtcctcataatcttaaaatgcatttaaattatcagaaaatatttcatttaaaaattttttcaataatttttgcttttccataatcattttgaataaactttaaaatagttaaataatggttagtgggctgcgaaatttaggtaattttttagtctgctttagtcatttaagtggtaacttaattctgaatttttgaatcgaatggaaaattttgctttccgtcaccccgtagaaaaatgattggcgtaagcaaaaaaaaaaaaaaaaacaatagtacaaattttattcaaaaccaaaaaatgctttaagcttaaatttatgtttttatttatttaccgataataatatcatcagaaagttccaaagtttcccacaaattggccatttctttttcattttgctcaatcttttggtcgtagttatacaacaatttccaaatccgtgttcttccaccttcaaaatatttattcactcggaacataaggagaacaaagacccgaaatacctcttgcccaactcataaatatccctcataacaggggcgccaaactcgcaaatgccacttaattagggcccactccttaatatacctcgtcatagggcccttaattaggtccaactaacaaatatccctttaaaaaccggcataactcgggtacaattcgctactgtccgctgtgggccattcccctcccacccactaccttgggtccgtctgatcctctgcaccatcaacagttccgggctggccaagctgttcactacaaattgcatcgtcctccccctcatccgatccctttgcattgcaattgccattttcacatttacttcccgctcacaatgtgccatcatcactttgactattaattgtttttccaacaccatacattcaaaaaaatggtacaacacacagaatgcgttgcgaattgattcttcaatgtccggcattttcgtttcgatcaaaagttggtaaaaaaattccttggccatttccacctttttcgctgtgaaaccgtcgtcatgcgcattttcggcgtaaagattcatttcttggagcaatgccggcgcataaacttgggattcggccatttccgcttcaaaagagcctgttttgtggctcagctgctcaacaaaaagtgccaaagtatgtgtgacggtgggcatatctgacaaatgtttaaaaaattaattcatttaaattcaattctgtgcaaataaaatgcctataattttcattgtattttaaaattgattatgaaatattttaaaaagaggggcttaaaaaaagttgtgagagaaggggggggggacgtaatttccacgagcgggaggaaggacaaattgtttttcaaatatgtagatttagtaattaaaagcaggaattttgtaggttttgtcacccgcccctgaaaattttttaaataatttttactaggttgatttaatgtattgctaatgatatggaaatcctttttggtctatttcgaaccccggacccgaactcgaacaaaaagtcgagaatccccaattattaaaaatttgctttttgttctaaaataaattaaaaccaagaaataactaatcacaaaccattacaacaccaaaaataatcaattatgcacagattcaaagataaaagtgaatttctgaagaattcgaattttcagtttttaaaaatgtttgtgccaaaaaatgggggaaccatttaactattattttttcgtttaacttcacgtgagttttcaattaactcactggaaaacatgttataactaaaaataaacgtcagaaaatactgaaaacttttttacatggtttcttaggcgttgcaatattagaaaaaatcaaaaaatgtgcggcataacgttaaaaccttttttggacaggtaatccacgaattgacaaccccagcattttttttatattttaaattgtgccatatctggccgccgcgatgatcttaccgaagtgcataattaaggggtatgtcatctccaacgagttcagcaatgcctccccgaaatggtagctgatgcgctctttgataataaaggtgtcaattcggtctttgggatagcaaaaaaagtgccgaagctcagtaaagcctctcaacagcgtattcaatgcgacaaaatggaaatggtaaagcgaacgcggggttttgagcagtgaattgaataattttgattgcactccttcatcggcacaatcgctttcgtgccatcgaaacccatcgttttccgaggcaaaaatcaatttcttaatgggctaattaataatggcataaaatgaaagtgaagataaagccatttcccgccgaaggtgttaggacattatataaaaaccatcaattacggttgaattttaaaaaaataaaaataagctaagttcat

SEQ ID NO: 21530 - DNA, 2949 bp, Heterodera glycines
  unsure (1)..(2949): unsure at all n locations
ttaggggaatgattggctattgttggccaacgaatgccgaaggaactgaccgaacgcaaaaagtgccattggcggagaccaaagcattgacaatcagcgaaaaatgaagcaaaacgaagaggaagaggtgggaaggaacagggcgaatgtcagaaagctaatgggcagaaacatcggagagacaaagttgagaatgcggcgatgcgtccatctccacagcgaaggccaatggcacggcactcccaaatggccaccccttccgcctcctttcccctcctccccccccccaatccgtgtcccatttaagccccattttccggaatttcttccttttgacggcccaaacactgttaattcagtgcctgtcgtcatggaaacttgtcaaaaagttttcgacacgtatttttggtaaaattcaaatgaattttttacggattttacgaattcgcgacagataaaagacagtaaaacacggcgaattacttactgtagacgactttctgtaccaattggtgtaaacaatgggcggctttttaattgtgtaaataaaggtgattaggaaggagaggcaaatgcacagaaattaaaacatttattaaaatttccgccatttttgtccaaaaaaggaattggacaaaacgtcaaaattaaaattccccgccaatttaataatttcggctctaagttcatttctctctctctctgttcgtccttttccacanaactttttgccctccccccccccccatcgatgaattcgaattcaaaggcttcttctcccctcggcactgccattgctttggccaccgccggtgccgtggtgaccattcaaagcgcaatcattgccattctctacaggaaatgtgccaaactgacgcaaattattcacaatttacagaccgaaaattcgaacacttcgcattcgttgaggtaaataattttatattttattccctgaggcaaaaaaaagaaaaagaaaatggctgaaaatttgttttgagtaaaaacggaaattacatttcaattctcaaaattcccttttccaacaaaaaattctttgaaaatagcgtggcaaaagaataaagaataattagggctgccgaagagcaaaaaaaagaaaagaaaaagaaataaagaaaccaccgcctgccaaaaagcatttgccattcccaatttcttatagtcttataattctgacactgactgatctttccaaaaaggaacgaattggtccttttgcgccgcactgtccttttgttggagaggcgaattgcccaaagtgaggccaatcgtaccgaaatgccaaaaactgaaaaggacgacggattgggtcggcacgaaatgtgcgaagaacgaaaagccattggccgagtggcgtcggcaaacagtgcgtcggagggggaatatgcggacgcggtggacgacgaccccgacttttttaagtacgacaaacggagaaataaccgaagggaaaggggccgaatcggacaaatttgaattcagccgaaaagcgaaagcccaccttttagggcggggaaaaagaggagaatgctgaaaaagttggctaattttcttaaaaaatttactatataaattcttagtttttccctgcggcgcctttcggcaccgccggacccaaaaatccaacaaaatattaaattccaaaattagcatggcgaatctactcagaatagaggtagagtctacaaaattccctggcggtgccataagctttattttttttaacaaaatggcgcaaaaccgaaaaaattggttattttttgacaaaatctgttaataaatttcattttaattttcaaaatttttcccagcggcgcttaacgacgccccaacgtatgatgctcatattggaagcaataaaacttgtgttaatttaatctaataaattgaaatacttggattttccgcggtaattgcccaatgtaccccctttttgaaaaaaccctaaaattgtctgtgaaattttcagggttttccagggtcactgatcaaaaacgagtatacatttcgctcaacttatcatcctgggccccaaattgaacctaaaaggggaaagcctagctgaacactttaaaatttggtcattttacttccaatcaatcgatcgtcggttttccccaattccgcttcttaatgccatcatccgatccgatcaattttcaaattttcatagccaaactctcaaaacccttttcagcacttttattttatcacagaatgagcagcaaaacgaatgggactaaagtgtgttctgcggttgcggactcaaaatttgtgagattatttttgattacgaatttggcacttcccccccccccgccatatttttattacgaatcttctctcctttcccctcccactttcaatcatcatttttttcatttacctataccccttttatctaaagttttttaattttcgcaatttctcaattcctcccttttttctagagtagagcgggaccgggaattttgtgcaaaaccgggacttgccgggacctgagaagtcgggaccgggacctcgatttttgttcgggaccgggaaccgggaccaaccgggaatttttaaaaattcaaaaaattaaaaaaaaatcaaattttaatttatttcaagtgaaaatattaaataattaaatttttattttggtttttattttataaaatccaaaagttaaagctatttaaattaataaaaattttcaaactaattttcttcaattatttcaaccaacaatcattttgtactttaaatgatcgaatattaatagaaattcagatttacatacttttcacatcactttttttcgcgcgcttttccagaaaaactttggagaaaaaagggggtccggcggtgcccgatagggcgcgcccggggaaaattttgaaaattttgagtgtaaatttattaacagatttttcaacaaaaaaa

SEQ ID NO: 21531 - DNA, 1215 bp, Heterodera glycines
agacggcgagaactttgtgccgcttgatgcaattggtaagctgcagatgtatgtcagagtttgactcttttcttaattggactttgccgatcgtgcgaaattccgcattagggcccgtaacaaggtgttcacgctgccgctgcgacacccggaggtgcacgccgccgtcccaagcttggaagacggcgtaaaagaacaaaaggaaatgactcagatggcataagcctggtggaccctcgcccggagaatgccccttcgccacgcggaaccaaagagttgaagaggaaactcgcacagaatccgcttgccagtagcctactcaatcgactgtttgttgggtctgggttcgtcggacaagtcaaacaaacgagaggatttgttccctcaaaatggacaagaaaataaacaaaatatacaccgacccggccaatccgggcgggtatgcgggtgcgagtgccctgtacgcggcggtgaagaagaagcacccgaagttgaagcgtaccgagtttgaagactttttgaagaggaacaccacctacacgctgttcaagccaaagagggagaagttccgacgcctacgcactgtgcctacgggtttcatgaccggtaagttgtactggggcttatttcgcacaattcagggttcagatgttcaggcggacttggcagatttccaggcactttcgcgcaagaacagcggctaccggtacctgctgttggcggtggatgttctatcgaggcgaatgttcggcgcgcccgtaaagagtaagcgcccagtggacatgaaaagggcttttgaagagctatttgagcaaatgccaagggtgccagacacaatgtacaccgatcgagggctggagtttgtggcaaaaccgttgaaggagttttacgcggagaagggcattcaaaagtttgagaccagttcaaagaaaaaggccgccgtggcggagcgtgccatccgcaccctaaagactcggctgtacaaatatttttccgccaacaatacgtcggtgtgggtggatgtactgccaaagtttttgagtgccatcaacaactcggtgtcccgcgcgaccggacttagaccccaacgaaatcagcgacaccaatgcgagggaggtctgggaagaggggtgtacggcgaagggctcgcacaattggaacagacaccaaaaatcaaagcaggggaaacggtcagaattcccgagcctaagcaca

SEQ ID NO: 21532 - DNA, 1271 bp, Heterodera glycines
  unsure (1)..(1271): unsure at all n locations
cgacgcgggcattcgaacggtgggagggcccagcggaacgggcgcaattttctgttcctttccggacgaacacatcggacattacacaggcaagcgaagtcaatgctactgctgtgtaatgcacctttcccaacactcattagcgcttttccttagttttctataagcatttttctctcgctctctatctctctctctctcccttctctctttcttctccttccactctcatcattctctctcttctttctcttttttgacaattaagtgtattatatgcttttgcagcttttgtggatgaaattgtcggcactgcgttgctcctcttttttgtcaatgcgctgatcgatccgcgaaatcaagtgccaaaatgggtgcatccgatcggctttgggctggcaatctttctgatcacttcctcctttggcatggtgcgtttgactttggcacgatcattctctcactcatccattggcattttccgcttgacagaatgtcggctctccgatcaatccggcacgtgactttggtcctcggctctttcttctatttgccggctacggatgggaagctattgcgtccgttgttgtttatcccttattaaataatgccaaatgcttcctttctccatttttttttggcattttcaggtggcactcttattacttttggattcccatcattgccccatttgttggcgctctgatcggcacttggctttaccaatgtatgattggccttcatgtgccggacgatgaagctgcacagtcggtgccaacaaaaacaggcgaaaagtcaaatgattttgagtttgatccgctgaatgggccctctgactgattggcactcatttttacctttttgttattactttgacccgttttctttcctataaattgtttttgatcacatatctttgtcaattcttcaattcaattgggcgaatttggaaaaaatgtactcaagaaaaatataatttttttaatgtctcccgcaccataattatatataatatttttaattttactcaaccataaatttttgggataaacccattaattaagaagcaaatccaaaaatttttcctgtgcgatgccatcggcacaatttgctgattctgagttccattttctgttttctagatttgattattttgctaatcatttccggaaattgggtcgtgtggccgctgactgcggttgtttcgacttcgtctgacccggtncaaagaacagacgtcaaccgaggcggctgaatccaaaacttttgat

SEQ ID NO: 21533 - DNA, 1779 bp, Heterodera glycines
  unsure (1)..(1779): unsure at all n locations
aaaaatctagtctcctcgagacctggatccaggcctggacctggattttttgaaatttgtattaaaaagcaatcaaatgcttgaaaaaatcaattatttgatagaagcatctaaaaatatctaattaataataataatgtgtttttaaatttatttaatctgtttttgaaaacttgaaaaaacatcggtcacttgaaaaaataaattctaaaatttcgtccaggaaaatccaggttttttcctgttttgcctggacctggatttttttcacatttgacctggatttcctggacaaaaatccaggaaaaatccaggcctggatctaggtccaggccgatctctagtcattactttattattttgtatacaaattaatgactcattaatgctgctgactcatcatatttgattgtttttttgttgattaaagtataaacaaataaatctttaagaaatagatccggtccctggtttttggtaattttgaaaattttttggaatttttgagctgcaaagctttcgaaaaattggaaatttgacattatatattaactattttcaatcataaatagttaaatgtaaaaaaagaaacctttttaccagtgtatttttattcccatattattttgaaatttatatgtttaaacacactgttttcttcgttgataaggcgaaattctcattgaaggaatagaaaagttttttatgaaaatacaaaaaaaaagaaaaattacgaagaagcatcaaacaattaatcagcagaagatgagtgattgattattcatcggccaatttgcgctttctctttttcgtcttccaccgtcaaatcaatggccagcgtcactttgtcctcatttttgtcgtaaagtcctttatccatcatcaattccttaattttagtgctgctcaagacagaaaaattcccgagatgcgaaaccgagacgcaaaaaacgggactaggcgtcgcccagtaaatttcaaagttttagtgcaagttgttacagccaggttttatccccctaaaaatgaccaaattttgcgatttcaaaccgccagttcttttgggattaaaaaaaataaatttgtaatttcctctttatccccttcactacgatccacccacctcttttacaccgcaccccccccccccacctcgctgcgaaggggtccctcattttggggctctctgcaagcgggggggggggggggggagcggtgtaaaagaggtgggtggatcgtagtgaaggggataaagaggaaattacaaatttattttttttaatcccaaaagaactggcggtttgaaatcgcaaaatttggtcatttttagggggataaaacctggctgtaacaacttgcactaaaactttgaaatttactgggcgacgcctagtcccgttttttgcgtctcggtcttgcatctcgggaatttttctgtcttgagcagcactaaaattaaggaattgatgatggataaagggctttacgacaaaaatgaggacaaagtgacgctggccattgattttacggtggaagacgaaagagggacaaagcgcaaattgaccgatgaataatcaatcactcatcttctgctgattaattgtttgatgcttcttcgtaatttttcttttttttgtanttttcataaaaacttttctattccttncatgagaatttcgccttatcaacgaagaanacgtgtgtttaaacatataaatttcaaaataatatggngaataaaatacactggtaaaaaggtttctttttttacatttaact

SEQ ID NO: 21534 - DNA, 2419 bp, Heterodera glycines
cgtaaaaccaaatgatacacataaatatatatataaggtacgcgtaaaagtccacgggaaaaattttcggcattcgaacccggatttggccccatttttcatccaaattcgcatgctaaaacccaaatgagtccatgggataaaatattaggcattcgaaccagaattggttacatttttcatccaaattcgcaaagtaaaaatacgcaaaagtccatcatcgttaggacccgaatttggcccattttagcacatggtaaaaaacctaaaaaaagccatcgaacaagaaatggactcattttccatccaaatgcacatggtaaaaaccccaaaaagtaaaaccgtgaacagaaaggcaacgtgtgttgagccgactgcaatttgtttgatttggtccgctgggatttgctgaagtgcagcggtcacttgctgctcacttttgttccgtttgtccgcacattccttcatcctaaattattttggcaattttaagtaggggtgaaattaatggcatcattttccggtgtttttcatcaccggcattttatgagtcaaatgatgaccatttcattagttttactggttgtttaatgtcaaacactcttggtacccaaataattaagcagtgttgctggctggcttggtgatgcattcttgtactagtacaagaaaactgaaaaaactagaggtggcaaaagcaaaaaagtatttgtttgagctaaattttggtaatttttgctcataatggcaaaaagagactattttctatcatgtgaaaaacaatttttggtctagaattaggatggcttttgaccggtaccaagaatgacatgaattgaacaaccaagaatgttatacagtatacgaatccatggccttactacaaatttgacacataaactgctgggaaaaccgaaaatattataaagttgcggaaaaaatccctaaaaaacctttcaagaagtccactctcattgcccggcagagcttggccgaataaaaacaattgtttctggtcagacatttatgcttctattgaattgaaacaaaaaataaatgttattaaaacaaaaatttgttgcaaattatacaaaaacaaatgcaaaaaaaaagactcaagtacagtttatgcgtccaatgaacttttatgcgtccaatcaaatttttcatccggcggccatgtttcggctagctctatttctgttgacctacaccttaatccaacatgggggatggcacggcttaatcattgacgaaatcggataccgaagagcgaacccttgtcctttttgtgcaaaaactacgataaaggtcgttgtattaacgaatctagctaagaaaggaaaacaacatatgtgtataagactggtaattctgagaatatattccaaattttgaagaattttgtaaaaatagacgagaaaatcttggtggaatatcgtcaatgcaatacaattcggtgtaaaaaatgattggacgcataaaaaagtgccgagattccgggagacgcgagagcaattcactgatggacgattcatcacaaaattctttgtttttcggctcaaaatcccaattttagcagggttacgaccttttgtaaaagtatgggtatgggttaggatttcatttagacaggaaattgaaaaaaaacaggagccggatctaggtaaattcggtaaaaatccgttttttcgcgatccaattcctggcgcagtttttaaaatattcaaatttcgaacccccccctgacccggattcgaacagaaaactttcggtaatagtgccaattgtagcctccctaaaaccataatccagactcgaattcaaacccaaacagaaatctcttggaataagtcgaattcttagatttgctattctttgtttcttgttgaatcgttgcatcatcaatcaccacattcagtttcatcatatccgaatattcaagaatttgctagaaaaatggtggaactggcgatctcaattttttttttaaaccctcgaaaaacctaggaaatttttgcgcgttccaaattacaaaaagtaatgtgtagtgtttttcgcgagccatgctaccaaatggacaaaaagccgtaagggccaattgatgaaaatgaatacctaaacattacctatttttaaacaggccagagaaaatatgtaagcagctaaatttatgtgttatgtatgtctgccatccatcagacggacactctttttctctgcaatgtgtattttctttactatttccatgttttccctctcactgtccaaggaaagagaaaatactattatgtctatcagataactattggtcctctctgacaaatgagcagagaaaagcctgcacactatctcgccgtttctttttttctttgtaatttctctctactttggcgcattctctcttcatttttattat

SEQ ID NO: 21535 - DNA, 1308 bp, Heterodera glycines
cctcgccttttcgaccaaatgtgcaatattttccctgacctttgaatgtatccattcacatcaattgtgtacaacggattaactggtaaggaaatgtttgaaggaaaatttgccggttttccaaacaaaagatggtatggggaaatgttggtcgtttctgacggagttgtattgtatgaaaacacaacaaatggaagacggtcatcccactcccaatttgacgcagttgaccgttttagcattcccaaaatcgtctgattcactctttcagttacgccgttcgcttgtgggtcatatcccgaagtgagggtcttttccatttgcagaattttggtaatttcgttaagagtttcattcacaaactcttttccgcgatcactgtgaatcttctttggtgtcccaaaaattaagacaaaattttttacaaattcgcgtgcaattgtgtctgcgtttttgtttgggattggtgttgctaccaggtattttgaaaagtggtcaaccgcgactaatatgtatttgcatgacgaatgcgcgggtccgatagacaaaatgtcgaggcaaaccaattcaaatggttcggatgttgcaacaattttcattggtggctcgttagacctcggatttcgggtgtgagcacaaattcggcatcgaagagctgctctaacacagtcggaatacatgttaggccaaaaatatttctcagccaattggagaaaaattttcttcccgctcatatggcctgaacaaattcctgagtgtcgctcgttgatcagtttttcgcggtatacggacgggacgaaaagacgacttttaccatctttttcacacttatagaggaggtcgtccaaaacagtgaaattgttaaggatagacatgagtttttggcgatctttaggctcaattggcagcgttttttctgtcaaaaattcgtacaaaaagccgagttcgctttctctcgttttggtcgcccattcgcgatggttctcgattccgtgctgtttttgaccatcctcattttgtcggatttggaaagcgacgattttgtccgattccttcggtgcttctggacattttaatgcctgggaacgcgacaaaacgtcggcaataacatttttcttccccggatggtactcaacttgtaacagaaatttagcattcatttccattagccatttatccacgcggctattcccagtctcttttttacttttaaacatcggtatcaaagcgcggtggtcggtgaataccctcgtcggcatcatggtgataaattggctatattttttcgtgccaaatcgtactgctagt

SEQ ID NO: 21536 - DNA, 952 bp, Heterodera glycines
  unsure (1)..(952): unsure at all n locations
attagtatatttattttattttatttatttagtattttcttttacttttctttttatttaatagatgataaaagcattcgatgaaacatgaataaaattgtaacaatgtgttattatattttatttaattcttttgcttttagttaattttaaatataaattatggttaacaattatatattttattgttgccgtatatgaattatttctaatattttttgcatttttctattgttgaaaatcagctcactcatttactcttgcgaaagctttgtcaactaaattaaaaatttgattattttattctttagaatatttggcattattaattttgcaagttcgatatgaaaaaatgttttgaatatcattgtctatttttctatattattaatcttctaaaacaatattcatcatgagtgaaattacttttctgaaatttattttttttaattaaaattatgttgcacggtaccggtactgttactgaaaaacccggtacaactgagtaactagtaacggtttttaccggttttcccagccaaaaagtaccggtttttcaacccgaaaattaccggtaccggtttttttacaattaccaattaccgtgcaactctaattaaagtgcttgccggaatccggattctgaccaggaactcaaaaactccgattaagtgtttcgtctttacattttttctagcaatattggaacgatatgagctgggtgttgtgcgaaataaatcagcagattatcagtcatttatgcatttagtttctaagatagattataatttttcaaaataataaatattctcacatttgaagctaaattntcttaagttaataatctttaattaacttgattaatttgttagaaaaatatttttaagactttttatagttactgttgcacatttgtttttttttattttataacatagttttgtttattact

SEQ ID NO: 21537 - DNA, 1143 bp, Heterodera glycines
  unsure (1)..(1143): unsure at all n locations
ttcagttcctcattattgattttttattttaattttttcataattaaattactatataaaaagctatttcttnaaagatcatatttttcaatatttatctgattatttcatataaaattgaataaatggataaaagatcaatcgcaaatttatttttagagcaaataaatggttttatgatgggtgcaaatcaatatacatttagtattgatttattttttaagttctgtcagcatatatataagcagcaaattattgcttttgttaaattgatatggatgtgaaaaataaaaatgtgtcattaatttattttaaatataagaaaaataacaatatttagtagttcttattattttaaatatttgaagtttcctttttttaatagcaaataagaatttggaaaatttattatgaataatttcggtaggagtaaaaatgagaataattggagcaattaattgtttatttatcgaaatgtgtgatttgttttattcaattatctttatgttgcttacaaaatattttggattaaaaaggtttgtataaatttctggatttttcatttttattttttattaagtttttcacattcccatatttgtgtgtatgaagtgtcttaaattaaataaatttattttaatttttacaacaaaagtaaattttttttttgttttttatttatttcttgttcgaatcggaactttcgttaacgaatctcataccttttcattcttgtgcttctttctgctttttgatttaatagaatgtgtttataattgtgctcattttttgtattaattattttcacgccatagtcataagcaaatgcgtttacgaagctgagctatcgggtatcttaaagtttagcgtctttttaaaggattgctttagtcataaaatctttacatatttactttatataaaaatttttgcttgaagatttaatgtgatataagatttgaatgaaaatttattttaaataaatacaattaatttagatatatgatgaaaaattcatgtcttttgcattgaaatttattttgatttttctctcaataaggttcttggaaattgatttaatttattactgatttttgcttaattaaatttgtaaaaaattttaatattctcaggaagaccata

SEQ ID NO: 21538 - DNA, 2148 bp, Heterodera glycines
tacacaccgtttcaattttggccttccagttccaaaaagatttgcatgtgtggaggtggttttgtaagatagtaaagggacaaagggtggaggttcgagtccgttgttcaacatgaatactttttatttacttttgtccaaaaaatgaaaaaagtacgattttcggaaattatttttgaatgttttttgacaaccaaagtgtataaacttggtatcattcgaaagctcttgatgaggagaagcttctaaagaaatcaaacatagaaatcgatgcagaatttttttctctatcggtgttaattcgatttttctctattatcagagacaaagaaatagtacgccaaaataagaatgtttttttttctgtgcactccctatttattggttcatctctcgttttttgaaacggtgtgtctattggtcatccatctgttctttctccgtcttcgtcctgcttcggcttctcctcctccttttgctggtgtccctttttgtgtttgatcgcctgcacattgtccgcaaaccaaagtgtccgtccgcaaatgtcgcaaaaatactcgcgtcccttcgcccgctgctgctcctcctcctccgcctttcgcctgtccaattgttcgtccaattccgctgtcctttttaaattggattataattagcattctccctccgttgcgtccaagcaattccaattgtttacttcttcgtcttccgccacagcgtccaaaatgccatggccatcggcggtcggcacaacggaggcggagagcgggtgcggcattccatcggcggtgaacacaccgtactccatgctcctgggtgggtctattcgtcttcggatactgtgttaaaagggtgagaaatatttttgttactctctctctatctctcctctctctctctgtccctcgctctctcaccattctcttgctttatatatttttccctcgctctctctccatctctctgtctttgttgatctaaaacaatgcctgaagggatgttggaggcgtgcgaatttgatgatcagccgctccaactcgcgacagtcgccgtagtcgtcgctgcgcaatttatgctcaagcgactgcagaaacagcgaacgcacgcgacaggcgaatgccagcgaatcgtcgcaatggcgcgccttcacaaagtgaaactcgacaaaaccgtcgcaacagagcacagacggagagacgcaagtgatctgacagatgagcaagaaaagcattgatcagacgaaattggaagaaaagcataacgaaggacccaaacgccgtccctccccctttcctctttttgattaggagagaaaatcccgaaaaagcatggcattttataaacaacgggaaaacggtcgcacatttctggcgatgaccaacaaaaaggaggcggggatgcggcacgaattgcacaagtacggcttcgtcgtctccaacagaaggccaaagtagatgagttggtgctgcgcggaatggccctccgagtccaaatcgtccgatcgcagcacttcgggccgttggccaagcgcactgttcgggtgcagccccccgaacggcttggagggcgtgtgcgcgaattggtcgtgaccctcctaaagaatgggaaaagtgagaaatggggggggggtactccctaaatttcagggattggaaaaagccatcaatacaatagacagattcatggaattagggaaaccggaagggcaaatttttttgcattttgatgagcagaaactgttccaatgggccgtacgccctattgggtaaccattcgctactcgtcgcactcggaaattgttggtcgggtccacgacgccgaactgcgggtagaggccggcggccagcacaagtttcagttccgtggcgacattgtcgtccaaccgatggctggccaattccctctccattcctttaccgccggtgcccagcgaaaattccaagtgctgaatttgctcctgagcattggccaaaatgtgcgattctgagccacagaaagggaataagtcagagagagtgtaagggaagggaaagcggcctgagagtgcggagtacgagagagagaaagagaaaaagagagagagagagcgagggcgagagagaccttaagagaggagaagagggagagagaaacagaggaagagagagg

SEQ ID NO: 21539 - DNA, 1470 bp, Heterodera glycines
  unsure (1)..(1470): unsure at all n locations
cgatgccgttcaactacgttgtgtgagagtcttgttcnaatctaatatcgggattcactttcatatgtttccatttcagcatgactttggtaggacgnccgttggacaaacttcttcgagaggctggcgaccgtttcagtccgggaactacaattggcatatcgatccagatgctgaacgccatcaagaccctgcacaaagtcgggtttctccatcgcgatgtcaaaccgggaaactcagccattggattggtggagtcaaatgaacaacggctgctctatctcatcgacttcggaatggcgcgtagctacattcgatctgatgtgagagggcggcgggggacatcttggcgattcagaaataacccatccccattttccagggtcaacagcgacgtccacgagccacttcgcagttccgagggacgccaatttatgcaccaatttctgcgcacacaagacgcgactacagccgaaaggatgacgtcgaatcgtggttctacgtcatggtcaaattcttcaaaggaactttgccgtggaaacatattgcgggcggaagggacgaggtaagtaaaaagtgatttgatggaaatgcataatgttcactatttgatttagatcggagagatgaaatgtcgtcgcttggaagggcaaccaaccgaagttcgagaaaaggccatcaacgatctgctgggaggatgtccgcctgaattcaacctgatacttgagcacattgtgcgttgtttcggatgatttctacttcaaacaaattgtaattttttcaggatgccctgcagctggaggaccggccctgctatgagatgatcgagctgctgctgcgtggatatcttgcccaaaacaacatcgaggagcatccatatgactgggagatcggaagacgcaactcggatcgagaaaagacgcaaattgagaaaccagcagagaaacagtgaggaggatgagcgaagaatcacccgcgagatgatgaacaaacggagacacatattcgcgagcctagcatctgtctaatcacatttgctcataattgtatattattgtgatcggtatcaagtcgtctttcattgtatacttggcattgacgacacacggaatgtatgatcacatttgctcattattgtacactgtgatcggtattatcattcattatatacttgccatatgtacatatatatatgtataaaaaactgggtcgcaacaagaaaaaacttcgtttttgggtatttcttgaaaattcaataataaatgtatttttatgccatgaataaaaacaaagaattgcaattcttatctcaaattacttcaaaagtaatttagcttgatttgattgttggcttgtgtattctatatatcatatgtagctatcttctagtttttcgattaatttaaggaatcaaaaaaaccttggaaaattttcccctcagtttggaaaatgtatattcatttgatggtt

SEQ ID NO: 21540 - DNA, 1732 bp, Heterodera glycines
agattgaaagcctcattcaaaatgtttagagactcttccctttttcacatttcggcgttctcggagttggttcgcatgatagcgattgattgatccgtccgagaatttcacagtataaattacgcctttgcaatcacaaattattcctgccctccaattctgggagaggcggtggcgcgcgtaaacggtgtctttcatctgaaaaattcgttgtctcgtgccaaaacgtcgattgaagtgtcgttccatttccgcgtctctttccgagggttgcgaaagcggcggcttcagcaaatccaaagtggtgcgcggtttgcgaccaaggagcatttccgccggggatttgatgttcgggagcgaatcatttggtgtggtccgataagtgaccaaaaatgtttcaatgacgtcctttcctgggactccctccccttttaattttcgaaaagcccttttaaaggtgtccacaaaacgctccacttgtccattagacattggattatatggtgctgaaaataaatgcgaaattccgtttgccgctgtgaatttggcaaaatcgttgctggcaaactgcgtaccattatctgacaccaaaatttcaggaattccgtgtcgagtaaaaaggtaacgcaatttatcgacagtggcagctgttgattttgttggcatttcaaagacctccgggtactttgaaaatgcgtcgacaacgattaaaaattctttaccgtaaaaggggccggcatagtcgacatggatccgttgccatggatgttctgcctttggccacgagtgcagatcagtctttacaggagctttggcagcagcttggcacggctggcagttttggacgattcttcaatttcggcgtccaacttcggccaatagacatattgtccggacaactgcttcatccgcttgattcctggatggcctttgtgcagctgctccatgattttcttttggcagaattttggtatcacaattctgtcgccatacattaggcaatctttaagaatagacaattcgtcttttcttcggctgaacagttggacagtctccgattcctgcttcagcaaatcattgtttggccaatttgatctgatgaatttgattgccttctgaattgatccgtcaattttcgatgctgttgccaaatcggcaaatttgataggcaacttctccaaattcaaattgaaaatggatgtcagatcagattcaacgtccaaagcggcgatcactttctcctcttcgcattctattccttttgcgatgagtcgtgagagtgcgtcggcgtttccaaaatcattggttcggacgtattctattgaaaaatcataggccaataaaattaatgaccatctgagcagccgatttgcgctgcattgtttgactccctttttactgccaaaaatacttagcaagggtttgtggtcagtttgtaacgtaaaatgtcttccatagatcattttatgaaactttttaactgcaaaaatcagtgccaacgcttccttttcaatctgggagtaatttttctccgctggtgaaagagattttgaagcatgggcgatggccttgattgatccgtccgcaaatttgtgcgagattactgcaccgatgccataatcagaggcatctgccgcgacaacgatcgtcagcagcaaatcggatgccaaaatttttttcaattttgaaaatgccttttggcaattttcattccaatcccactccttctcct

SEQ ID NO: 21541 - DNA, 1681 bp, Heterodera glycines
tgaaaaacctggatttcctgttacaattgaccgtttgattttcttcagatcaaagaatgtctcccaaatttgctaccggccctttatgaagagactaaggtcaagcaggaacttgtgcgggaagttgagatgggaccgtttaaacacattgtcgacgacggactcgacctgcgaaaggcggcctttgaatggtgcttaatttgccgcaaaattaatccatttatctttcgattgtcagtatgtacacattggcagaccaatcgttggatcgtgtgaatatcaacgaatacctgacttatgttgaaaacggacttaaggttttgtcctttgttggccaacttcgctttaatgcaattgttttgaggaccaacacgacataaaactgctcacttatctgatgttggtccgattggttcacaaatgcccaattcaaatggcacaacgtctcgatgctttttgtgaacatataaaagtcagtttcgactaaagcttaaactggcttcattttctgtatattaagccccaattgcttttgcgcccaaagcaaaacgccgtaaaacaggaaaatgacaagcaggacgaactgaaacggtccgccgtgcgctcagtgatcgctttgcgcaaagtgccgaacagtgacagatcgcagaaaatgaccgacatgtgggaaccctttttaaaagccagttgtatagtgtgattttagttgggatgtgatcaatggcaatcctgacctaacacagatgaaggaaatgcaggtgggtgggaaaatgttattggcactgatttttgattgcttttaaagacacgcgagcaaaatttgtggtcaacaacgaccaatggatacgaaggtggacaagaaacgatggaattggaataagtgcaaatttatttggaagataaaagtcaccgtccgggtgtttattgctctgtttttattattgacaaacaacaaatttatgttttactatcattgtaaaaaaaacatggccattcatctgcttggaaaactttgaataaaaggcatatttataggtaaataaatggttgggttagcagctaaagataaaaataagttagttatttcgctgagggcggcttggatcttcggtggcaactgaataagtatttaaaatatccttttctgctgatcatttcgctttctctgatcagtcttcggatggaatgacaaagtgtgagaatctccgattttcgctgtttcttccctttgcgcgaccgcccgaaaaccccgcggcgcgcccattctttcgtttcgccgtttcctccctttgacccatttcctttcaatcattttgcgattcctttctcagtttggtgtttcgcttcactcttttcggcatttcctttactttttattccctgggaatgttttgcgtttcctttggctgttctctctggcgcggagattgaatcggcgataggaaagaagggaaaggaaagggcgaagaataaataaaaaaaaagcatttacaaaaagccccgccccctcccccaaatgccatccaatttcacccattttaatggtttaaattcttaattaaaaagaagtataagaagaattcttttcatgacagtccaacaacaacaacatcacattggcaacagtgcaaaaagtgagtcattcatccacacaccacacttctctccctctctctccctc

SEQ ID NO: 21542 - DNA, 2427 bp, Heterodera glycines
tttttaaattttaacttatcttacacctctttacccggccataatttatttatttttaatccataaccaatgctcttggacactgcccataaaaaaacaaaaaaaatttttcccctcacgtaagtccaaacgacaatttcttcaacttcgagcagtacaaaccgcggaacagaacagcaaacgacgggaaacatcaacagcatcgccatttgtggtcaacagcccgccaagagagagagaaaggacaacagaagagaaagacagaaacgacagaaggaccgtcattcagaaaagtcggctcaattgatggacatttggacaatttgagcatcaccaagttagcttcgaaaagagaactctgacaacagagcaactcttccgtcaattacaacatttaaaacagcggacaacaaaaagaggaagcaacaaaaaagagcagagggacaacaaatggacaataattaagagggaaggatgataaaaaagaaagaaaatgtcatcaaaaaaaaaaattaaaaaaaaacaataaaaaaaaacaaaaaataaaataaaagggacagaaaagagcaacagccatccaagctttggttgtgaattaaaaatggggggccattttcattggggagggaggtgtaacatattctaattatcacccatgagcaaagacgaacccttcacacatttccttttttggccaatcgatgttattcatcttttccacattccccccgttcaccattttattcactatttctcttttctctaactctcacaaatccccgcaaatccccgccccttttccgttcaaatgtttcccccaccaatcagtcagtcgcatcggaggagatgagagtcgcgtcggaggagatgagagtcggacgtcggagcgatcaaagacaaattaattatttattaatcatttatttattcacgcatttaatccgacataataaaagagccatacgaacgattggaccctttggacttcttggggatcagggcccgattcctaagattaagacccttcagtcctgggacaatccgtctcctcccatcccgctctggcatggatcctcacgtcttactaatagcaattgactaagctttacacgataaaagtttcaaaagtttaataagagttactgtattcctaattttttccaaaaaataattgaaaaatttttcaaaattggtttttcctgtaattttctcataaaaaatttttctaagattttttcttctgattgaaaattgtcaaaattttcagggggggggaaacgacggaaaaggggcgggctttgaaggaatgcgaccgcgcatatcaaacatttcccctttctttttcagatcaaagttttcatgaaggaggtgcggatcatgcgacagctccaacaccccaatgtcgtccagttcatcggtgtggcggttggccaggagcccctgatgatcgtcatggagttggcgacggaccttcgacgctacttggacatgtcgaggcggcaccggctgaacatgcgcgccaaactcttcatgtgcctcggagcagccgccggactggaccacatccactcgaaggacatcatccattgcgacatcgctgcaaagaactgcctctacgcggaccgcatggtgggtgagaacatgatggacgagggaggggtcagaaaaattgggtaccaaaatttaaggaaattggaaaaacaaaaattttgatttttttttggcaaatgctcatttacgctgtttttcctctccaactactgcagattttgcttctcatttgctttgtccaattcattgagtatgtttaaccaaatgtcttcgttgtagacctttccccacccattttttcagaatttcttcttaaaacatagtcgtcctcgcctatgtgtccttcgccttgatgctgttcttcacactgaaaatgttccggcacaacaattccttgcttcagcaaggagccgtcttggagagagtgatcaatttggttcatcatgagtcatcgtctgaaaacgacaaccaacaaatcgcggcgcctttttcggcgtcctcgtcatcgtcaggcactgaaaatgctccgcaaaatgatcaattgttgctaattacgggaggagaaatgccaagccatggcagtgacagtggaagtgccacagcgggacaagtgccaagccatgtcagtgaaagtgccatcgctgagtagaaacaaaatgggatcgggggtctacgggaatacgaagtatatggatattgtgggggattgatgttgagccaagtatggtgtgttgtccaaatgttgtcaaatgttgggacaaatatttattaagaagtaaattgggaaattggcggaagaaaatggagaaacgatataaaattagaagagaactaaaggaggagattaaaatataaaacgactgaactgactgaaca

SEQ ID NO: 21543 - DNA, 1430 bp, Heterodera glycines
tcaacgcattcctggatccggagcttcacatcctcacagcgtcatcaccattcgcagattgtggaaatttccgttaccattatctgcaactgagccagagcaattggatcaaaatcgacacacgcaccgctacgatccagaaaatcgactccagcagcatctctgagatccacgaagcctctggagacaaatcgttgttggaaatcacgccgctagtttttcatcgatggacgatcgacaacgaaacaggcgaagggctttcgcgcacttggatgaatggctgcgtttggatcaatggaagtcgaaggagaaggagcacaaaacggcgcgtgcgctcacactgggagctctcccgaacggagtgattggcctcaccgaagaatggttcatggacaaacttcggctgctcgtctcctactggacaacggcatgctgcatttacgtcacattcatttttgggcgcgatgtcctgatacccttggtatgggtctacttaatggggcccgtcatcgttaccatccgcaatttggtgacgggaaatcagtggacgcagcggaacagagctactcgaggcacacggcgagcaccggcaatttcaaggattgaggcaattgagctggtatcgcctccaatgccccaggaaatgagagcgaatgaaacggcaagttcgcaacaagaggaccccgagccgtcaccgctggtgatggaactgaaacgacaaatggtcgcgttccgctcaaaacgacgttttcaaagccgtgggaatgtcgcgactgaacgtcagccacgaatgtccgttgagcggacaaatgaggagaacggggaggaatgaacgaagcagcaaacgaggagtgatgaatggatggaaagatgggaaaaatagggcaaacgggaaatgatgaagggaagggaggacaaaaagggggcgaagggagggacggcagcaggcgagcacgtgaatgaggggaaggaaagcgataaaaagcggatgtggcgccttctccgcgtgaaggacgcccgaggcagtgcaaaaacgccgatcggaacatcgcggtgcgacggacgaaacgacacatcaccaaggcggacagccgatgaaaatcggcgatcatttgatggaaaattgcgaatttgcgggagagcaaattcgcccagacccttcccccccgcttttctccggtgatgtgcccccctccccgcgactcaccccacttttgtgccccccaattgtgccatttttccatttgcatttcccctcgcattttgtccccattgtcacaattttccccctttgtatttctcacacatttcttatgtatgggtttaattacccaagtttgagataaacttgcggagtaatcttggtgcaaattcttgggacggcaaattggcaattggcggcagcaaaaatcggaacaaacggcgcgtac

SEQ ID NO: 21544 - DNA, 2053 bp, Heterodera glycines
tttagagcaatcaactgatcagaacactgatcagcactcctggcggatttattcgtcgactcaaagtggcattttctgttgaggacctactgataactagggctgggaattttatgtaagaaaaatcgataaatatttaaataaaatatgtataaaaattgctaaaatatgtatgaaatatgtacaaaaacccagaaatatgtaccaaaatatgtaaataaaattttaaaatggttattttttggaaaaaaaaaatttcgtagggggtgaaataagcaaaaaaaaaaaagaaaataacctaaataagcttagaatcacctcttgctattttaaaaattaattttgatatctattttttgaaaaaaaaaacaattttttatgtgtacattttcaaaaaaaaaatttttaattttcacgggaaatttctctaaattctcaaaaattcccaaaatatgtaaaaaaacaaataaaatatgtacgaacaaaattgcgaaatatgtaagaaaaagtccaaaatgtataaaaatatgagaaaaaccccaaaatatttaaataaaagtcccggtttttgttcgcaaacacaaaaaattaagtgtttttcctaagagcatggagaagccaggaaaaaaatatgtatttaaataaaattcccagccctactgataactaatgcatctgctgacaatgactgacaacagagttccaacccgaatatgacaattaaattaattaatttaaaaaatactatttttacaaatataaaaatttttggcaaagatttgtcctcgggtcagcgcactcctcgcacttccggcactggcacaacggcattggaatgacatgatcgccggcccgaacactttcaacgcccggcccaaccgattcgaccacgccggcaccctcgtggccgacaatcgttggaaatttgacgtttggattaatgccactgacttgcttaattaattaataaattgaggaaaagtgaatttgtggcttttttcagtacaaaaacatcggtgtgacagatggccgtgaacattatcttaacattttacgtataatccaatccaattcaatcgcttcttcgcttgccttaatccgaacttcgccctcttttggcggcgccacttcgatttgttcgataaccaatggctttttcggctcccaagcgaccgctgctcggcatttgattgtctgtgattaatgaaatattaatgaattaatgcttgtggcgaaagaaactaaaaaatgatagtaaatatttaaatttaattattatttcatggcttctgcatactctaattagtaggaaacatctcctttttatggttgctaataaaagtttaggggtttttctgcttataatggacaaaatatgttttattgttttatgtacttcggaaaaattaagatattataatgagcaaaacattttctgaaataataaaaacaataatttaaatatttactatcgatcggactgcttatgcatatgtcttgcatcaataacaataatttttttaaatagggccgggagtccgatggaaaacggcggcggtcaatttggttttaattaataaacaaaattattgtttaattaatactcgcattattatggaagtatttttatttttcgtttacctttccagcggtatccattcaaattttgttgaaataaattggaattaaatggaaagcaaagaatgcggcgattgttttgctttgtctttggtcggtcggtggtccgttaatttgtgttttctttttgcattatcattgccattaatcgcactttttgccgggggaatctcagcagagattgcgaggcgattacttataaaacactcatcgcagcagaagaagagagaggacgattgattagtcaattaataaatatatgcaattagcgaagacaaaaatataattgaacattttaagacagaaacgaatggcaagagataaacaaaaataatttatttgatttgttttcgaatggttttttcgttggagaatggatgtaaaatgaaatattaaagttaaaataaatgatata

SEQ ID NO: 21545 - DNA, 2271 bp, Heterodera glycines
  unsure (1)..(2271): unsure at all n locations
ataaaatgaaattgtccaaattccatgaaatttttaaatatcagttatcatttttatgcaaaacttttatgacagttcaatgatttactgattaggaatcatttatttatttaaatgattcaaaattttgtgattttctgaaaattttatgccccaataagtggaagtgaacattggccaaattgctgggcccggctgtgccacccagaccaacaaataccatcgcaaaatgctggacaaattggccattgtgcgggccggcaccggcggcatggaaatgttggcacacacagaaatgccagtgaataagccacggcacaaaatgggccgaactctctacgaggcatggtaagacaggaaaaaaggcataaaaatattttatttaaacaatttaaaataattgtttttttttaatttgtcgattttaaaatatttttaattatttaaatttttgtttaaatgtttttggatttaaaaaaacgttgtttaaaattcaaataggaaattgtttggtgacccaaatgccgtgcttttgttcgtcaatcagcccgacctgttcccgttctgccattttgaacaattgcaattcactacttttgaggtaaaaattataatttgtttattttaattgttttttatttattttttaattaatttaaaggttgaaaaattggcgaaacgtgacggaaacgttgttcaagtgatccgaatgactttcaaggagtgcgcggaacggtaagaaaaaaatattaattatttaatgaacgttaaatagaagaatattaaattaatcaatgaaaatccaattaaaaaaacgaattacataatgagctactaattcagaaaagaaaaaaaagaattaaaaaaaccttataaaaattaaataataataaattaattaattaaaatactatctaataaaattgaataaattgttttaaaatttaaattactattaaattaataattccgtaatttaaaaaaatgaaatatatttccatgaataatttgcagttgccatcttgacgagagcgacttttcgctgtatgtggacggaaagcgagttgcgctggtgcacatggcgtacggatatattggggaacattatccaaccgaagtcaattaaaattttaatttttaaaaaatagtgctcaaattaaatttaattttaattaggcggaatggcaagtgcgcatcgccatggaacgctcaaccgcaatcatttcgccaaacatacgactgcaattgacgggcaccaagaaaatccaacaggtgagggggggggggggaaattaataaaacttccaaaattttatatcttacatcaataaaaaaaacgcgtaaagtccaaaaaaattgaataaaattcattcttggtattgtcgaaatcgctcaaaaaaataaatcaatacttttattagagttgtacgggaccaggacttggtactgaaaaaacgtacaactgaatactcaagtcccgattttgacttgttttgatcaccgggaccgggaaaagtcccgattttttcccggttttcccagccaaaaagtcccagtttttcaacccgaaaaggtcccggtcccgggtttgcccaaaattcccggtcctgtacaacttcacttttaattaataaattatatagcacaaaatgattgaatttggtttttttttttgttcgcagctattaaaaaaacaacaacaatttaattgaatttattttttcaaattaatgaaatttgtcgaaaattactcctagatgacggaatttacgcaatttaagcaacgacaaattcatcaccaaattcatttgccatttctattttattaaacaaaatatttttaaattttcaagaaaaaaaaaattcaaaacaccaaaaactttaccctaagcattttcaattaaattcacaaattttttaaaattaggtgctcagtaagcctggcgttatggagaaattcttcaccgatgaaccgcaacgcgttgccgcactgcgcgatgtgttcaccggtctgtggggccttgagaatgacgacgcggtcaccaacgcggttattgaggtattaaatgaaattttttaaatttttaattaaatttttaaacaaatttttaaggatgccatccaaaggcccagggattatgtgctgaaggcgcaaatgggcgctggcaaaggcaatttctttgacgacgaaatggtggaaaagctgaagacaatgtcgctggaggagcgnngcgcgtacattttgatgaagaaaaattggcctgtcgctgt

SEQ ID NO: 21546 - DNA, 2270 bp, Heterodera glycines
  unsure (1)..(2270): unsure at all n locations
caaattgggaaaaatacacccctaagatttaaaaaatttctcaaaaaattgatcgccaaaatttcatttttttcttgataaaaaatttttagattaaaaattttccttattcgaaaaaataataaaatgtttatttaataatcatntaaataaccaaaactaagcttttgattaagttttacgtgttttgctctttaaaaatccttaataaaaatttttaaatgccttttttcatgcctttttcgggatttttgtgccttttctttaattaaatttatttatttcgccgagccaggaattctcccctcctactttccatttttttcaaaaaaaattgaaaatgccattggtgcgttaagcgattttctgctgcccaatcgttagaccaaattatacggcacaaaaaattttgctaagataaacagatgaacaaatcagctaacatatgaattactgctattcacttcaaattaattaaggtcttcagaaataataaaaaatataaaaatatatattaaatatatttaagtttttgcctttgctcccctcactctttcattcccttctgctgctgctaccatccacaattgtcattttccctctcattgtaaatattgcgggcaccgctggatccattcccgtggatttaagtaaatttagccacaaaaatggccgttttgataaaaaaaatgtaatacattttgaaaatacttatttttagggacaaaatcttcgtattggaggctattcgtcccagtgaaaatcatggtcccggtcctttggatgcaaaattgatgattttatattcactgaatgatctctcaaataacaaactcaaaatgctcatcccctggcttttatgactactgtttgttgtgtcctttagttcttttaaagaattaaaaatgcttaatgaaattaatttatttatgttttctaaaagaataaaactgctgcttttaaatggaaaactaaaattaattttaattttttcaaataatcaatttttattttcataattcactatcaaatgagtgatttgcttctcatttcggtccctcttcaatcactttatctccccttttgatctttccaagttccgccattgttccccccaatccgatcgtttcaattttttccagctgatgtttgaacatttgctcataaatttgcacaaattgcttcgctctttcccacgacttcatatgtttttcggacggaaaatcggcgattgtttttttattccctttgaaaaaggcgcataaaaattcgtagaaaagtgaataaaattgcaaatttcgcatcttttcgtccatttcgccaatttctccttcatttttcagaattattttaaaaatttcttccacaaattttacagcagttaaatattttcccggctttttttgtgcctttaaaactgggccaaatttggtgtaaaacggcggaattgtgagaagagacagtgcaaagtgtgccatcactgtgggactcattaagcagtttggcagtgttttttgctcgccgatggcacgacctaaaaattaatttgattgactttttaatgtaattaagtaattacctataattggaatcggggaaacggtcaattcgatgcacacaaaaattattgccaacaaattttgcacctttttaagtgaatttttactgtcgagccaatttttggtcaaatgcacaacccatcgaattgtttctaaacgttttcaattatttttatgcgaatgttgatcattttttaaaaatatgtataatgcttttttaccttttttctttccattttttcttattttttcgcctgaatttatttaaagtaattatttttgtcaatttattattgctaatatacttccgaatatcccattattatttttctcaatttgatcattttcttgtgactccgaatgtttttcaaaatcattttggaaagaatgttcattagtttcatttgtcgatgagctccataatggagaggaactgttgccatttggtggatcaatgatcatctgcaaatcggtaccgtttgatttatttatttgattaattgaggcaattccccgtcggccgacaaatgacaaaaagataaacgataaatttgtcaacggcggatacgtcgtttgttgtttgtcacccaccattcacgaaatganaaaacaaatgatttggtggcacctgatcagcgaattcttcccactgattaatctccccgcacattcgctcgcacattctctccgccgaagaatgctgctgatcgc

SEQ ID NO: 21547 - DNA, 1929 bp, Heterodera glycines
gcaaaagagagacgattgatgattattatcccatcgattgtgccccttggggattcaaaatatatggcggagcaccaacaaacaaagaatgtaagttcagctagttgtttaaagattaataaaattgaattaaattcagttttcctgttcatatttggattacgttttccgaaaggcgcaaagggaaaatcaaaggcttttccaaaacaacaagccacatttggtcatcaaattttcaaaattgcgaagcaaagctcgaaaggccacaaagtttagccatttaaagtgcggcctcaaagaatcgtttgtaaatggaaaattagccgacattcgccaggaaatgctttgccaatcatatacggtaaaagaaaatcattaagattaacattaaaaaaaataaatcatagcgatttggtcactgtcgaaaccgcacggactgtgttaaggagcacgacgttgaccttttactcgatttggaggacaaacgagcacaattgaaaagagaaaaggagcgaaaacgaaggagcaaaaaagaaacagaaaagcaaaaggaagagagtgacggagaagagaatcaaagagaaagggaagagcatgaaaatgagaggggaaaggagggcggaacaaaacggaaatgggaagtgtctaaggtaaaaggaaataaatggaaatttcacaacatcatctcttcccttccctccccccgaaggaaagtgagccgttttttgccgtatcggacgaccgcattggaaaaacgacgaagaaatcaaaagaaaattacaaaaatggagaaggaattgggcactctttcgtggatacactgaccaaaataaatcggacggtgcaaatttggacaacgtcgaggggatgccaccgggcaggtgctcattttttaatggattggttatttttacattaagatacgcaaacaatttaggaatggacgcatttatgactggctttgcagtgcttttcttccaactcgaccatgtttatcggaattcgggtcggttcgatcttcggttggccggttgcgttgcattggcgggaaaagaattcccattactcatccgtaaatcgaatttcatcacccaaacggaaagccaccaattgaattgggcacgggtggagagtcggaggaaggcttttgatcgcgcgaaatattcactttggacaaggggggcccgagggaaagacagcgatggtttgcctcaatgatctcaagaaaaaccaacatatcaaaagaagcgggtcaccacaaaaaaacacgcctaatgaaagcattgtactttttgcacgccttttttcattatttattacggataatattacactcgctctttttatctgttttgcaaaggtaaataaaacaaatccattgatcacatcatcaactgctctctctctatctccattttcgcttctctctctttcaagaaccgctcgtgtttttcccgcaaaaacattagcagtggttcgattcccaaacgatgccttcccgaaacgaaaaacacactttgctccggaaacatcgaaacgatcgctgacttaacctttaagcaaacaactttatttttcaaaaaagggaaaatgatgccatttctccgtccaataagtccgttttgtttatgacaatcgccgcttcttttttgcttagttcgtcgtcgtacaaagtcatttcatgctgtaacaattcgtactgttccctcagatttccttgtgtaaagtcaaggacgaagagcacacattcgcagcgcacaatgtgccggaggaaactgaagccgagtccctcgttgcgatgtgcgccttgcaccaatccgggaatgtcggcaactgatcattttgttagggatgtcagaagaacggaagcggagtgccatgccaaagtcacaacacctgccaattggaagaagtcgccgtactgaacca

SEQ ID NO: 21548 - DNA, 1220 bp, Heterodera glycines
gccatccgacctcgctctcgagagaccatccatcggtctctgttcccgtcccgagctgccacgggtcaatcatcgccccgtcccgtccgtattcgttctcggctgcctcttctttcattcgacagaactgcaggtgctcaagagccacccaatccgcgtgttcctcaagataccgccacgggaaatggccatggcgctgccgagcgcggcttcttctcgaagtgccgacagtacctcccggtatgaaaatgcaggcccaatcgggatgttggagctccctcattcgatgttggctgaaatagcgctgaactgtccatccgggactgatcacttgttgacgagctgggagatgccccaggacgaatggcactggcaccacttgaccgcttctctcgtgcaacatccgccacccgctctgctctcggcctctcaggaagcgctccaccgccgcgcgttcgaatgggtcctccgcccaattatcatatcccaattctgccacttcgtctgccactgttcgggagtcgcttttcggggccaatggctttggctgtcccaagcctcggcgttttggcccgttctgtgcagcggcgggattctcatccccgccttgctcgtttggctccgccctgccgaatccgccgttctcaaactcactcattggggaaattggggtttgagctctgaaatggtgaggagggagggtcccaattttggccaaatgttttgctttgacggatgagtcgggtttgtccccgatggcagaaatgaagaaaagtgattttgctcgcccgtggggagtaagttttggttgaaggggcgggccaaatcccccgcctttcccttcattttggcccagcgctgattggctgcacgtgcatttgtcccttcgctgcgctgtcccttggcccaattgcagtaaacacaaaacgatgagaggcgttggcggggttgggacaaaaggcatcacccgccttctccgtctgatagggcatcggagaattgtgaatagggcgatggccccggcagatgtgaacagaagaagggggtaaacatcccccgtggcccttcttttgtttgatgggcacaaatttttgtccaaatcggagttgttgatgaatggaaaggccgtcttttgttgttggccggtcgtttttggaccaacaatttttgagtaaattagtgaagtgaaaaaatgtgaaaattttggcgaaaatggttgg

SEQ ID NO: 21549 - DNA, 2490 bp, Heterodera glycines
ttagagctgttcaccttcagagaaaaaaggcaaatgtcctccatctctgatctctcttttttcaccgaattttattttttgcttaattaaaaaaaacttttaccgattgagggaatatttagcattttattatgttaaaattaaaaatataaaaaacgcgcagaaaataaaatgccaaacaaatttaagaaaatttaaatttattaaacctgtacatagagttgcctaaattgttattcacttacttatatatcaacacttcctgggtgactaactaatgccagcagaagcacagatttgtgatgttggaaaagaattttccggtgacatcggcaggccaaatttcggaataattcaggcacttaacgcatagacttaatgggttttgtggaattgaactaaaaaagaaaaccaattttaggtgataaagacagccgaccaaatttattacagagacaaaacattgtacagcaaaatgaccattaaaattggaagtgaaatcatccaaaaggacaacaacggacaaaaagcagcaaaaaagggaaaaaacaaaaagaagaaaaaggcgaaaaatgaaggaccactccaaagtgccgaaatttgtccaccgacgaacatggccaccaaacccgagccaattccggatgacaaaagcgggtaatttcagagtttatcgcccgtcccatttttcgaaaaaaaatttgttataaaaattatgaaaacatctttccaagggttttctgggtcgctgattacggatccggaacgaacaattccgaaccctgggttgaactcgaacaaaaagtcgaaaatccaaattttcaaaattctgatttttgttcaaactttgtttggtaatatagtagtaccgatggtaccacatctttaaaaaaaaatttttccaaaagttataaagctgttaaatttatttcttataaggttttcggtgtcgctaagcacgaatatgacatccatttctcccaattccgaacccctaagtttaaatcgaaaatttgagttttcgactttttgttcgaattcgggcccggagtttgggattggaccaaatggatgccggattcgtgactttgaaagcgaaaatggttgttttcatggtcgctgaactcaataggaaaaagttgcgtttactggtcccctggccaaaatgattttgagaaaattgctaacccaatagccttcctcgcccttcctttggttttcaaaattaccctttttcagtagggccaaaatggccgtcaattgcgcaccaattcggagtgacaaaattccaccaaccaacaaatccaaatcggccaaatgtgcgaacaacgtaagccgatcgaaagcaaaaagcgggaggaagtggacgaaggcggtggcttcgaatggtaaatgctttggctcttttacacaaattaaattcggataaataaattcgcgcaaaaatgaaaaagtgaaatacaatattattattttttggtaataagtgctttttatctaaaactaggctagaaatgatagttttcgttaatgcgcctataattttgaaaaaatttttggtgccgaagagaaaggaaagcccttcggatcatcgtcacaaaattttttggaaatttttgacgcgtcgggggtcaattgggctccggaccagtttttgtggtataacgcctttcatagctgtacaatttttcgatctttctattttttgttcgtctgagctggcacttttccccacaaaaatgaaaaaactttttcccaagggaaaaatgcagcgaacgaaagcggcacagagcttggcgaattggtggaaaaagtcaataaaaatgccatcaaatttcgtcgtgtggtggcgcgcactgtgcaaaatccgcatgtgctccatttgctgtacgcactggaaaagcggcaatcgtccatggaaaagctgacgaaggaggtaaatcgcccatctttcaaacagaagaaaaaaggcttgtatcccaaaaaaaaaaatttttttaatttttttttcaactgtttggttccgttttttttctttaatcgcgtgtactaagggccggttaggaagcttttgagtttccttactttattaacaggaaaattattgaaaatttgatgccaatttttctccggtgacgcctatcggcaccactgttccctaaaaatcctattttttaaaccgaccaattgttgtacttctaattttgtgtggcgttttgccttttcagatggccaaaagggtcgagaaaatggaacacaatcagagagagttgctgaagacgatcggcccttaagatggtcgtcagattggcgcctttcgctaaagaattgccagaaaatcgcttaatttatgacccattttcgacaagcagtgttgtgattgacgtattattctgtagggtatatgatctgatcagttttgcctagctttatcacttttacaaatggcgagttttctttctaaacgggaaactttttttgtcaatttca

SEQ ID NO: 21550 - DNA, 2041 bp, Heterodera glycines
tacgccattgattgtgacgggcgcgtgcgcaagcgccccccacgcgaagcgcgcgcggcagccaaattagcgccgtcgcccgccacagttaaaaaccgctatttctcattcgttgtttgtctccactttgtcctattctctcgcttgcttttttctctgcgtcttgcgctaacatacacactctctttccaactctttctctaaataaccactatttccccgctgttctcgttttctctggaatttgaatgaaagacagcaaggcagacagcgttgccatcagaccatcatcatcatcattagagcaacgactaattaaatgcgaaattgtggggtaatgtgtgcgtgcgtgtcaataatagataaattaacagtacgggggagagagagagggagggagcaagagagcagagagaaatagaagtaaagtggataagtacatacagagagagaaagagagagacaaagaataagagagagagcagagagagagggacgaaagagtgagagaaatggaataagagtggatcagcagcacacacgcagagaaagagagggagaaagagttgttattgcgctttataactcagagaaagggaaaattggatagagcgaggaatacagagagagagagagaacagagagatagagtgtttaaatttgttgcataacccataaactaaataatggctataggaggagaccaaatacacaaacatataaatggtgcaattgaaaggaattgttggatcggcaacttcattctcgcacacacactttgtcaataacgcatacaaatgatgctttaagagattaatttcccactctttggctacatccaactaaattgggagaaataatcaattacaggcccaattaaatggtcgccgtcacacacttaatgaagcaattattcgtctctgatcgtttgtcgaacaaaatcagggagccctaattgccttggttgagcgagcacccgcatttcactccaacaacacatttaaattgcttccctggggaaatggggcgcagaaggtcggcggaaatcatggataatcaaacgccgcggcgctattagcataggaaacggtgtgccgtttgtggtggtggctgtggcatgattagccaaattaggacatctcgctgccaattcaatggccttcaccctatacacgcagataacagaaaaatgatttaaatttgtatttacaaatagatattaattggattggttcaatactgaattatgatacacacccatcaaggactcgacaaaaaaaacacgcaatgccaaattaaattgccaaaattgacccatcatttattaatgtgataaaacaacacacacaaaaaaacgtggaaaaattgaagacacacaaacaacgatatacaaaaatggtctttttccagaaaaaaaacaaatgcttgataacatgataatgtataacaataaaaattataatgcaattgataggacgaagctttcgttgtccagaaatcttgaagaaattggtcaatataaatttatcttccaaaaaaagataatataataaattatataaatggatcgacaaaattcggcaattgtcaacagagcaaaaataggcgcaaatgtaataaatgaatacgcattgtcagctgtataaagccgaacaattattggaaatatataaaaaaggataaaagaaaattgtccattagcgtttgcttggcactttttgaaggcgccaacagccatttttgccatcaaaataatggcataattcgacaagaaatgtttttttctttcattaattctaaatgctgttttttcaaaaatggaaataaattttaataaatttaatggacagacgtacttcaaaacaagggcaaataaatccataaaattacgtaaatggaaacaaacaaaaaacgagcgaaaaaataacaaacaaaaattcatggacaatttcttttatgacagtaaaatttgtgcgttgtgtaaaactttgtttgaagatcatttaggcagcaatggcaaagtgaatgattgattttgatc

SEQ ID NO: 21551 - DNA, 1803 bp, Heterodera glycines
  unsure (1)..(1803): unsure at all n locations
tgaagccaattagcaattgtgcacgcaacaccatttcgttataaaagggcaaagcctttttctctccaaggatttgatggccaccaaagacattttcgcgctccctccgccccgcgccgacggtccgccgcttttggacccgcgcccgcaacggctcatccgtcgcgtggacatccaaagccaagcggcacaacagcagcagcaaaggagcgaccaacagcaaatggacacactgttggaggaccatttgcagcattggaagagagtgaagcaaaagtgggcatcctttttaagcattactttgggatgagtgtcccattggaacaacaattcgtttttcgcttaaagccatgtatttttgcgagtgcgttttgtgtcctccccctttttttgaaaaaggcataacaaattatcaaaatatgcttccgggattcttcgaagtcgatgaacacgaaaacggcatccattttgaccaatttcatatcccgtaaacgaattagaacaaaaatcccgaataattaaatttccgaatttcgcgcatttttggtctaaaaccggcttaaatagtgggggggcggacaaagtttattattaccgcatttttgtttcaatcattttcatagccatttttagttggtgcgaatatggccgaaagcgtgagcaacgttatgcggacagtttggcgagtgtttccagctgtcaagtgttttcaatttaaattctgtgcttttagcaacttcttcggactgtctacggaattgctcaacaaacgcagcaaatgtaacaacagttggcaaatcaacggcgttcacccgaaaaaaatgattgaagtctcgaaacattttttctttattttcattattttattgttttcacttgctcactttttttatgtaaagaaaagaaatgttttctgtcaaaaagattgtatttccttccttagtgtgtcagtggggccgatttgcggccaatccgtccgtcactctcaacagaccaaaagtaatcggaccacatcgaaccaaatgataaaacagtttgtttcctccgaattccactcagattagaatactggaaatgttttgaacacttggttggtcgagagtgaaatatcgtacagattttcatatcgtaaaaatggtggcaaaatggccagatttaacggaagatggaattccccccnccccccgttcattccctcagtttgtacgccactaattaggcctgtattatttaattgcccttcatcggcgggagggaataaaacgtcctaattgcccctctatgctgctgctgctgctgttcattcacagcaaccatctttcaatttgatgatcgatggcgaagggacaaaaaaaaggggcgggggagggaaaagttcgctcgtccttccgccactgtcctccatttttctttgcatttcatttccaactatcagccaaaaattcttcgcttcttaaagtgaaaggaaagaattctcaccagaaaaagaagtaaaattccgaaaaaacattggtataaaaagggcaaaactccttttttccttcccaaattttctttcatttttggttttctgctgatttggtactttaatatggaaaaattcattcaatattgttttattgtttttttcggacaatgaaagttttgcgtccaatcaatgaccattctaagttgggaaaaaccgaactcgtactgccccaactcgtactgtttttcgacagaaaaaacgtcataaattttgttaaagtcaaccaaattaaacattcttggtatcaagcgatagtacttaatgttctctatcta

SEQ ID NO: 21552 - DNA, 1804 bp, Heterodera glycines
aaaccgcagtgatcaattgatcaccaacttttgacctttagggtccttttttagtgattataaaggccaaatgtttggctgatgaaagtcattttaaagagacaattaaataaaatgcactttatttagcagaagatacaaaaaggaaatgatatgatcgatcgatcgattgattggattgttcgttactcatttcggcatatttaattggctgaccgataatatcgcaaaatgattgttctttcggcctttcttcattacgttttaatttgccgtgtgttctccgtccaacgatcacttcgaccctaattccatccaaaaagttgctcaccgtccaattggtctttgagttgccactccaattcggcaaagtttgtgccgctgaattccgtctctccgtcgcagccattcaccgccgcattcagtgcctcgttaattccattgcattgcgctcgtccgaccacgtgaatttggagccgatttggtcgtgcacagttcgtccgcacaaaattgagaagctgcgcaaaataaaaggcctttccatgtgaaaccatttgattttccattcaaaaacccccgaattcatcgaataatttgtgacatgaatttgcttttttttggtttcccttttcccttcgcttttgctttaccctttcgacggtgctcggcatcaccggcccattgtccaattcgagcgcatatttcagctttccctgctttttgagcacttgcgaagtcacctcaaataaatgtccatttctaaaaagtccccgcattttggtaaatcaccgaaagttccttgagagtgttgtgtcggaagggtacgtttgagatcagagtggggggaagccccgcctgaggccccgttttggtggagcaaagagtcggctgaccaatcaaaagacggcaaaaggcttccacatttttggcgccactgaaaacattcgcaattatgagcagaggaaggaaagaccaccagatgagtacggcggacttcgaactttcgacggacgaaacggcggacaaaccgcgcgaattgtcttcgctactcttacaattagtaaggccggaagaatcattcttcgattcgttggacaaaagcgaagccgacgacacgtccaactcagagggactgaagtgaacattttgaggaagaggcaatttgtgcattttcacattttcagtccattttgaagggatatacgaaaactcataatcgcggtctaatggacgtaccccccagggtttatgttttggacgctttcaccccctaggcgacgaacagccaattccttatgcgatatttcctatttcatttccctgaagtaagcggtacctaatgtgctgccaagcaaatttttaaacgcaaaaacacctttgttttaatttgaatttcgaacgtggcgaaatgccaaggtcacgcagccattcgtcatggtccatgccaatactttcgtctccgatatttgtcaaaaaatccttcgggcaatcttctcggcccaactcaacaaattctgtcgttttgaaaggcaaagtgaattcgatgcctaaaaagaagcgaatgtaaacgatggaatggcttttaaatggggcaaaacgtttttcggtccgttttttgccgttgcgttactttttgtctgtaatatttgccgaaacccggaagttgtcggagtgaccaacgccaccaaatgattcgttggtgacggaacagcagcgaaaagtgcggtgaattgcggagcacaaaggtaaaaagaattgttggaggacgaacagagagaagccggggaagaagaaagggcgcgga

SEQ ID NO: 21553 - DNA, 2279 bp, Heterodera glycines
ttgatggtgattaatgtccgtgtacacaatcatcgagccttgtcaattcggttcgggttccacttttttgggaccaaggaagtaataattcttttttgaccactcctttggttcgcgaaataaagccaccccgcatctccattgaggatatgattgtgtgaggttttgtgggcaatcaaaaggaatctttctccagatttcgttcaccctgttatttggtaatgattgaaagggaggatggtggttgggagcaagtcctgctcaattaaaccgacaaaattacgtccgcgatagaatgtttaatggtctcagatggcttaaacgatccagagggcgaaaattatccgaaaaatccttctcctagcatttcagaaccgcaaatattgataggggtacgcgaattttggcgtttcattttgggttggacggagattcgtccatgcatttttaagatccaaacggtttttgggccagtgtatggaggcgaagaaatgggaatcatcccattgattcaaaatcattcattaacctgtacggttaacagccccgctcagcatgaccggtcggaagtcaaagatttttgggcgctcgaatcaattggaatcacggattgtcctgaaatgaatgatgatgaaaaagcggtgcagaaatttgatcaatcaataaaaactgatcaagaagggagatacgaggtatctctcccttggaaaaccgagggggaacgccctccggaaaacttcaaatttgccttttctcggctcgcggccctcgttcgcaaattgaaagacgctccacaactttttaagggatgtgatgacattatccaagattatgtggcaaaaggcattaagaagtggccactcgcaccacggagcagcaatatttccttccccatcatacagttatgggaaaaaagctccgaattgtctttgatgcctcttcgcacgaaaagggagcccggtcactaaatgacaccttattttctggtccaaatttatacccggacttagccgggaaactcatacaattcagggccactaaatttccaatttgggctgatattgaaaaggcctttttaatgatcagcctgagagaatctgatcgggagttttcgaaatttctgtgggttaaggacataaaagctccactctctggtaaaatatcatagtttttcgtttcaaacgaattacgttcgggatagtttcatgtccgtttttgctggccgcaacacttaaatatcatttggacacgcaccctagcagtctcgccagggaaatagtcgagaagtcattattatacgtagataacctgttgaaaccgagactccgaatgttctcggaatgaaatgggttattaatgaggacaatttatcgctgtctttccctccggttcccggtcctgaagggctaacacggagggtggttctaaagacaattgcttccttttttgaccctttgggtttatgctccccgtgtctcgtggggcccaaaatgttcttccagaaattatggaatgaatcccagggatgtgatgatctaattccgatttctgaatgtacggaattgatgaaaatccaaaaacattgggatagtgaaatcttatcaatcccacgtcactctcgccgagtaggcagcaattcgttgcagttacacgctttttccgacgcatcgcccgaagcttttgcatgtgccgtctaaattagggcagaaatgcaaaataagaatgttgtgtcgatggtgtactcccgttcgcgaattcgtccaaagaaaatggcgactagtcaatcggatggtctaaccatcccacgtttagagctcctcggaattctaatcggaacccgagcaattaaatttgtgaaaaaaacacttaaattacgacatcaaaaaatgctttctttggtcagactctcgcatagcactttcttggttggcttcaaccgataaaatgccaatttttgttgcaaccgggttagagaaattcgttccaatcggctggtcactttcagctatgttcggtcggcggataaccccgcggatttggcgactcgccaaacaacgcccgcagagctgaaaaacgccattctatgggtggaatgggccagaaatggctgtccaaatccaatgaattttggcctaaagagtatacagtgcaacttccgcccgtgcgaaaattgctgggaaccgccgatgagggtttctctggccggtcctgtcattcatggggagaaaaaaagaagactatttacggggatttttcggaaaaaatcttttttgagcccc

SEQ ID NO: 21554 - DNA, 723 bp, Heterodera glycines
gcaaactagtcgttgtacgtgatcaactggcggaccctttttttccattgacggtttcgtgtttttccagacgacggaattcggctcgatgaaggccaagcaggtgaacatgaaggcggcctgagaaccgaagaagataacgccgatcttcgaacccggcgcactacttgtgagccgttttgatcattctcgaggccttttgatgctcaattcttaatttccatgtatttcattcaaggagatcaataaaagggttctctctttatgtctcgtccatttgggatgaagtgcgtggcggtatggatgttgtattctaggttcttggtttcaaaaaggccctcttacagttgttccctactttatctgaacttcatttccgtcatgagtttcctactcttatcttagtaggcaccgccgggaaatttttttgatctttgggtgtgatttgttagcagattttcacaaaaaaatggccaattttttcgcttttgagccaatttttttaagaaaaataggaattttggggtttggcggtgccgccaggcgccgtcggggaaaatttttggactttttaatgaatttggtaagaaaattttcaaaatttgcgacaccccctagctgcgaaccctctccccccacctcttttacaccggccccccttcgctgagaagatcccccccccctcccgagcaggccccctttgcgagcgaggggggggggggg

SEQ ID NO: 21555 - DNA, 984 bp, Heterodera glycines
  unsure (1)..(984): unsure at all n locations
aaaaaaaaatataataattttaaaaaatattatagctaaaatttnnnaattttanccatgtaaaggtaatttcaaactgtttttagttantttctatatttttaaaaaagatcaaaatattttaagtaatttacattattttgattttttttngggangttacacccttttttgcggcgcgcttatcccaaagagaatttgagaaactgtggggaaggaagggtccggcggtgccgatatgcgccgccgggaaacattttgtaatttttaatgtaaattgttaacaaattttgtccaaaaaatggaaaatttagcgattttgagcaaattttcaagaaaattaagttttttttgagtccggcggtgccgataggtgccgtcggaaaaaaaaattgaaaatttctatgcaatttattaacataaattgtacaaaaattgctaattttttgaaaaaaaactcaaaaaaattccgaaaaattccgacttttcatcaaaaatttcggaagtcggaattccgaggccccaaaaaggcagcaaaatccataaagcacttattttgcgtgacttatacagtatatgagagccttattaaggtaaagtgacctttcattcaataaatatttctttaaattgattaaaaatgatacagcgcaataaaataaaaggagcagcaacacaggacagtgtttttcctgttaagcgtatgttgaagagacaatgtatggatgaaaattcgatttattcgccattttttcgtccaaaagtgaaaattcaataaatatatagttttaatttttcgctttacaccaagaaattgagccgaattggaaggaacgccacggacgtgctcaacttcgcactgctaacaccaactcgggaaaacgatttggcagtacacagaatgaagctcgaagaagtcttttcatttccacttatcccgaaggtcatcccgtataaattcagcttaagaaatggcccagaata

SEQ ID NO: 21556 - DNA, 1767 bp, Heterodera glycines
  unsure (1)..(1767): unsure at all n locations
atcaaattaagtaaattgtgcatcatgacagttggtggacgacatttacgctaattgtttaccaaaactgttttatatacatcaaaaatgattcatcaactgtttttttgtaccatttcctttgatattctgggaaaaaaggaaatgcattttgctcttaaaattcgataaaataccattcaaatgttgagcagaaaaaacggaacggaagaaagaggaaaaaaggggggggggtgttgtttccgcgcactattttagaaaaagagcgactcaaatgagtgcgggttggagaggaaaaaggggaagggggaggtgaggagagagagaagaaggagggataggcccttcccttctttttggagctgctgtgagaggtcaaatgcaataaaataggagcgggaaagggaataaaagcaaatggtcaactgaaaatgggggggggggagagaatggtggccaacaaatggaccccaaagagaacaaatgcacacattcggcaggagagggggcacacggcacagcacacacataaataaaggaagtggcgatgggaaggaggggggggggcactgatgagtgatgaaggagcagcagcacaaaaagcccctcgggggcatttggagagagataaaaggcggtcaaaattgaaagggcaaagtgctagtggcgttgccaatgggtcattcaaaatggacacgtcaatgttggcatttggcacaaaacttttgtggtggtggaaatcattaaaaatggtcatgggaaaaataaataaattattgcacattaagcataaggtctatcatagttgattatttaattactcttttccagctcatttcctcatttctctggtgttgtaatgttaggaaataagtgaaggaaatgcgtaaaatatgccaaaattccaatttatttttctaaactgtcggtatgtgcacaattttttaactatcagtgcagcgtttgacaaacttgctccgaccctccgcccaatttaagggttgttctgctttacgttgcatgtactattttgaggtgttttgcaattcggcgaattttggacacactttatattattgtaaagggaatgaatgggggaccgaagaagtgcacacaatcatagggagaatgaatgaatgaaaggaatggagggggaaggtttggccactcactccgttggagcaatgaaagcgcaaccaaaagcgaataagcaccactcatcacaaccacaaacccttttcatagcccagcaaggcttatcctatcaaatgtttgttgaggggataaagggatgtgcttaaagtgaggaggataaaatgggggaatggcactccaaaccggggttttttctggagtgaaacagtataaaacgatgggtgttcagcaaattggtaaaagccaattcagaaaagggtgatatggaattgtaagccgtgttcgggataagtgaaatctcaatcccgtccgggcttttgtgttcaatgcatataatataaaagcaaatgttgctgtagatggcactgggaaaaagaaattggagaatttcatcagcgagggggaggagatatttcggcatggcaaagcgcgcaaacatatngagcggggaggagtaagtcgggatgggtcaaattcatggcggaatcattcatttcggatgagggtcagcagtgggaaggcactgccacacacactccatttataattaccaccacacaactcacagccaaacgaatttaaggcccaaatacagcaaaattgcgcgattat

SEQ ID NO: 21557 - DNA, 1056 bp, Heterodera glycines
  unsure (1)..(1056): unsure at all n locations
attttaattaaaattttaatttaaaaaaatattccaactttttttctttcattttaagcatcctaaaaacccaaaaattaatcaattggtctttttttacaaattctgttaacaaatcgcattaaaaaatacaaaatttttcccgccggcgcctatcggcaccgccggccctccttgttccccaaaagtcttgagaaaaacgtgccgcgaaaaaagcggtgttgaaagcaaaaaaggtcattgatttacattaatttacatggccggagaccccttcgcaaaattggaaaattggccgctgatcccttgttttgcaataatctgaattttgaggtctacatctgaattttagtgttctttatcctgaatttgaaaaaaaaacttggtcaccctcaatatacatatacttctgaacaattctaatgctaaaaaacaggcactcgcgcgaaaactgaataaaaattttgtatttgaaaaattttgtccaaaaatttttacgttggaaaattaccggtttttaccggtaccggtaccggtaccggtggaaaaagttggtaccggtaccggtaccggtttttgcattaccggtcagtaccggtaccggtttttttacaattaccgattaccgctcaactctagtatcacaccgtttcaaaaaatgagatgtgtcaataaatagagagtgcagagaaaaatacatttctttcattttgacatactatttcttatagagaaagaaagaaaaaatgacgattttcgaacggtttgtgtatcataatgaaaagggtggcttagtttgctcaattattttctggggcaattaaatattgaatcaatgagataatttgtgcgaaagaatgtaatcgtcacatttgaagtaaaacaaaatttaacaaaagcaaatggtaaaaattaatggatttaattggcgagttaatacaataattggtggttgtagattaattttcaaaaaagtaattattacagagctcggcgaanaagaataattttnnctgatgagtatcatatcattacttttaaaattcttcacttttc

SEQ ID NO: 21558 - DNA, 1334 bp, Heterodera glycines
  unsure (1)..(1334): unsure at all n locations
acaaaattaattttgatgactttcggtcgcatatgtgcatttgcctaggacaaccacaaaccctctttccccttcatttgccgagagacaacaattctcgaacttaattaaataggtggtggcaacgaaatgagattgaggaagaaagagagagagagactgtctgaaaagaaacattggcactgcaaaacgaatgagctctgcggggaaaaagcggggtttgtttgctgcagagcgaaaatgtagaggtacatatattcctggaactcatcaatcggactcggcctttccgtgaccatcctcttacagatagataataactctgtgaaaacaaaaatttgcattgtctataaaggcatgtcaagaatcatgagtctctactgtggagttatggcattcctcattttgtgttgccattcagtctcgtttgcattacaagaatggcataaattcggtttaacccggcccgccccccccccctccctctttttgatggatgtgtcgcccgcatgggctactactaattttggtaattatagcacagcaaacacgcgtcaattagcactgcgcaggaagtaagctgggaataaatgagaacagaaagccatccgcctaacacagcacaccaactgaataagcgcaacatcagccataagcctcctcctctcccttctcctctagggaaatggaggcttcacgcactctaattagcggggagatctgtccatcccccccccatctgagcgacctctttagcacaaagccaagcttaatgaggcgacatcaatagtataactaaaatgaagaatgaattcaaaactggaagggatgacaaattcattttttggaagaaataataatcatttttgtttaaaaattataataattattgcgtagaaaattgttgagagagttttattccaaaaagaatggtaagccaatgttaataatcaaagtcaacttaagccctatggcctgggccgtttttgcccgtttttgcctcgagtgaagggacattttcatgggacgacaattaatccccggcagatggaaaaccttcggaaagaaaaaaggctttttggtgggaaaatttatacataaaaaatgaaaaagttatgcgaattataggcacagaataaagcaaaggcacaaataaaaaatttgtaataaaaatttatgtggaaagttttttgaaattattttacactatgggccccaataattattattggtgcgatttttagtgcctaaatgggcaaaatgttggcaaattaattaattatataatgcaccgaattcattttcgtaatgatttatttaaaaagaaannatta

SEQ ID NO: 21559 - DNA, 1871 bp, Heterodera glycines
actgagcacttttggcaattatttgcagtttgagcacctaaaaattgcaaccccactgagcacctagacaataaatcgaccccacaccctttttcctctgtattgtaatacgtttcctattaatcctttattctcatgtcaggcttgggtgcggttttgtggtttctgcgaaaaataaattaaaaatttttagggtagaaaaatgcactgatcgcgaatctagctcggatttacaacatcattgattttatctatgggttttcttgattttctccaaaagtttatgaaaattaattgggcataaaaacgcatacacagatgttgttgagcttaaaaagggctttcgaatgagctatgtaaggtctggagaagtcaagtttttaatttttacgattttttgaaatttaattactggcccttgggtgtgtccgtctgtcctatgcgacggaagtctggatttgccacattttggttattatttcataatgtaccaagaaaataatgaactatatctcggtattttggatttcatagaaaattgtaaataaattgatttttaaacgtaaaaaaatagaacctgctggattagtttggcatatgttaagttgtgtattcaagaagtcaaaataacttttgtcattttaaaaaagggaaagcccgtcgcaaattttaggccatttatcatatttattttacattaaaaaattagattaggtattatgtattaataaattattaataataataggttgcgaaattttttttttcaatttttgtcattaaaaatgcgtccggactcaaactgaaacaaataattgaaaatccattaaaaaaaaaagttaatttctggagttcgagtaaggtgttcggattgggtcaaaaatggatgtcagactcggttttatcgaccataaaactcctaaaataagtttaggaaactcccaaacaagtttatatctaaaatcgaattttttcaaaggaattcaattttaaatatctaaaaaaagaggtctacaaaaacgaaaaatgcgactggataatagcgccaataacgagagatatagataaaaaaaaaaagaagcagctacatgaacttttcaaattttttttttaaatttctatttaaatttattaatttttgtttccccgccccaaaaacaaaataaaaacacctcttaaagtgataggaagcgcaccaaattattaagccgctattaagacaaatgaccggctttacctgaaattaggcatccatttttctaattttttaggaccgttattatgtacaaaaattggaaaatttgcctctcaatttatctttttttttaaatttcgtgcccttttttccatgacattttgaaaatttcttcaaatttttcttgaaattttcttataaaaaatttctaagatttaaaaaaccgagattctcgcttattgtcaacccattcaaaaaagctccccaatcactttaaacatctatttatagattttttcgatcatttctcactttgttaggcgccattttgacgatggacgactttgccaattatcgtgccattgtccgtcccggtgccaatgtcatttacactcaattagaggacgggcgcactatttgcgggcctccgcctccgtctggtgccgcagtgacaagcaattctgtccattatggacgcatcagtgttttgacacatattcctaaacacataattttgattgtttgagggagggtaattagccggctaattaccccactagtgattagttggctgatcattttaaaatttccaatttatgatttaagtggagttagattgaaaaatcgccaatctgatcaagtgggtcaactcaatatcacaattttgcctaaaatc

SEQ ID NO: 21560 - DNA, 1396 bp, Heterodera glycines
gatggcaaaagtgctcctttgaccccttccccgtctttctggcattgccaatttagaaacattccttccttcaatctctgccacttttggctttacgctctcttcctttttttctcgttacaatcctttaatttgggttctttattttactttataagtgtcttgaatttaagcagcagtgaggtgaatatttaatatttctttcctggaaacggagggagggggggggaagtgacaaaagcacagactgtggaagaaaccaacgcaagcaaaagacgaagtggaggaatagaagggaggaagtggcgatggggaaaatggtggataaacaatcagagaggcgggggagggaggagtgagggatcgaatccgaatgggggggagggggtgagccgtttgtgctttctgtgcgcatcaatcgatggttgagaggggaagcgtttccgagacgtgaaattggccctctcttttgtcccaactttctattctcgcgctttccttcggctcgtccccttggatttttcggcaatgtgttcatttgccctcattttcggcactttcccttttgcttcaggtttctctttcaatgtcggcctccaattcccccgtttttcgccctttctttctcctctcttttctgccccttcttttgttccacttttgtccctcgtcgacctcttcttcctctgtcccaaaaaggataaagccgcttccgcctgctgaagaaagcccgaaaagagcgcccgttaccaatcggagcagtggcaaccgaatgtgccctttaaatgaagttggtcaataatcattgatcagtagagatgttctccttctcgccattatgagcccaaataaatagcgttttcctttctttgagcacgtcgtgtgcaacgaaatgagcgaattgcaatcggttcgctgtgtgtgcacaatgttcggctccgaagtaattcctcgaaattagttttaacggattcttcaacatatgccaatttttttaatgatcgctttgtcctttcaaagtcaccagcgccggaacagacgtgcagcaaattgctcaattcgtctctgtacgtcgaggcttcctccgttaaactccgcctcagcgattctttttttcccgccacgccgccttctgctgatgaggaccattcgactgctacgagtaattcggcggacaattttctggaagaaaagttcaaaacacagctggcatggcacttcaaaatcaacaaagtgcggaaaagatatcacagaatgagtcctttcccctcacgcatttcagaaaaacattctgttcctccgattgcgttgccaagaaagacgcaaatgtgtaggtgaaggaagaggcacaaagcaaagcgaaatgccatcattctgatcccaaaacgataaacag

SEQ ID NO: 21561 - DNA, 1847 bp, Heterodera glycines
atttcgactcaccatgtcgaacacttagtcaagaacggcatacattgtgtgccggccgttgtccaatgcgaaatgcatccattcctacagcgtgacgatctgcttgattactgtaaatccgcagggattttcctgcaggtggtcaaatttggaaaaataatctaaaaagtcggaagggtcagtgaaaaatgcaccagggaatcagataattttctaacaaaatttcagacgaattttttcaaattaaattgttaagccaatttgtgttttaaaaatttaccttgcggcacaaatttgcacgaagggcacaaaagccccttaaattttttctaactataacctaaatacttaaaatttcgccaattggatttgaattgtgagtgtctgtttctcatgtttgtggatatggtgctagatggtcctagaaaagtttctcattggggcgagccaggggacaaataaattagaaaatcttttctctattaattgttaacttttaaaggcccacagcatttttgcatacaaagaacaaaaaccttcctacctaaagcaacaccagcgctatttgctgctgaaaagcatagcatcattttacaaaattggcacatcggtgagtgatggatgattggcatgttatgggcatattatgggttatggattttgagttagtccaaatcttggttagggattattccaaataaatattggaatatttgattcagattcttgattcctcaaaataatttattatatttttcgaatttttatttacataggattttttaaaatttctacttgattcttatagtcaaatattgagtcaaatctcggtctcgaatctttgatatatttgttcaagtgttattttgcaaatttttggtgccacggaaaaaaggcggaaattttaactaaggttgaaaattagcaattttttgccaaaaaaaagtccaaattttttacctggatgcaaatttaaaaatttctattagtaaaatagggttagggtccatcaatttctctcccgccatcctcaggctacgagcctttctattttttgcgaaactttctttcccgtacatcaccaagaaccgccccgccccctttaaaagttaagcagttgtcactttgtttcctcatgcaacgcgccccacatgttggagcagtaattgtggaagaaacggatgatttgtttctcacaaaaaatggccgtccacggcgtgtgatgtcatgtcagcagctcaggaaactgctgaacggcctggtggccagcgtgtgcaacaacagcgaccaccttgatgaggctgatgagcactacgattacgacgacattccgccaaaatcccaagaacatcagcagttgagagtaggcactgctttgacaaaaaaaggaggaatgtcacgcaaaatcggggccttcaaaatgtccggggatttccaatctgacactgcgcgcgaatataaaaatgaagacgacgattgagggaagagactgttattcaaaatcaaatcaacggtgctatgtcgatcgacgaaaagtgcaaatttggtgtatcgaaaaaagtgcaaaatctgcaaagtttatttttactgaattaactcataacttcgcaactaaattgcataaccttggtatcatacgatagcccttgaattgcgttattagcttgtcaaatttcaaaaaattttatttaagttttccaaaagttatgaccattttttcctgttttttggcttggacttttgaaaaaacttaatgagttttttgaaatttagtaagctaataacgcaattcacgcgcaatcgtataatgccgaaaattgtgcaatttagttgccgctaagaaaagt

SEQ ID NO: 21562 - DNA, 3784 bp, Heterodera glycines
  unsure (1)..(3784): unsure at all n locations
gcggggcccaccaaaaatggttccatcgcgctcccaagtcaaatagttttatgtcacaatctgtcaattcaagttcctgggcgaganaattanaagcgctgcggagatgtaaaaatatttgcggtcactttaccgccagtttttatacacggganctgtcaatcatataaangaaggaacgccgaagccgacttcattcaatttccatttcggtgaggcggggggtcgggggccattcttggcccctcgggggccttgcccaaatattcaaattttttccatcgatcatccggatctgtcaccgcggcacggcagcacggcatggcagtgggaggagccagcagcggcaccatccgcaagttcacttcatttgccactttcgtccgctttcaattttgtcagcagcagaaccatccccaatttcaattctcattgtttgtcagtttcgaccactttcatcatgtcttttattgcccccggcactttcgcgttcctttcaaaagactatggggaattttcgactgggcattttgacccaaacagagcatacgacccaaattcacttgcagaactttcgtaatggcatttattttgcttccattatctttcattttttctttgtagtcaatggagaaaagagtttctggacggccgatacggatccaaacaaccaacccctccttacaccccgcgtgccccatcgcccagcttcccaatcccggtcatcgttggtaattttgaatttgttttttggattttgcaaatatctatcttggcaggaaatcgtccacaggatgaaaattgtttggttttccacaaatatcttgtctgattttttccattttagggcggcagatgttcccaaatgacgatggctacgaatcggaagatgatgaaattctcttgccacctccgccgatccccccgcaacttggccaccctccgccaaatgtgccggtaatttcggtctcgcttttcgttgctttttctcacatttccgagtgcttttttcaggcagttcgtgttcagccaatacatgttgggcagcagcagctgccgctcagagacttgccacaattcgaggaccatccgcaaaatgtgccggtaattttgggtcgattttcgctgcgttttctcaaatttctgcgtgcttttttttcaggctgttcgagtccaaccgatacaacaaccattgccgctgagagacctgccgcaaattttccaccctccaccaaatgtgccggtaattttgagtctcgttttcggttgctttttcaaaatcccgagtgcatttttcaggcaattcgtgttcaaccaatgcagcaacccgtaccaatgagagctgtgccacaattcccccaacctccaccaaatgtgtcggtaattttggctcgttttttgttgctttttttaattcccgaatgcttttttcaggccgttcgtgtccaaccagttcaacaaccgataccactgagagacgtgccgctatttgtcaacccaccaccaaatgtgccggtaattttggctcgcttttgttattttttttcaagatccctaatgcattttttcaggtaattcgtgtccaaccgatgcctcaaccgttgccgttgagagacatgccgcaaattcaccatccaccgcgaaatggacttcaatttggatcaaattgtggttgctttttctcagtctctgggtgtttcttcagggaattcatgttcgacaaattcaacgggaatacgccgtaccgcaatatgcccatccgccgccaaacttgccgtatcatcaaccagaaaacgttccggtagttgggtcttgtttttcgtgcgtttctcatattttcggatgcttattcaggcaatccaaccacggcaacgaccgcgccagctgagagacgtgccactattcgaccacccgctgccaaacggacaggtaatttcagaccctgtcttctacctaacaccgaaacatcttttcttaagcaaatgcatcccaacccccccgagagtgctggaagtgatccgacggctgggcgagtggatagaagaccaagggacccaagacgtccgcctcaatgaatgaatggaatttggattttgataaaatttgttgttttaattttttgaattgataagggttaaatcccattacctaaattgtttgaaaattattaaaattttaagaaattagatgctaaacctaacctttgacaaagattatgaaaaaatgaaaagaaatgacgaatttttttggaatgttccttctttttattacctatggattttttttcacgtgcattattttggtgctagtaagatattgccgaatgaattaattggtttttctcttcattttaaaacatttcacgtccccatcgccctgcccacttcccgcggaattgatcaaggaaataattgacgctctcccccctccaaaaacacatcggcttttgcgcttaaattttgttttggcatactttgttaaatgtcggttctattccatgatgagaagattgtttcgcccagagcatatatcaataccaatggcccgaagaactggaatttatttctttttcgatgtttatactccccctatttattttccactctaccaataataatatttaaataaaattataattttttatttcttatctgataatttttaatcgatatttctgataattaaacaaaattgtatttttcccaaaagaattttctcgcagtagcaactcatcggctttttttactcccttcataaaatggtctcgcttttgccccctcgcccaaatcaaggaatcgggtcggcttaacacgccaaaggggaaatttagtgagttccaaacctaccaaattaaaataaagaattttgataatcgttttaggtcttttttacgctctggaaaatgctcgcaattaccaattgattggaaaggggataacggaaaaaacttttcgttatctcatgaaaacggaaaagaaacaaaggcaattggccatggaattgatggaaaaggcagggataagcacggatgacaaaacttttggtacccaacaccttgaggctgtacaaaaatactgggacagggaattcccggatatgtttcgcattgcggcttttgaaatggtaacaaaattcgcttgaaaaatataaagttacatatttttagaagaccgggcttaggccaattttcaaaggggaaggtgttcgaagaaatgaagtgggtgtgataagagaaggagaccattgggatgggatcaaatcggcttcttggttttttggtgttcgatacttctgtgtcagctgtgaagtaacatttgatggtccagtccgccatagtctcgtatgtaaggaacgctgcaaaaaatgttgtcggatggggttcgggtttccatgtacggatgtctgcgatgagattcactgcggcgaatgcaatctcaagttttacaacccggaatgttttgaagcgcacaagaaggcggcttgtattgagtacaagaaatgtgaaaaatgcggagaagtttaccaaacacgttcgaaacacgtctgcggcgaaaagttttgcaaagtttgcaaagtttgtcacccagggcggcaatgtttcatcaaaaaaattcaagtgcgaccgcagaaagcctacagaattgtggcctacgatctggagacgactgtagatgggggagaacacccggctaatcttgttagtgcggcactttcttgcagcannttgtgcgggagaggagcgggaatgtgagctttgtgaaggccccacgaaaatcacatggtc

SEQ ID NO: 21563 - DNA, 1206 bp, Heterodera glycines
tttttttttttgacttgtctctgaatggggttatcccagtttttagtatcctttttgaaaacaaaaatttttataactgatacggtagcccaacatccattgccccaatgtacccttcggtttgtcaacgggagctaacaattgatgagtttgtttggtttcttttttaagcaattttccgtcattgctcaccaactgttaggcgtacagcaacggcggcacttgcatccgatgcagctgttcacgggctctctaaacctatttttattttttttctatctcttctctgaatggagttataacaatttttcacaacagttttgcatttaacagacacattctaaaatttctaattagtatggtagtccaagcctattattattttttttgacttgtctctgaatggggttatcccagttttagtatcctttttgaaaaacaaaaattttaataactgatacggtagcccaacatccattgccccaatgtacccttcggtttgtcaacgggagcaaacaattgatgagtttgtttggtttcttttttaagcaattttccgtcattgctcaccaactgttaggcgtacagcaacggcggcacttgcatccgatgcagctgttcacgggctctctaaacctatttttattttttttctatctcttctctgaatggagttataacaatttttcacaacagttttgcatttaacagacacattctaaaatttctaattagtatggtagtccaagcctattattattttttttgacttgtctctgaatggggttatcccagttttagtatcctttttgaaaaacaaaaattttaataactgatacggtagcccaacatccattgccccaatgtacccttcggtttgtcaacgggagctaacaattgatgagtttgtttggtttcttttttaagcaattttccgtcattgctcaccaactgttaggcgtacagcaacggcggcacttgcatccgatgcagctgttcacgggctctctaaacctatttttattttttttttctatctcttctctgaatggagttataacaatttttcacaacagttttgcatttaacagacacattctaaaaattctaattagtatggtagtccaagcctattattattttttttgacttatctctgaatggggttatcccagttttagtatcctttttgaaaaacaaaaattt

SEQ ID NO: 21564 - DNA, 2138 bp, Heterodera glycines
  unsure (1)..(2138): unsure at all n locations
tgttacagtgatcacactttttgacgtatccttgctgtggctcgcagggatagtcaacgaccacctcacggcacccgtgacagagtgaagagcagtttgatgaatgtgcgattttcttgtagtacggcgactcgcaggagagacagtagttctttttgttgaaaaattttgaaagagttttgatgccgtcaaagtggttgttattatggtagagaagaatgggaaactggtagtcggtgatatcggatttggtgattgggcgcatctggtagtcattaaaaataaatattttgtactcaccgggatacttgacgttccacaacccttgcacttgatgtatataaacttccgcgtcgtactctgtctctgttgtagggatccccgcctcgcggagtagttgtagcgccttttgttgaagaaccgtggtttggtttttgttaatccaccgccatctgtcttgggtaattgtcccacgtttatacaaggaatagtggcgcataagttccagcgcgtaaaaaaggcagtagttgtcgttgttgttgttaactttgaagatatgcgactgtgcggagacaggcggtcgcccttttccctttgttgttcgttgtcgcggtagtccattagtgttgaggacggtgacggtaattataaagggagcaccatataagttgacgtgtttggacttgctctgctccactttacaaaactggttgaaaacggcgtccacgacgtttgacgtaattggcgtaattggtaggatgatgtcaccctggtctaaaagttccgaggaaattatagcacccaccttatttgctgcgccaaaggtgtcgtgaccacccgaaatcgcctcctcgatcgaatggtgcacacatgagcgtagctccgcagcggggtcagcacatttgtcaatttcctcaatgacgaacttggattttgagcgcaccagttgatattttttactttttgaagtgaggttatcaattttacgaatgcatttatttggttgggattttttgggaaaaaggaagaattttgagagagggaaaaacgtttcattttatttgaacaaaatatgaatgaaaactttatgatttatggatgatataagataatatgaaagaatattttgaattagaaaaatgtaaatttttatagttgtaatagaaaattattgaatatttttttttataagttgaatattggtaaaatattggatgaaagggtaatgtagttgcaaatttgttagtttaaatattttttgacggagcgcgcaagcaatgaatgtgggtagaattttcgcgaatgaatgggagaagttgacttttgctggtaatagccggctatttataccctcacaagtgggcggagcttgaccttcactcaagcatgtggtcatttggcacattgccaactaaattgttcatgccatggcatatgcgctcaaatggcccctgtatgcgcacaaatgatcactgaaggcgctcaggtggcacgcgcgagcgctcaaatggcctggcatcccttccctccccatagggcacgacagctgacgtccgtccctccaatacgatttgactttaataattatgaagttaatttattttttaatattttatttatttatttatttttattctaactttaacttaaatttttttcatttatttttaaatttttatctattattttaaatttatttattaattttttaactattattattttaacaatttaattttaattaaatttaattttttaattaatttattattattattatttatatttttgtgtggtattagagagagcaagagaaaagagagagagtgagagagaagagagaatgagagagagagagaaagaaaaaagagagagagtgagagagagagagataagagagagaaagaaaaaagagagagagtgagagagagataagagagagtgagagagagagaaaaaagaaagaaagagagtgagagagagaaagaaaagagagagagagaaagagagagagataagagagagtgagagagagaaagaaaagaaagaaagagagtaagggagagaccaagagagagagagagaaagaaaccactttaagggaaaagaganatatnagagagagagagaaagaaaaa

SEQ ID NO: 21565 - DNA, 1193 bp, Heterodera glycines
  unsure (1)..(1193): unsure at all n locations
gagtcaaagacgaaaatggacagtcggacaatcagtcggtggccaatggacgggacaatggcaacaanagccataagaatatcaaaagcgattcggataaccgagacagttccaacccctgcatagcttttccactcaccacgatcatttccgatggagagatcactatgcagtcgctcatccgccttaggttcattcccgcactgcgtttgccaaagctaaatttgatacatttgtattggtgcttatggcattaataatggacaatgaaaaacaggaaagtataagaaaaagttgcgttataacaaggaaggggtgttggactttcctgttttgtcatattttccggcccacttcagtgatatcctttctatatgctttttctgtcttgcagtaacatttgcaaattgtcaacccactgacgatagtcggctcttccgtggctccccccccccgcctcttttggcgccccttttcccattgtacacggttttcatttttatgttttttcttcttttttccataaataattttgcctttttctttagtccacacataaggaagagcgtcttttattatttatatttttgcagccttttctatgaataatcggtcagatggcgatcagattggacggggtttaatttatgtgcaatgactgacagatagaaatgaaaaagggaggcgatcaatagacagaaacagacaaacgatcattcactctcatcaaagggtgggaggatattaaaagagggacaaatttgtaatcgggcggaacagcagcaaaaaaaaaaaaatgggaaattgaaatggagaagcgttttttgggatggggggggggagggagggtaagttgcgcatcattaatttattttgtaataattggagtcgacggacggaatctcgcaagaggggaagggctgctggatcattgtaaaaaaattctcccaaactatttattagtggggtaatttgcacatcattcaacttatattttaatatatgtatattgtagctcatttcttttttgcaccatatccaagtttttatatgaaagcggatccaacattttgataccacaaaatgaatcggcagctcactcgctgcgtcctggccaatcgcactcagtcgacctatccaatcggtcggatgtgctatcgccatttgcttcatcaatttgagtagcgatttcc

SEQ ID NO: 21566 - DNA, 1764 bp, Heterodera glycines
tatggaagtacggcctagaagcttcaaaacaagctaaaatatgtttttcgtacgtttcagatctcccacagtccaggaaaaaaatatgcatgtgcatataattacaagccctagtgataagcagcagaattttggcgagaattttcctgtgaaaacaatgctaacgatttttgcactttcgtctcaaaccgaattagtccggcgggccaattttccaattttaatcatttatgaatgggtgcaaacaatccagggatgtatgtatgcctacgcctcaaagaatttcggcaattggcattcagaattccaacggcacaaaatgcgaagagtttatggacaatgcttacattttttgcccaataaaaatgactagggctgctaattttatgtaagaaaatttgcgaattatgtaaataaaatatgtataaaaaatgctaaaatatgtatgaattatgtacaaaaatcctcaaatatgtaggaaaatatgtaaataaaattttttttaatggttatttctagggttgtaaattatatggactaaaaaacgcgaaatatggacattaaatatggactaaaaaagcccgaaatatggactaaaaaggccaaaaatggccaaatatggaccaaaatatggataaaaaatgccaaaatatatgttgtaaacccccaaaaatcccaaaaaaggtgtgcatatttaatatttgcttaaataaacctaaaaagtacaataaacaaccaaaaaatggggtttaaaacttaaaaatgcatattttttattgttgttcgttgtatcaaaaacacctccaagtttgccaaatttcgaaaaaattctcattaaaaaaaaagaaatgttcgcaaaaaaatgacgaaaatatttattgaaaatgccaaaatgacgacgaaaactcaaattgttcgtgttttgtggggtgtaatttttaaaaatttccaaaaagttgatctttaggggtgtatttttcgtttttttttcatttttcttgtgaaaatttccaaaaaatggccaaaatatggactaaaaacccaaaaatggcgaaatatggatttattcccgaaaacccccaaaatatggatttatatggactaaaaaccttcaccaaatcaaaaaattttaacgcagaaatgctatttttaagcccctttcttcatagcatatgcgcagaaaaaatatgttaatccatataatttacaaccctagttataaaaaaattccgatttaaaaatatgggagcattttaaatttcatttctatttttttgcgtatgcaaaaaacagatttattttatttttgtaattaaattaaataacccaattaagcaataacaatttacacgacgaaaacaacgatgaagaaacccatgagaaattgctgcttttcacaattcgtcttctgcgaattttgctcggctttttggatgcaccttatgaaagatttgaaaatgttttttttttaaaaataataaatttaaataaaaaattttaatttttaaattttagaaagaaaatagaaaaaaatctgacagaacaacactaacaattgtgatctacaaagccagaaaagaatttatgaaggctttttcaaattcgattaaaaacaattatgcaaaaaaaggtagccaaataatagcattaacggtactgtggtagcgtaacttacggattttcgtctcattatactgtacatgccagtttttgattacattaggtatcccaggcaccatataacattaattaatttaagcaaaa

SEQ ID NO: 21567 - DNA, 2375 bp, Heterodera glycines
tccaattgcattcattttttttgttgttttaggcttcgtcatcatcggtccctgttcttgacctttctgctgtggctgaatcagtccagtcgaacatcgccgcattgttagcagcggaatcggcccagtcaactgaagcctctcattcttcagtcgcagatgcttctcagccaccaaccattgccgatgagcaggttacggtcgtcagccagtttcagctcgatcaacatcaaaattcggccatcgatgaaaacggagtttcgcctatggatgtcactcagtgtttggccgctagtctctccactttcgttcggcctcctgcttctgttatggaacagcaggtgcaaccaatcgaggtaattaagaggttacgcttaatatttgtttaaaatgaaaatttaaacatgggcggcactaatattatcgttctatgaaaattcaattgaaaattgcattgagtttccagaacaattcaagctttattaaagtttagctgcttgtaatctcaggagttacgcgaattttaatagatttcgggggacacttcgaattagtaattttgttgctatagcttatgtttattgtttagtaaagtgctgtaagagacctcaaatgaaaaccggaatgtttaaggtcccgtcggcagcagtggtcgtcatttccgacttttctgacattgccgaatcagtccagtcgaacatcgccgcattgttagcagcggaatcggcccagtcaactgaagcctctcattcttcagtcgcagatgcttctcagccaccaaccattgccgatgagcaggttacggtcgtccgccagtttcagctcgatcaacatcaaaattcggccatcgatgaaaacggagtttcgcctatggatgtcactcagtgtttggccgccagtctctccactttgcctcctgcttttgatatggaacagcagaagctgcaaaccgaagtaaattcggaatcgcaaattttttcactcctttctaatatattttcttgtcaggaggtctgcgcaaatatgccgaatcgaactgatccagctctgctagccaaacaggatgagcattttcttcgtgtgaatggcttccatccaatcggcattctttgtgaacggattgatcttgtttggcagcgggacaaaaaggtgaataattaatcagtttcctcactcatttcacagtcctgatacgccttttattttatttctcattgcgtttttgtgtttcttgtaggctgtggaacgtgagaagcttcgccgggaacgcgaacgtcgtgcagaggcagctgaacagagacgcaaagaacgccgagatgggagtgagggtgtgtggcgctttcttcctgccttgaaattcagtaaaaaagatttttgaaattcattaagaatcgagagaacaccgaaaagagcgcaaaagacagaaacgcgaggaacggcaccgatctccgttaggttagtttgcgagaatttgaaattgtattgaccaatttatttttggttgtttgacggaatacaaagggtgagttcattgtcattccttttcgtttcgaaccaagaaatttttctgccaaaattggttattgtgagcatggaaaggcaacaccacaagtgcagtttgggcacacttcgtcccccggcgcgttgggagtttttttttatgattttgatgtccttaattatttttttgcatcggtctttataaacaaaccaattttcccttaacaactcggaatgttatgacttcgcttacattgagacccatggggactgacgactctatagactatatattttctttctgcgtttcttatttttcttacaattttcagacaaggttcgctctgaagccgttgcgccgcaaaagcgcaacttcaaccggattgtccagtgcagctactgtgaacttattgtacggcatgaccgttttgggggtcgtgaaagtgcctattgctccgctgaatgcatctcacgacgggtggacatggtcagaaaggtctgcgacatttggcattttgtgaaaaaatataagcatttaaatttcattattatacatttttttgtctgtttaagtgtgtcaaggaatctgagcgtattttgatgatcgatctgaagggcaatatttacaatgcctccgtcaacccgaccattgaaacgttggaggcgttcctcaaccaaaatcccagctacaatccaataattgatgacgcacgacttggtcagtcgtattttcaggactgacaaatctcgccatcggaactcgccgcgacaaaatctcgaaaaattttagaaaaaattttttatttttaaattacaaattattttttaatttaaggggcgagattttggggtgcacccgtatttcttatacgaaa

SEQ ID NO: 21568 - DNA, 969 bp, Heterodera glycines
  unsure (1)..(969): unsure at all n locations
gtaatatttgtgcaagggtccgtcatccctttgaccccccacttctcaattacacatgggaattgcgggtactttagcattatacggtgccgcgagtaataatgggccgcaacgcaaacattgtagggacgcctcaggttaccataagcaagcactgagttggcgccctcttccgtgagtccagcaaagaagagcgtgtgggtgaagccattacggtcgtagtatgtagcagggatgggccgaggtttcgcttttcgcatttcgcctttcgcattattcgcattttttggcgtttcgcatttcgcttttcgcatttcgctttttggcgcgaaatgcgacttttacacccctaagaatttgcggaccgggtcagtttagtacgggccgttttagtacgagcgcacatttttccactataacttttttatttattatccaaatccaactttcttgatatcattcgagagcccttcggatgctctattagcctgcaaaatttcaaaaaattttgtttagtttaaaaaaagttcgagccaaaaaagttggaaaatctggtttttttaattcttctggccataacttttttgaaccttaacgagatttttcgaaattttgcaggctaatataggacacttagggctatcgaacgatactaaaaatgttggatttgattggcaaagaaaaaagttatagccaaaaacttgcgctcgtactaaaacggcccgtactaaaccgaccccgaccctaagaattggattaaattcccataaaatttttcaaaattttacctataaattggctaattttcagtgaaaactgtttataaatgatcaaaatttccaatttttttcccccggcgggcgcctatnncggcaccgccgcgccccccaaaacttcctatttttctcntgaaaatggcccaaaatcgcaaaatttggtaatttgatgaaaaactgttctcagcggcgc

SEQ ID NO: 21569 - DNA, 843 bp, Heterodera glycines
caattgtaatttccctacccagaaaatgcattttgtatttaacaattgtaatttcccgtagtcctgcctcaggggtatacggtagggggaaatggatggcaccatcgtgttccccgtgcccgaatttaacaattgtaattttactaccggaaaatgcttttgatatttaaaaattgtaatttccctaccggaaaatgcttttgatatttaaaaattgtaatttcattaccggaaaatgcattttgtatttaacaattgtcatttccctaccggaaaatgcttttgatatttaaaaattgtaatttcattaccggaaaatgcatttttgtatttaacaattgtaatttcattaccggaaaatgtttctgatatttaacaattgtaatttccctaccagaaaatgcattttgtatttaacaattgtaatttccctaccggaaaatgcttctgatatttaacaattgtaatttccctacctgaaaatgcattttgtatttaacaattgtaatttccctaccggaaaatgcttttgatatttaaaaattgtaatttccctacctgaaaatgcattttgtatttaacaattgtaatttccctaccggaaaatgcttttgatatttaacaattgtaatttccctaccagaaaatgcattttgtatttaacaattgtaatttccctacctgaaaatgcattttgtatttaacaattgtaatttcattaccggaaaatgcatttttgtatttaacaattgtaatttcattaccggaaaatgtttctgatatttaacaattgtaatttccctaccagaaaatgcattttgtatttaacaattgtaatttccc

SEQ ID NO: 21570 - DNA, 934 bp, Heterodera glycines
cccgaaatttccgtaaatcgaaatccgatgccaaaaattttccataaattgttaattggaatccgaagtccccaaaatttccgtaaatcgaaatccgatgccaaaaattttccataaattgatcattggaatccgaggccccgaaatttccgtaaatcgaaatccggtgccaaaaagtttccataaattgatcattggaatccgaagcccccaaatttccgtaaatcctgtgccaaaaattttccataaattgatcattggaatccgtggccccgaaatttccgtaaatcgaaatccgatgccaaaaattttccataaattgatcattggaatccgaggccccgaaattgccgtaaatcgaaatccgatgccaaaaagtttccataattgatcattggaatccgaggccccgaaattgccgtaaatcgaaatccggtgccaaaaagtttccataaattgatcattggaatccgatgccccgaaattgccgtaaatcgaaatccggtgccaaaaagtttccataaattgatcattggaatccgaggccccgaaatttccgtaaatcgaaatccgatgccaaaaattttccataaattgatcattggaatccgaagtccccaaaatttccgtaaatcgaaatccggtgtcaaaaattttccataaattgatcattggaatccgaggccccgaaattgccgtaaatcgaaatccggtgccaaaaagtttccataaattgatcattggaatccgaggcaccgaaattgccgtaaatcaaaatccggtgccaaaaagtttccataaattgatcattggaatccgaggcccccaaatttccgtaaatcgaaatccgatgccaaaaattttccataaattgataattggaatccgaggtccccaaaatttccgtaaatcgaaatccgatgtcaaaaatttt

SEQ ID NO: 21571 - DNA, 769 bp, Heterodera glycines
  unsure (1)..(769): unsure at all n locations
gaaatttccgtaatcaaaatccggtccaaaaagtttccataaattgatcatgggaatccgagccccccaaatttccgtatcctgtgccaaaaaaattttcatataaattgatcattggaatccgaggccccgaaatttccgtaaatcgaaatccgatgccaaaaattttccataaattgttaattggaatccgaagtccccaaaatttccgtaaatcgaaatccgatgccaaaaattttccataaattgttaattggaatcccaagtccccaaatttccgtaaatcgaaatccgatgccaaaaattttccataaattgatcattggaatccgaggccccgaaatttccgtaaatcgaaatccgatgccaaaaattttccataaattgttaattggaatccgaagtccccaaaatttccgtaaatcgaaatccgatgccaaaaattttccataaattgatcattggaatccgaggccccgaaatttccgtaaatcgaaatccgatgccaaaaattttccataaattgttaattggaatccgaagtccccaaaatttccgtaaatcgaaatccgatgccaaaaattttccataaattgatcattggaatccgaggccccgaaatttccgtaaatcgaaatccggtgccaaaaagtttccataaattgttaattggaatccgaagtcccaaagatttccgtaaatcgaaatccgatccaanaaattttagagagattgatcattggaatccgaggccccaaaatttccataa

SEQ ID NO: 21572 - DNA, 1989 bp, Heterodera glycines
ttagccatgcctgaatgtgttaatggcatattaaatgcttccataattaaaacatatgatatagttgacacattttctgcaaacatttattttttcctattttttccacgttttgaatctattaaacttggaaaaaacataagctttcactgcctgtttttggttttatttcttagtttttaatgaatttcaaaaccaaatgaatattctgtttagattcatataggattaagaataaattgctaatcacagattattgtggatgcttagttgctgttagatgaaaattgagcataacaaattcatactcaacaaacaaacaacaaattgtacaacaaaaaaatgtcaagcgatgatcaatcagacaaggaggtcgtattaattgactttaattgcttttctctacaaagttttttagtgccctctttgcatggaggccttcgacattgatgacatcaacttttacccatgcaattgtcagtatcaaatttgcagattctgttggcacaggatcaggtttcttttttaaaaagttatggaaaaagaaccagacaatgggaggaacgaaacctgttacattttaaagagacatgaaatttgtcagcaaaataattaagggcatcgctccaaatatggtctcaaattcaatttgctcattcttcggtcaattgatcaggaattttgaatatattcggtcacatttttgtcctggttctgtcttatttcacctatctatttaaattgttcggattttttttacgaaaattgcttaaaatataagacgaaattggatgacaaccaacttattgttactcttaaaattccaaccccaaaatctcccccattaaggacaaatgaaaacgggttgtgcccggcttgccgccagtcgtaccccgaggacccggtcaattttcagccgttgtccagcgccgatgtgcggaagatcaaaagtgagaagaagcagaaggtgcagcagcagaagaacaaagtggtggagagcaggaagcacttggccgagtttcgggtgctccaaaagaatttggtgtacgcggtagggctcagccatcggatggcggacccggagctcttgaagaagtacgggtggcactttaagcatttattgtttgtaaagaaatttgccaatgatgtgctttttgcccggttttgcctagaagattcgacatacgtttacaattagactttttgtccaactatggttaggggtgttcgaaatgaaccaaaaatttattccatattgtggtcaggttccaaaattcatttatggtcctttttcggtaatgatattttttggaaaatgcgtgttatcaagttattttcattaaaaattaagttttcttctctaaactttcaaggactttgttatattgtaataatccaagtttcagacccgaattctttggcaagtttggcaaaatcatcaaaattgcggtcggcgctgccccggccatcaacagtgctcagcccgcggtgcacaccgcgtacattacttacacacggagcgaggacgcattgcgcgcaattcacgcggtcaccaacatgatggtggagggccgctttctgaaggcgtcgcttggcaccaccaaatactgctctaatttcttgaagggacaagcgtgccataagccggcaagcttttcaattaagcacatttgggcattttatttaaatgtatagcctgaatttgatggaagcattgcaaacagaaacaattctaactgtgattcagttggtaaaacggttgtatttgtcatttttagtacggttcaattcccgtcggaagtttccctcagtgggcaagagatggtgactaaacaaaatgccaatctctaatcagacacagagggtagagcaaagaggtgttcagagttgatctctcgttgaaccaaggaaccattgggcaatgagttttgtagtgaaccacacaggggggagcatttttgaaaatcgatctaagggatggagttgctt

SEQ ID NO: 21573 - DNA, 1830 bp, Heterodera glycines
ttgtacctcttctaataactctctgtacctcttctaataacttttgcacctcttctaatcactgttacacctcttctatcacttttgtacctcttctaatcattgtttgtacctcttctaatcacttttgtacctcttctaatcaccattgtacctcttctaatcacttttgtacctcttctaatcacttttgcacctcttctaatcactgctgtacctcttctcatcattgttgtacctcttctaatcactgttacacctcttctatcacttttgtacctcttctaatcactgttacacctcttctaatcacttttgtacctcttttaatcagatttgtacctcttctcatcattgttgtacctcttctaatcactgttacacctcttctatcacttttgtacctcttctaatcattgtttgtacctcttctaatcacttttgtacctcttctaatcaccattgtacctcttctaatcacttttgtacctcttctaatcactggaagcggcctaaaaatcgctgatcattttttaaaattcccaattttttcacaacccaattttatctaggtagcgaagctcaagaagcgcgaagcgctttttcccagctaaatagtcgacggttcacgcacccgctagtttatatattttagaacaacagtgagtttcattgctaaaactaaaatctggagaaccgctggcgggaggggctcgcgagtgtggcattgcttaagcaactttttgaggcgcatccaggaaaactataggcattccgttccggaggccaactgagcgccagcggcgctgaaatggctttttggggaaaaatgcatgcagtttttgggccaaaacttttttcagggaagccggagccaaaaacgtctgctgagagggccctaagttggaatgtttgggaaatttttttcttcttgggcgaggccctaggatcaaagccctggcctgcaaaaattcgcaaaaatttttttccaatttttccatttttcggtttttcgggaataactcgctggggattgtgctgagcgtgttggcgccgctgaactttttgtacagctcggcgagctctatcttgtcaattttttaaatttctgaaattttcagaaattttcgagctaggccccctcatcacttttgaggtttttgaattttagtattttttacagatttttacggggaaaacggagaccactttcaagcaaccgtttttgatgctctatcgattggtgtcattttcagaaaaattttttaaaatttttttggaaatagaaaattttggttgctaggcctcaatttcagttctggctcaataactcgtcaggagttgattttatcaaaaaatcgtctaagagcttttttgtagagaattttaagcccaatctaatgtgctttatctcatgtttttatcacgagtttaaaaaaagttatgaaattaattgtgattttgaaattcaaaaccataggggggaccccatggttttgcatttcatgaaaaatttttttgctcctaaattagccaaatgcatttttatggcctaatttaaggtgctgaactcgaaaatatactttatttttagtttcagactttttggtaagtgtttaaaattttttgaaaaatcgtcaaaatttgagccccggaaaatccagtgaaattttgaaaattcataactctcttcgtttttggtcaaatttagtggaataaagtttgaaaaatagagaaaaatttggagaattttatgggatttatttggaatttctatcttccaaaataaaaaagttaaaagagaatttctggaaaatttcgatttttcag

SEQ ID NO: 21574 - DNA, 1613 bp, Heterodera glycines
ccccccccccccaaaactccaattttttttgcaaaaaattgtcacaaaattgtaaaaataggtatttttaagaaaaatctgttaataaattaaaaattttcaaaaaaattttcctcgcggctcccaacagcatcgttgcccatcccccttatgctgtagcccaaagtttttttgaaaaagagcgccgcaaaaaaatggtggtcaaattcgatgttcagacgggttcaaaaaaatttcggttaaacccagggttttaatggtctcactttaaaccataatataaattgttagcaattttttttttgaattcaatttggtttgctttaaattgtttataaattgatattaatttagtataatgataattgttgataattttttttttatataaaatctataaattgtaaacaaattttagatgtttttgatttttaattaataataagaattgatttaaatttaaatttaattacaatataaaagaaaattgattattatttattcattttttaaacaattattttatttactttaataaatactagtttgattattgcaaaagttttatccatagttctgccatctttttatgtgaagaggtagtttggatgcttttttacgtatgatttattaagaaaattattttatgatatttaaattcaaatatttatttaaattaatataagttttctattttgtgtgaaatctacatcatttattttttaaccctattatttagatttctctgtttacatcataactcattataaattaaattttctataatagtaagcttttcgcgcgcgcacctgaaaggcgttaacacgcagatttgctgccattccagggttgctggattacccgattcgggagtgctagtattattattttttgatacttttcataattattttgtttttttttcatttttattatttacgaacgacattaatattttgaaagtcttcgtcatgtataaaaaagatttgtttaatgttactagttttctaatttttaaaatatagatataattattttcaatttttggtcttctatagacagataaatatttacagaaaaaaatcccaattcattagcgataatttttacataataaacacacttatttattatatatattattattttattttatcctctccaacttaataaatttatctttgaaattgaatgtttataatacgaataatgagtgaaagttcgatttacctatttaaattttttctaaaattttaattattaattgttttttcatttttatgatttcaattttattttctgttttggtgctgaatttattttactttaattatcttttatatttattctgtttatttaacaaacaattaagctattaactttgttattataattttaaattgagtatataatcaattatacatgttttagtgcatttggataattgataaaattatatttataaattaaaaaccataatagaaaataaatatgtttatcactaaattttcaattcagaaaatttattttgaaacttcaaattaaaattctttgtatttttaatttttacagcttaattttattctatttttaagtaccatatttttattatt

SEQ ID NO: 21575 - DNA, 1522 bp, Heterodera glycines
  unsure (1)..(1522): unsure at all n locations
ccgggaagttttttgaaaatgaataaaatttgttaagagaattttgtccaaaaattgtcaaattttgtgattttcgagcaaattattggtaaaaaaaaatttggagttttgggaggccggcggtgccgataggcgccgccgggaaatttttcggaattttaggaattttaaataattttattaagaaaattgtacaaatttaaaaattttcaagagtccccaattccccgagttagtgtcggggggtcgggggataaaaagtcggatgtagggggctcggggtcggggagcaaccctattataaacccccaaaataggtgctaaaaatggaaatgagataaatattttaaaaatcaaaaatgtagtcaagtaaataaataaataaattttgaatatgaatttttgataaaatttccatttctcaggggtgtttttttcgtttttattgcatttttgttaataatttttttcaaaatagcagaaaatattttacaaaaaattcttcaaaatgaaaaagagcacaaaaaaagcaataaatttattattattaacaggttatatcgctccaatttgattcggttttttttcggtttttcataaaagtcggtcggttgtttcggttttttgattatttcggtcggtcggtttcggttaaaaaaccgaaaaaaaccgaaccgaaaaaaaccgaaaaagtcaaaaatttctcggtcggttttttcggtcaaaaaccgaaaccgaaaaataccgaaaaaaccggaaaaaaaaccgaccggtccgatctctagtactaacagcacgagttggctttttaccctggaaaacatatacactcattgtttgtcctggagaagcaatgctctctgtctgaatgagagttactcaaaagtctcggggcaaacccccccgtcggtcgttgttcccgtgtgcatttgacccgatcccgccttcgccgccgtactcaaccgtccgtcggtcacccggtggtgtccctttgacctcacacaaactttcaaaatttcactcttcgcaaaatttgtccgccccgcctacccccgcggcgtcaaatcattcacaattcccattcattcattcccctcctccccctccacattctctctctctctctccatgttcgttcgttcgttcgtccgtttttgaccatttgcccccccggcgcgaaaatattttacgaacgcggcgaaccaatgcaatgcattcaatgaacaatttgtactaataaaattgaaaattcagaaaccattttcaattttttcttgtaaatgtttccttaaatttatatacaaaaacacatgtactanaaaacaaaataatttaacacagggtttgcatcgtcaaaaccccttttccaaggacataaagggaaattttcataaattaaaggacactagaaaatattacatacctagttaatagaaatattgggagaaaatttcaaaattggaaattatgaatctttattgggggcttatttttcaggttttcttggattccaggaaatttt

SEQ ID NO: 21576 - DNA, 1353 bp, Heterodera glycines
ccccccccccccccctctgtcccacaaaatttttggaaaaagcgcgccacaaaaaaagcgtttttaaagcagaaaaaagtcgtcgtaaatgaagaaaatgataagtgaaaacaaaaaaatgttggaaaaaatcaattccggtgaaaaatacaagccatttgaataaatattaaccattttgcattgcatataataaaaattttaaatgtccttggatttcatgaattttccccactatgtccttgaaaatcggcatacccgtccttggaaacgaagcatggacgatggcaaccctgaataagagggaaatgagggaaaatggaaaaaaatatatttatattttcacttggaaaagaaattagtaaaaatagttgaaaaaacatttaataaaaattggttaaaattaaattgtgaaattagaaagaatttaaagggaaagctaaattattttatcaaaatatttaaaatgaaattaaagtcaacacaaatcttcttttgttcattgttatttatgcaattcagaaagtgaaagtgcgcagagaatgtctgcaaaaggtcagtgcgtcgcacttttgccacgatttgtgccaactcagcgagttaaacgacgcctccgttctcgcggcacttcgccagcgttactctcttcggcttgtccatgtccctcccccctttttccccccaatttcgcccattttcagacttattccgcccttttctgtgtggttgtcaatccctggtgccctttggcacccctttactctgcccaaatgcgttcactgtatgccaatgccaatggcgccactttgccccctcatatttttgcaattgcccaaagcgcttttgaagggctcagcgacggcacttcgcgattaaaccaatccattctgatcacgtagggcaacaaccaattcattctggcacccatctaaatgtgacattttttatagaggggaaagtggtgccgggaaaacggagaacacaaaacgaataatcgaatatttgatggacatcgccgaaaggaatgccaaagtcagcgaatgtgccgatcagcagaaagccgcaacggtggaaaaggcactgatcagtgccggaactgcgctggaggcatttgccaatgcgcagactgtgcacaacaacaacagctcgagaatggtgggaaacgttaactctaatattggcccagttttatcaaagactttctcaaatccgatcaaaatccctcccccttttttcccagggcaaattcgttcgcattgatttcgaccgcgaggggaaacttcagtcggcacagatcgattgttgtgagtttatttttcatttttaattccatcaccctttttcccttttttg

SEQ ID NO: 21577 - DNA, 2037 bp, Heterodera glycines
tttattgaaatttctaaaagtttttattatttttattttattaggaaatttataaaatcttacttttagatatttgattttcgtgataaattgtgttttcgtttcaagttccaaaatattattttttgattctcatacagaaatactttctgtgctgtccaaattacaaaaaaaagaaaagaaaaacataatgacagttcccattgtgtacatcagattaattccttgatggataattaagtttttgaatttgaataaataattttatattttttgaagaaatttattaaatttcacagtcgcgtgagcatgataattgattgattggactgttcaatttgcttaatctgcaaatgtataaaattcggtaaagatcattcatcttcgttgttctccctccattctcattcatcactcgtccttttcggaatgacatttgaatttttgtaaatgaaatcattagggccaaaattcgcttccatttttgagcaacacagcgaaacacatgggaacaaatcgacggacaaaggggcgacaagcaaaatgggagtgactaaaaaggggaaaaattaagtggatttaaaggggaaaaaatagttaagcaattaaaatctaaacaaaaacgaattttaaattttataaaaatttgtagtttataaatttctttaaaaaatttgtttaaaatttctcatatcgcttcaaaaaaaaaaaaaaaaaacacttttcggggtaattttaggcactaatcaagaatctggtgccaaaactgcaaaaatctatgcttttttatcaatgattaaaaaaataaaatacaatgccatatcttttagggttctacgatatctcatcaaaagttatagcccagcaaacattgtgctggaatgggtggatggattttcgaacaaaaaaaaatgagtttcataatttactatagaaaaatttcattattaaatttcaaaaatttgcatttttatatattccattttttgtttgcccacccaatcgccgtccgtttttcgtgtaaaaaatttggcgtgtcgccaattcaatgccgcagcccacgacatcgtagtaaccaaatggtggcacattttcataaaagcatggagcaaaacattgctcatcccttcccgcaacattgtgcccgtacaaaatgccgtgtgatgaataggagtaagtgccccggcattgtcccacccattcgtccaatggcatttgtttggtggccaaaccaatagccgcgcttaaaagttgggaggatgtgagcaatgccaaagcaaaatggggttggccatgcttttcacttaccccattttcatatgccgactcgagcatttaacttcgaagtaaaaggtgcccgtttttggaattggccatttggcaaggacagagaaacactctgagaaatgaaaaaaaacaaataaatttacaaaaatgccaagagtttcgaataaactattaaataagaaaaaaaaagttcaaattttttcataataaattccaaaaaaaaaaatttttttttgaaaatttttcagcgattttgtaatattttttcacgcagcctaatttttaaattttttaagaaagtttcagaaaaaaagcaaaaaagatacacatttggttttttggtccttcgagaattttaccgtcaaccccgccccccaatcggatgcctttacaaaaatttaaaaaatcaccatacattaaaaaggggggtgggtcgggaaaaatttttgcgaaggggggtcggccgccaatgacccttttttttgcttttcaaaacagttttttcggcgcgctttttccaaaattctaaaaaaattttcgggaacaggggggcggccggtggtgccgataggcgcctccgggaaaattttttgatctttgggtgtgatttgttaacagattttcaccaaaaaatggcaatttttgagattttgagccaatttttaaaggtaaatagaaattttggggttcggcggtgccgccagtcgacgccgaggaaaatttttggactttttaatgaattgttaagaa

SEQ ID NO: 21578 - DNA, 2618 bp, Heterodera glycines
tttgtgctgtttggctgctgccagtgctgtccaacttttgtacattgttcagaatcttttaaaaacagccaataattaagaaaaaaattatttagtgaaacgattttgatgtttttttagcataggccccaaatttcctgtataataaaaaaaaatttttttttttttggaatttgtatgatccgaagtgttaaaaagatgcgccagtcgaaaaaaaaaatttgattaaagaaattagcaaagaaaccaatattaaccatttcaagatttttcgagggatatgaatgaatgaaagtgtgtcatatgcaatcatttttcacgccttattcaaaaaaaaaaaattttttttgaacgtccacactgaccgttgcctgcttctgatgctcttccccctcaacaacagtgcccatgcccaaagggttcgaagggagcgtaatttggttaactgtaaggaaacaaaaatagtaaattatttacgaataagattttaatttgtgataccaaaatagaatttttttttgggggctatgaattggatttgcttgaagaaatcaaaaaatgtaaaaattaatgaaaaatgacccaaaaagacagtcgaggagaggttttggtcctaacaggccttttcacggaccagtccgaataacaaattcaacaaaatttacaaaaaaaatttcgccggcaacgcctagaggcaccgtcggcccttggttttttgtcggtgggtcgttccgctggggccaacaatcggccgatcactcaccgatttccccaccgccattcgttgcctcgtccacgtactgcttctgctggtcactctgatccgtagtcgcctcatgttgttgttgtccatagttgtgttgttgctgatcaataacttccttcggtggcaaaatttgtgccaacccgtcgcctcccaaattttccgttggtggcaccaatccgtcgcctcccagtttcaaatttccgttggtgacaatccgtcgtccaacatttgtcctctttattcatatgatttgcattctgtaaatgtttatacctttttgccacaccctaatttttaatcttacaattaatcatgtgtctaaatttactacttaccattttttgatgttgtttcgatggaatatcgcccattgacagacaatatgtaaacatttaaaaaatcaaaattcgaaatccatgaaaagctataaaaaaaactaaagcatttgttataatccaaggttgtgatccgtacttggatacaaagtatgtgcatgtatttcggcttccatgcttggatatttttgcacgtaaaaatgtctatttttatgacaaaattttttggcattctgtctttataaatttttaaaaatttcaataaggatgccaaatatttgattctgtaacgtttcggcgcaccagaccaaattttttgaatttaactttttttgtcgttaaacaaattcaacctgaaaatttttgtattttttgtaaggctaatagtgcatgtcaaaggctttcgaatgatacaaagatttttgggtttggttcaaaataaaaaaaaatatttgggttggtaaaaaaatgtaaaaattatttttaaatgcatgccaaaaggtctcgcgcgggatttacggggtccaagtccgcaatccctgaccatacatgaaagtggggagggtggggtccaaaaaaatttggctaattttctttacaacgggcgacttaggtcaaggaccataggacggggatgattgagacaagggcgggagttccaaatttttctccggctttttttctagtctgcttttctttgtcgtgctttttaaaaaagtccggaaagatttttggaaatttacaatttattaacaaatcttgcccaaaaatgaccaaattttcgattttatcaattttttctagcgatgatcacgaatccggcatccatttctgccagttccgaaccccgaattcgaacaaagtttcaatcctagcaactgccggcggagagcgcgcagttggcttacagaggggtttgatgacattatttgtacgaagcaaatttggaggataattcgacccaaaatttggaaatggggaggggtggacataaagcacagaaaaacaaatagcaaaacacggaagtacctcattttgctgctttcaactggtcaatgatgatttaatttttgagatgatgatttgctgtttttgagaaatttgttgatttattctgattaaattgacctaaaaattgcctattttcgctgaaaattagaatttaaaaaatgctcaaaattttctattttaccgcggcggcgcctatcggcaccgctggaccctaaaaacatgtttttttcttaaaaatttcgctcaaaatcgcaaaaattgttatttggtgaaaatcagttaacaaattgcaatctaatttttcaacattttcccggcggcgcctacctgcatcgccggcgccctaatgccaaaagtttattaagatttttccgactttttgcgacttttgttgacgaaagtcccccgaccatattttatctaagatgctgaaaaatttttaaatgttagggatgaaattttttaaaaatcgaaaaaagtgaaaatttaattttaaatgcatttat

SEQ ID NO: 21579 - DNA, 1940 bp, Heterodera glycines
agtcagttttgtagacggagttcatttaccgaactgacaaatgtctgtgatttgtttcacactttacggcttttccttttcgaagctgagtgttttgataagaagatgggatttagttttcccttttacagatttcgcagtccacaaacaatgacaaaactcagtagggatttgtttcccttttttagttccacaattgtcgagggatttacttttccctatttcaattcgaggccacgtccaaatttatcgtttactgccactgctgagccacctttgtacaggagcgtcacgtcgtaggaaaggagaagccaaataggaataggggaattgtatcccaaatccaaaaccaaaatcgccgtctctttttcactgctttcttttacttccaaaatataaaacccagcacacagcaatcaattacaaatttggagttgaccacatatatcacacaccaacaaaaacaatataaaataaagagtcacataaactaaaacaaaacgccaaaataattcaaaatcaacaatgatatgacacccaagaggagtttttgagaaaagggacattttcagaatttcttacatattgtttgagaaattttccaaatttcggtataggaagcgcataatttgtataataatcacaatatttttgggaattcgtctcatatttcgaaaattatgccttcccaacactttttgtgctttgctgaatcaatagatttccaaagtttcattaaatttattttattaattgattgttatgattaaaaaaattgttgggtactatgcaagaacttaaacaaaacctaataactagcaagcctggttttcagttaatgaaaacatttttcaataaaattttaaacttttttgcataaaaactcaaaaatatatgacattccccccaacagttgtaaagagaatttggccccgggcaatatgactccgccgactcggagcgggacaaagagcgaagggttatctccgttcgccaacggaggattcgacgccccctcccacaatcattgtgcccgccgttgcaatcattgcccacatttgcccgtcccaaattggctaaattcaccattttcagaacattcaaaaacgaaatttctcgaagacgacattcgccgataccaagagaccagctgtctcgactatcgccggcgaacgggtgattccgggcaatggtactgaaagaagcggaggcagaaatttaagcgtagttgcgagaatgcgacgaaagagtggttaaagcgaagaaggccaggatggaacccgaagtcttgctcaaaaatgagctggaaaagaaggggggagcgcaaagcaaggaggaaaagcggaagaacaaagaagaagccaaaaggcagaaggagcggaaactcaaggagctgtagaagcaagccgcggatctgactcatgcttgcagaggaaagcatgaaaacggcgtcaaaaccggaaaaaaatcctggaggggacattccccggggagggccaactgggggagaaagcacagaaactccccgcacggaaagcccaaaagagggcgagttggatgacgacaccttgtcgttgtaggaggaagcagtgccgccgggaatgtcggcaattatgttgccgaagagggcccgaggaggaaggagcggaattctggtctttaacgccgacggcacggcgggggaattgtccgaaggagggaggacattcccggataggggccattgccgtgttaaacgatcccctttttaaatttgtcgacatttttcacccctttttatttttctctttgctttaaatttttcatttcttttcacttttgcctatttacataatgtcttcaacttcaccatttgccttttcttcacaattttctgccagttcacatctgccttcgattatagtcctttttcacactttctcagaatcagacattttcat

SEQ ID NO: 21580 - DNA, 1185 bp, Heterodera glycines
ttattgggggaaaaaaagactacaaaataatacccctggcattaagaagagggaaacatgatttcaaaattttcaattttttctagtctaatctactcaaaccggttcagaattcaataaaaataacattcacggtgcgaaaaatggggtttgacaagtttattggggaaaaaaagactttacaaaataatacccctgggagaagggagtgggaaacatgatttcaaaattttcaattttttctagtctaatctactcaaaacggttcagaattcaataaaaataacattcacggtgcgaaaaatggggtttgaaaagtttattggggaaaaaaagactttacaaaataatacccctgggagaagggagtgggaaacatgatttcaaaattttcaattttttctagtctaatctactcaaaacggttcagaattcaataaaaataacattcacggtgcgaaaaatggggtttgaaaagtttattggggaaaaaagactttacaaaataatacccctgggagaagggagtgggaaacatgatttcaaaattttcaattttttctagtctaatctactcaaaacggttcagaattcaataaaaataacattcacggtgcgaaaaatggggtttgaaaagtttattggggaaaaaaagactttacaaaataatacccctgggagaagggagggggaaacatgatttcaaaattttcaattttttctagtctaatctactcaaaacggttcaaaattcaataaaaataacattcacggggcgaaaaatggggtttgaaaagtttattggggaaaaaaaaatttaaaaaaaaaaacccccggggaaaaggaaggggaaaactgattttcaaatttttaatttttttttttaatatttactcaaaacggttccgaattccataaaaataaactttccgggggcaaaaatgggggttgaaaagtttattggggaaaaaaaaatttacaaaaaaaacccctgggaaaaggaggggaaaactgattcaaattttcatttttttagttaatctcctaaacggttcaaaattaaaaaaaaaaattccccggggaaaaaagggggttgaaaattttttgggaaaaaaaaatttaaaaaaaaaacccccgggaaaaaggggggggaaacatatttttaaaattttatttttttttttt

SEQ ID NO: 21581 - DNA, 2049 bp, Heterodera glycines
ttttgccttttcacaagagaatttattaaaaaaggcaaaattcgccttaaattaataaggtgaaagtttgaaaatgtttattaaaaaattgcaggatgaaataaaattaaaataatcaaaaagaaacaaaataaatttatttttctaaataaataaaaaacattgtcagaggcagtgcctcgccgaaaaaaaagacaaaattttttcaaaaagccaaaaaaaattgaaaatttaaataaatttaaaagtgaaaaaaattaaagtaatttaaataggcatatttaaaagagcctatttttttgccttttcacaagagaatttattaaaaaaggcaaaattcgccttaaattaataaggtgaaagtttgaaaatgtttattaaaaaatttcaggatgaaataaaattaaaataatcaaaaagtaacaaaataaatttatttttttaaataaataaaaaacattgtcagaggcagtgcctgccgaaaaaaaagacaaaaaattttttgaaaaaaagccaaaaaaaaaattgaaaatttaaataaatttaaaagtgaaaaaaggaaaaaagcttacaacacattcgattcccaggacgtctccgttccaagtactaagaaggcccaacgttgcttaacttgccagatcggacgggatggcgtgctttcaacgtggtatggtcgtaagcgaaaggacagcaattaaagtcatttaaataggcatatttaaaaaaagcctatttttttgccttttcacaagagaatttattaaaaaaggcaaaattcgccttaaattaataaggtgaaagtttgaaaatgtttattaaaaaatttcaggatgaaatacaattaaaataatcaaaaagaaaaaaaaaatttatttttctaaataaataaaaaacattgtcagaggcagtgcctgccgaaaaaatagacaaaaattttttcaaaaaagccaaaaaaaattgaaaatttaaataaatttaaaagtgaaaaaagtaaaaaagcttacaacaccttcgattcccaggacgtctccgttccaagtactaagaaggcccaacgttgcttaacttgccagatcggacgggatggcgtgctttcaacgtggtatggtcgtaagcgaaaggacagcaattaaagtcatttaaataggcatatttaaaagagcctatttttttgccttttcacaagagaatttattaaaaaaggcaaaattcgccttaaattaataaggtgaaagttttgaaaatgtttattaaaaaatttcaggatgaaatacaattaaaataatcaaaaagaaaaaaaataaatttatttttctaaataaataaaaaacattgtcagaggcagtgcctgccgaaaaaatacacaaaattttttcaaaaaagccaaaaaaaattgaaaatttaaataaatttaaaagtgaaaaaaattaaagtaatttaaataggcatattttaaaaaagcctatttttttgccttttcacaagagaatttattaaaaaaggcaaaattcgccttaaattaataaggtgaaagttttgaaaatgtttattaaaaaatttcaggatgaaatacaattaaaataatcaaaaagaaaaaaaataaatttatttttctaaataaataaaaaacattgtcagaggcagtgcctgccgaaaaaatagacaaaatttttttgaaaaaagccaaaaaaattgaaaatttaaataaatttaaaagtgaaaaaagtaaaaaagcttacaacaccttcgattcccaggacgtctccgttccaagtactaagaaggcccaacgttgcttaacttgccagatcggacgggatggcgtgctttcaacgtggtatggtcgtaagcgaaaggacagcaattaaagtcatttaaataggcatatttaaaagagcctattttttgccttttcacaagagaatttattaaaaaaggcaaaattcgccttaaattaataaggtgaaagtttgaaaatgtttattaaaaaatttcaggatgaaatacaattaaaataattaaaaagaaaaaaaataaatttatttt

SEQ ID NO: 21582 - DNA, 1879 bp, Heterodera glycines
tttaaataattttgcatttaaaaaaaaatgatgaaaaaatacttacggagcatcacatttattggcacatgtggtgtatgtggcacgaacaaactgatcagcataaacacataaaaccttgaattataattttgagctttttttaataatttattcaaacccaaaaaattagaaataattttcgaaaacataaaaatttaattattttcgagagtctcgtgatatttttgggattgtccattctgtccgatggaataataagttaatacaaaaatttctatcgttttttttatgaattttcaaaattttcgtccacttacattgccattcccaatttgcttttcttttcacccaaatctttgcttttaactccactcttaagcttttgttgcagtttcattttgcttccaactttcacaccttttttattcgggttttgccgtctaaaataattaaatttattttttaaataattttttaatgttttttatttttacattttcggctgagctgcgtttaccggtgttggttgatgttgattttctaaattaaaaataatttatttatgaataaataaattcaattttccgaaggctttaccttctgccgatggattgagcctgagattgttaagtgaatgggcgacattcgtcaccaggttgatgctcggattttgttgctgaattggtggcccaccaccattagtcatagaaagcgaatttgacccaccacggaccatttcgccaactaaattaaaaaaaaaaaaattaaaaattcactttaaaaagctaaccatttattaagttggcgaacaagacaagcggtagaacagaagcgaaaagttgtccaatcatttctgttttagttaaaatagtatctaatttggttaaaaacagcactcattttaggaaatcatttaagcatataatacagagattttttatcagcagtcaaaaaatcccgttttcgaggcctcataaaatcaccctgggttttcggttatgggaaaaactttaaaaatttacaataggaatcagcttcgctccatccgatggtgcctaatttaaattcttattttctaactgtttggaatgattcccttgtcaaatgcgtaaagctgaatctcgactctggtcggaaattcgggattttcccggattagtcccaatttaatatttttttaattttcggagcaatttactaataaacatacgatatattctctaattatcgcccagtctctattaatcccgtagtctccaattatcccccccctttctgaggaggttgaaaaataatcccccagtctccatttatccccagggggataaatggaattttttaatttcaacaaaaataataccataatatatcttctttttatgctgattaaaaagtcttttgcattaacttgatcagatcactcgtttatggtaatcttgatcctccaaataaactaaaccgggaaaaaagctcgaaatttgtaccggtcttacgcaaaaaatgacaacatttttgccattttggggtcaaatttaaaaaaatggttcaatggggtccggcggtacggtatcgataggcgacggaacagctgtggcttcctcaataaattgctttacaaacgcagcaaaaagattacattggtaattagggatcattccgagctgtgactaggaatttagatataaacgataaaccattggatagaatcagggtaggcttatagtgtgaatttttaattttagcggtgcattttgcctgcttcaaaagttatagggcctcaaaaatcgaaattttgtgcatgagggctcattttcaacttttttcacattatatacggtttttctctcactttacgaatgacatgattacatttatt

SEQ ID NO: 21583 - DNA, 1893 bp, Heterodera glycines
caaattgaggagtttccgtgtttttctggcccagaaacaacggatgcgcgacttcctatctcagaaaccgaagtcccacttattgctcaatcatttcgtcgcatttgctcggcaacgcaacactcttttctcggcttgctggacgagcagggtgggcagcaaaaattaattaactcaaattttcaaaaacattaggggatgaggcgctgcactcggtttggcgaagactagagcaatggtggaaatgcatgccggattccgaccaaattctacaacaattggaccaccattttgtcagcaattggctttgaagcaggcgagttttgagtggagtgggagggatcgacccatttccatactgccgtttccataccgccatttccataccgtcgtttccataccggccgtttccatgccaccgtttccataccggcatttccatactgccgtttccataccgccatttccataccgtcgtttccataccggccgtttccatgccaccgtttccataccgccatttccatactaaggtatttaggccatttccataccaaaaatttttcgaaaattttcaggtaaaattcaataaatagataggggtttttcaactgtttgatgtttaatatgaattataaattcaatggattctcttttcaacgttatagattggaaaatggaagcaattctaacaaaaaagaaccgtaccaagcttcaacacaacggccattcatacatttttcacaagccgagtgccgatggtgaagttcgcttttgggcctgtgaacaccatcacgcaaaagacataacttgcaaagggcgccttcacactaacctcaacaacaacgttttcgtgaagttggaaaccaccagtgtgaaccaagtgcagctcgaatggaagcacaacgagtgatcactggaatcaaacaccgggcggaacaaacaatggaaccaccagcgacaattcgctcattggtcttaactagagaccggaaatttcaaatttgcggatcccgctgcgggactggaactcaaaattttttgcgggacgggatcccgcaggattaatcccgcatttaaaatttgcgggatcccgtgcgggattgcggattttaggaaatttcaaaaaatgctgtattataaaaaaagtcgggctctactccagtttatgcgtccaatcgacttttatgcgtccaatcgctttttatgcgtccaatcaaagttttgtgcgtccaatcaaagttttatgcgtccaatctcatttcatgcgtccaatcgctttttatgcgtccaatcattttttatgtatcaaattatgtttttttgccaaaataaaggttttatgctttcatgagtcaaaaagtttgccacactttttatgggcaggcgctgcctttttccattagtcggcattgagggcagtcgccgtttttccattagccagaattgaagtcagccgctgcctttttccattagtcggcattgagacaaaatatgcaacagcaatacgatcatcgttgggtgaatcaccgtattcactttgtcgaccctcgtgacagacaagtgcatacccaaggcattgaggctacgtgggggtccctgaagacatctcttcgccatttgcgtggctcaaatgaggaaatgttgccgacatatttgtatcagtatatgttcagacgatttcacggaaattccaaaatatatcagcatattttggaagaaatgagacgcaattatcccgtgtagtgtaagagatttttttgcaaaaactggcaagggataataattttcacatggtaaatgttattggacgcataaaactttgattggacgcataaaatgagattggacgcataaaagtcgattggacgcataaactggagtagagccgaa

SEQ ID NO: 21584 - DNA, 1329 bp, Heterodera glycines
  unsure (1)..(1329): unsure at all n locations
tccgatanttttgaaaaactacatgtattttntggataaaacctatagaaaatccaggttgcagaaaaatgcctgaacctaggaaaaaatccaaaatccaaggctggatccagttccaggccaactttaatgaaaaccaatgaaaacaaatttgatagaaattttgaagaaaaaaatttgcttctttgcaggcctcataatttttttaggcgggtctctaagaaattttgacacagtgctaagagctcgctatttcctcacctttttgggttttcaggaaaaacctttaaaaactctgtttttcgcttttaactgactcacaatcagggtttaattaaactaaaaactcgaactcattaaacgagattcccgaaacaggccccatatcataccatctaaaatcgaaaattgccctttaaaacaacctttgtttctccgaccctaacattgactgttttggactgccccgacgtcgattgctcgtccaattcgaatgggcgtcgttcagggctcttgagaaagtcatcccaagcaaattcctcgtcctcctcttggtcgacctcgtaaaatttgttgcgccacacaatgagctccggcctgaattcggtaaacctaaaaagttgcgatgggctattaaacattgaattttggcagtaaaattttcggaattcggaaaattttcttactctggctgttctgtaaaatctgtagtttttgttgatgatgacgatggaccagcttcatcactgatagaagaaggctagaaaaaagcaagattacaattcttctttcaaaaaatgaccatttttgaagcattttgatccttcaaatgactcgtgaaaaggccgtcgtcaatggtatcattcgaattcatattaaatttatttataaaatcgctcgtctgagaagcgtaacaaaattttatgattataaattcagcaaaagttgaacaaaagacccgtaaaaatttaggattttaaattttttttcatttggaaataaatttcgaaaaaacataacaccaaacaaatttaaatttaatacaaatatccttttttcaaaatgatttaggacaccccaattggcagacaaattgcacaagcggaggcaaaatggacaaaaccacaaagagttagcaatgaaaatgggaaaaggagaaaagggcgatgttgtcgacgacgaaatcagatataaaataaaagtgtaattgtgttaaatttgaaataattaggctaattaattaaggacatggataacggtgaacatcanatgcttcggattgatgaacgaacaggagccattttcacaatgcgtccagttcgattatga

SEQ ID NO: 21585 - DNA, 996 bp, Heterodera glycines
tataatttccttacatccttagagatgaattaaatcataagggcttaaacatccataagtccattttaaaataattatccagtattaatgaaagagttcaaacatgttttattatcattaattctttatttgttaaaatatttttcctttttttttgttttatttttttttttcgattcaaaacaacaatagctttccctctttggtggatcatgtgggtcatttttcatccacaaaaatccgtgatttaatcccccatttttttgtgtgtgtattaaaaacaacagcggatcggattggtttttgaatggtgttgtggtcatgccaatcctcatcattatttcatgcctctgaaaatggtgatggtgatgatctacctcctgttgcagtagtacattgtcagtcgtccatccgccacctgattttcttcactcacacctttttgatcgttgtcgcgcgactcgactggttgttgtcgttgctgttgttgttccatcagcgcccactgccagcggttgtgtggcgagggattattgagggatttatgaggtattttatttttgacgattgtgatgtggtgaatgaaatatgtagtcctcattattgttacattataaatgttttgttctcactcaatttcctccctctctcgaccattttttatgccgattttgaatttgtccaacactgaaaaatgatgcgcagaaaatggtgggccgataccgttgaccatttgtagagctaagttggaaaaacgcattttttattaaaaaaattttcctttattgtcatgccgagcagagttattgggggacgagataaatgccgggattcgggtcgggattgtcaaaaaaatttctggtcgggattcgggactcgaaaaaggccgtgattcgggtcggacgacggatcggggctcgggattctgttctattccaggaaactaaaaaagtacaatttaatccataaatctgattggatatttaactaaataca

SEQ ID NO: 21586 - DNA, 1450 bp, Heterodera glycines
ttttgattattttaattgtatttcatcctgaaattttttaataaacattttcaaactttcaccttattaattgaaggcgaattttgccttttttaataaattctcttgtgaaaaggcaaaaaaataggctcttttagatatgcctatttaaatgactttaattgctgtcctttcgcttacgaccataccacgttgaaagcacgccatcccgtccgatctggcaagttaagcaacgttgggccttcttagtacttggaacggagacgtcctgggaataaaaggtgttgtaaacttttttcattttttcacttttaaatttatttaaatttcaactttttttggctttttgaaaaaattttgtctattttttcggcaggcactgcctctgacaaagtttttttatttatttagaaaaataaatttatttttttttctttttgattattttaattgtatttcatcctgaaattttttaataaacattttcaaacattcaccttattaatttaaggcgaattttgcctttttttaataaattctcttgtgaaaaggcaaaaaaataggcttttttaaaatatgcctatttaaattactttaatttttttcacttttaaatttatttaaattttcaattttttttggctttttgaaaaaatttttgtctattttttcggcaggcactgcctctgacaatgttttttatttatttagaaaaataaatttattttttttctttttgattattttaattgtatttcatcctgaaattttttaataaacattttcaaactttcaccttattaatttaaggcgaattttgccttttttaataaattctcttgtgaaaaggcaaaaaaataggctcttttaaatatgcctatttaaatgactttaattgctgtcctttcgcttacgaccataccacgttgaaagcacgccatcccgtccgatctggcaagttaagcaacgttgggccttcttagtacttggaacggagacgtcctgggaatcgaaggtgttgtaagcttttttacttttttcacttttaaatttatttaaattttcaatttttttttggcttttttgaaaaaaattttgtctattttttcggcaggcactgctgcctctgacaatgttttttatttatttagaaaaataaatttattttttttctttttgattattttaattgtatttcatcctgaaattttttaataaacattttcaaactttcaccttattaatttaaggcgaattttgccttttttaataaattctcttgtgaaaaggcaaaaaaataggctcttttaaatatgcctatttaaatgactttaattgctgtcctttcgcttacgaccataccacgttgaaagcacgccatcccgtccgatctggcaagttaagcaacgatgggccttcttagtacttggaacggagacgtcctgggaat

SEQ ID NO: 21587 - DNA, 1187 bp, Heterodera glycines
  unsure (1)..(1187): unsure at all n locations
atgattnccactatcaaccggaaataatggctgttcaccattatccctgattatataggttctaaaacatctaatttaaaacgcataatttacaacattacctccgaaaatactcaaaaacaggacgagctacaattggagcccgtgcatgcaatatgtctagagaaccctcaaccaaattaggttgaaggaaagcgagtgcagctaatgagcgtatatatgttctaagttcttcattagcttcatattcacggataagaccatgtctctgaagtaaaataataggggtaaaaacaggtatgttgcgaagacgggttctaagtaccttgaaaattttgtgtgactatgtaaagatatataataagccacctctaacgatctgatataggtgcttgctgccttattagccattaaaatatatgcgcatggaacagaagagtgttccaacaaaatattaattgtatatagttgcaaaaatgaaggcggcacaatcttaataattttagcctacataaaatttcactgctaatttatatagccaaatagtttaaagaaagaattataaaagtctcaggctgtttatgtatatctcactttaaaattgccatcagcagaccatttgttataagtcgacagtctatttaacccaagttctgtcgcgaagataaaaaaaaacaacctcgtcgggttcagttgcacgagaatcatacaatagaaatctttgcccacgatagtcaagagcaaattcccccttgattaatagaattttagcaagaaaaacagctaatgcagggctcccattagaccttgaatggcaaggacctccttggaaatgagcatttgaaaattatcagcgaattatctttcggcggaaccgcatttcctttatctgacagctgatcagcgaattatctttcggcggaaccgcatttcctttatctgacagctgatcagcgaattatctttcggcggaaccgcatttcctttatctgacagctgatcagcgaattatctttcggcggaaccgcatttcctttatctgacagctgatcagcgaattatctttcggcagaaccgcatttcctttatctgacagctgatcagcgaattatcttttcgcggaaccgcgtttagagtatataaaagcaaaaacattttttgattaaaaacatatttttacttaaact

SEQ ID NO: 21588 - DNA, 826 bp, Heterodera glycines
ttaaactttgtgttttaagtcatttaattaccacaactgtacccattcctgttcatttcttggcccattttttccatttcaataaatgttcttttgtttttgaaattaattaaattatcatccttaattcaaatataaatgacaatttttgttttttgtttttttttttaaaattttaatgacattttttttggaatgttaatggtaatttttttttttaaattagactatctggcccctcctatcatgcctcttccttttctgttgccaatgccttcatcgccgccgccttacttccctcctccgccctattacgattgccaggaggagaaggaggatgatagggcgggggaggggtggtacgacgggtggttgcacttccacaaccgctctttgggaggttgggagttttaggtgagttaaccaaatttaaattaagaggcgagtaatttaagcatagggcttatccgcctatttacatttatttattattatttttttttttgctaatttatttagggtatttttttttttaaatttaatttaagttgtggaatgatgggtgcgcagaacacaactcgtcaacaaacaacgaaagaacaaagaatggaaattgagaattgattgttaaaaaataatctaataaaaaaaattaaaaaaaaaaaagtttttaaaaaaacgaggataaagttcctaaaaaaaatatttgaaatttataattcattaataattaattaattattttttatagtggatggagtagcgataaaataaacgagtaagatagatgaaagaggaggtgggaggaggatgaggaggagtagga

SEQ ID NO: 21589 - DNA, 865 bp, Heterodera glycines
aggaggggaaagaggatgaggaggaggaggaggataagggtgaagaggatgagggaggagtgaggaggagaaagaggatgaggaggaggaggatgagggaggtgaggagggggaaggaggatgatggaggatgacgaaatggagggaggatgagggagtagaaagaagaaaagggaggtcaatgagacaatttgaggcggatgagagagagagtttgtgtgtgtttttggggggatacccaggcaatccatgtatggacgacgacattcacacaggcaactcgcatataattatttattttaattttaaataaaccgtagtaataataataataatattattaattaaataataataataataataattaaataataataataataaaataataataataataatattaaataataataatgttaattaaataataataataatattaaataataataatgttaattaaataataataattagaattaaataataataataataattaaataataataataataattattaaaataattaaataaaataataataataataattaaataataataataataataataataataataataataataataataataaataataaataatgataatttaaataataataataattaaataataataataataaataatgataatttaaataataataataattcaataataataataattattattattattaaaaataataattaaataataataataataataataattgaataataataataatttaataataataataataattaaataataataataattaaataaaaaagtaataataataaaataataataataataataa

SEQ ID NO: 21590 - DNA, 3043 bp, Heterodera glycines
aatcgaaaatttttaatgcagaaatgcgttttttgagctcctttcaaatcaatcgagcaaaaaaaatagttaaaacctaaaattcccagccctattaattaaacaataaatattgcttaataataatgtatttaaactttttttcgtacatatttcatttttttaaaatattttgagaatctttgaaatttttaaaaaaatttttcttgagaaaaaaacaaatatttttttgaaaatttaccctataaaaaatactaaaaattaatttttcgaatactaaaagatgattataagcttaattaggttacattttgtgcctatcttaccctctaccaagaattttttcaaaaaatttttagtatccctaaatgaccctttttgattttcttacttttttaacggcgcgctttttcaaaaaaaatttttgggaaacttggggagggagggggtccggcggtgccggtaggcgccgccgggataaaatttgcaatttttaaagcagtttgttaacggattttttcaaaaaaagacacatttttgcgattttaaccaattttttataaggattttcggggctacctgaaactgtagcttttacaaatcggaattttgatcaaaaaatttgtgctcataagaacattataattttattaaagcatgcgccaaattgaaatgttaagggcgttcgaatgctaccaagatcgttagattttgttgaaaataaaaaaaggtatagcacaatgggctggcgccaaaacgaccaagtccaccttgaactatttatgacatttcgccaaaacattattaatttttcaaatttgacagtttcactgaataaaattatatttttttgaatttttcctaattttttcagacattttgccaaaaaatagtgattaaaattaatacaggaaatacatgtttttaaggcctgtacctgtagttttttgagttcttctagtcataactgtttttaaacttagttaaatttttgaaattttgtacatgattgagaacacttaggctatcaaattatatcaataatttgaattggttgattttgggcaaaaataaaaataatttttcatcaaaaatattgatgtttttaattaatttcgtttatgatattgttaaaataacgattcagcacctattcattggctgctttaataatcttacaattttttgtctattttttaaaaacggcttaaatcttttggctccaatagttaaaatacccaatccaagttgctgcgaaatgtgccaaagttgaacgctgctttcttgcttaatttgtttcaaaacttcaaacttttcatagtcatttaaatttttctgctgtaaaaagtcccattgttctttgtagtcttccgcaacattaataaattcattcaaataataacggttcttctttttatcgttataagtcatttcattaatggacgctaatgtgccttcaaattgaaattatttgagaataaaaaacaaaatgaaatagtttttggtataaattagagttgagcgcgaccgggaccgggacgggaattcccggtcctcctaggtcccggtcccggtttacttttttggtataaataaattatccaagctctttagcaaacaatatttttttaaattatttaaaatctaataatttttatgttcgtcacgttccttcctaaaccgtggcggcgcatttaaaaatgtcttcgaaaattctgaattttcaaatttctcaaaatatgggtcgaatttaagagcattttcagccttgaatagaatttggttgctctgcgctttcttcaacatttgattgacttcatcattttgttcaatccggaggcctttgaatgcttttagccatctgtcaaccaaatcccatgctctctcattttcaaatttgatcttaaataagattttcaaatttttaaaatatttttaccgcaatttttaagcctttcccatttccccatttgaataaatcccgataaacagctttagtcgcttccattgctgagctcagttggagttcgccctcctcaacaagaaagcgtggctttacacacaaacatttcactgaatttccaaaattaattaaattattattttctttatttaaattatttccatattttatttaattttctcaaaaaataattcacattcgtttaaaggctgtcctccttcatcaatctttattaaaagtgtgaccataaaatatttttgctttttcttgcactttaaacttttcacgaatgcatcggctgacaatgctttcattttccaattttcacaaattctttttaattttttgatggatttttttccaattttttgcgggttattatacaaatcttcattttcacattcccattttgctatcatttctcgccaaaagaatgttttgccaatttgaattgcttttttcatgtcctcctcctctgttgtgccatcttcgatcacttcataatggaattgatcagagcacttatcatagtcattattgttctttttcccaacaaataaatttttaattccgtccttagaattggcaattccgatcatgttgatcaacagaatgaaaagttggatgaatggaatccgatgcatttttagaaattaaaaaaaatagaataattctttcttaggggatctgatgggtattgattgatgcacattgtccaaaacgtgtaaaaagcgcttcaatgtgaataggtataacatttcacgaagacaatattcactgtcttaataaaatttggcatctattagcccgaaaatcaattccatggcattttggcaatgtaaaaatggctttgcattacataaaaataattttaaaaaaagtaataaatgaaaggaatctgtacaattcgtagttgtttattcgcaagcacaattagagtgtataaaaaattttttatgatgaacttaagatttgttctacaattaaaaataaacaaaaatataattcaaaaattttttctcagttctcccaataaccaaacattagcaacaaggcgatgctttaaaaactgtattgctc

SEQ ID NO: 21591 - DNA, 421 bp, Heterodera glycines
aaatatttacctcaacacgtaaagaattggcccattcagtgccaaggaaatttgcatcacataaccagcatagctcatcacgaaccatttggtgctttcagtggccccgaattgaattagcaaaagtctcagcgaccaattggacacccagccgaacgtttcaaccaaaaaaatggtcattagtgaaaaaaggactttccgattgactgtctcattagaacgcatttctaaaaaaattaataaattaattaatcattcatttttcaattaaaataatgcctcctgaatcagatgaggacatcattttcacacgaaaccaaagtgccaaataaagaacgactgaacaaatgttcagcacccaactgcaattggcaaaatagggtggggccgggtcggaggtcatacaaagaaccaaactaaa

SEQ ID NO: 21592 - DNA, 1090 bp, Heterodera glycines
  unsure (1)..(1090): unsure at all n locations
tgaaaaaattgacaaaaaaaaaaatttaaatcgtttaaatattataaaattatataatatactaatattaattanaataaaataaaatttttactttgttttaaatgtaacggacatcaaaaggacattgnacaaaatcattaaaatggcaattaaaacttttccaccattagcaaccagaatattgtcgaaaaaacgcatttttgttggaattttattttcacactaaaattttattttatatgtaaattgttatatgggaagggcatattttattttaaaaaatcagtttgaatgaaaacaattggaaagtgtaaaaatttttgcgttcaaataagtaaaacactaacattttgatgaattaatatagtcggacttattccaactttccaaaaactggcaaattgtacttttcataattttttatttataaaagaaagaattgggagaaaagaaagaaatctttgcatttcgcacactttctaaaacactttttcactcgcatgtcaataaaaacgctttcattaaaaaatgaattgaaaattggcatttcatttccgttcatcgaacttcaattaaatttgaattttacaagagattctaagaattaaaatattttatgaagacaacagatttttttacaataatccctctttatatgaaagcgttgaaaatgatcagtttgattttcttttgaattttgacaataaaatttaaaaaattttaacaaataaatttttacttcccagaaaagaattaaaggatttttgaattgaagagcaaataacaaaactaggggtgagtttgaaacatttatgtaaaaaattaaaaagataaactaaaaaattggtgaaatatgtatttattcgcaaaaactcaaaaatatggatttacagcttttaaaaagcttaacaaccaaaaatgtcgtgtctgttttaccaagagaaacaatcatttttgtattaaaaatatgaaaaaaatattgtacaaaaaattaaaagtttttgcacttgtaaacttaaaaattcgtttaaaataaatttatatgttagtctaattttttatntgtgtatttagaaaaagattaatg

SEQ ID NO: 21593 - DNA, 897 bp, Heterodera glycines
  unsure (1)..(897): unsure at all n locations
attatagcaaattanntttttgggctacattttaattttgtcttggatttttatcattgtactaagcattttgtgcagaatgttttcagcattattcttccattaataattttcttgcttcttatttattcgttacctttgttttatttcttttatttaaaacaatccttgtagtgttcaaataattaattttaaggtgttcctcatttattaattttttaattgggacttaaattacagttttgtattttttcatttctcatattattacttttttaattctttcgttttaaaatttaaaaagataaggtgatcttacttaattcttttttaatattatgttaaaaatttataatttctaattagtaaaaatcttaaataaatttttttttctgcaattgttctctattatattttatttattgatctaaaagcaaaatatttggctttactttatacgaatttccggtataatttttaccaataaatcgtttcatattccttccttggtaagggttgattttttctgaggcaattggcagaaagtatttacaatatcaaataattctgcattttaattatttttaatcttaatgaatttgaaaataaaaataaattatcattgataatttaagtatatagtgtttttttgatttattcaccttgaactttcgtctaatatataaaaattattatacttagcttttttgataatattggtaacttagattttgggttatctaatattttatataatcaattgtgatatattttattggttatgattgttaaattttgatgttttgctgtaatttttttcttggtaattgcaaattttgaaattggaacagaatttacttttaaagctgaacatagagacatgaggatcaacctttt

SEQ ID NO: 21594 - DNA, 1886 bp, Heterodera glycines
ctaattagtaaaaatcataaataaaattttttttctgcaatttttctattatattttatttattgatctaaaagcaaaatatttggctttactttatacgaattcccgataatttttaccaataaatcgtttcatattccttccttggtaagggttgattttttctgaggcaattggcagaaagtatttataatatcaaatttttcgttttttgttaccatgtcattgtgctcatgacggatttcttaagtataatttaagtatataatgtttttttttaatttattcaccttgaactttcgtctaatatataaaaattattatacttagcttttttgataatattggtaacttagattttgggttatctaatattttatataatcaattgtgatatatttattggttatgattgttaaattttgatgttttgctgaaaatttttcttagtaattgaaaattttgaaatttgaacagaattacttttaaaagctgaacatagagacatgaagatcaaccttttccgttttaaaaaagggtgctgacgtagtttattattttgtgtttatcgtagaccctttactaactatagtatgtcctagtatctcgtttctgatcattatgctccgcccactttaagtcctttgttgccctccatcacattgtattattcactctttcgggagggggaattggctgatcccgaactcttccaattgcccctctcacccaattttgtcccggatgaatcggttcacccttctccaactaaccacatatattacatatttgtatggatccaccttcggaataaaggttattattccattccactcgtgtaattattgggatgggctacactctctaccaaataatttttctctaattttcttctcaaaggcttttttataatgctacagaatttcagtacactcgtatttttgtgttatccctccctctactaatttttaccctaaaaagaaattattaaatattacaaattacaaaaatagctttgattttaatgttgatgtcgaattgtatgttgattttaaataaatatcaacgtaaatggtcgaaacggtcattggcgaaacggtcattgtcgaaatgtccagccaccaaaagaaaacaattaaataaatttgattaaataaaaaatacaaaacgaataccgtaataaaaatgaataaaaataaatcaaaggttaaacattcacaggcgattaaaatatagtgtaaatgtggcacagaaaatttcctactcagaactcattgcttttagtaaaccctgaattcctttggttatccaaaaaatgagcatagattaatataccatagagaaaattgtttgaagaaaagaaaaagtaaattcgggtgggtaaataaaacaataaatttattttaaaaaagaaaaaatgcttattcattaaattaataaataataacaaaaaaatgaaataaattcaatttgcgaagacggcaaatccttggaaatgtatgcaataaagaaggttaagacaaaaaatggcagaaatatcgatgagaaaaatttgttcactaaatctttgttggatggattgtctaatttagttagctaattaaatttgtttcaatttttttttcgcctcgttaatctgattggtaataaaaagcagaatttttcgatattatctgttagttatcaatgagttcaaaacagcaattctttaaattggaaaaaacacaaaaacaaaatttaaagaggaaaagaataaggaaataggaaaatggcaatttatttgttcaaaaatatattaatttaagaaaattcttttcaaaatcgtttagcttaaagaaatcaacaataatgaaaagattttttttagaaaaaaaaacagttcaaat

SEQ ID NO: 21595 - DNA, 1050 bp, Heterodera glycines
cgtgaatgttatttttattgaattctgaaccgttttgattagattagactagaaaaaattgaaaattttgaaatcatgtttcccactcccttctcccaggggtattattttgtaaagtctttttttccccaataaacttgtcaaaccccatttttcgcaccgtgaatgttatttttattgaattctgaaccgttttgagtagattagactagaaaaaattgaaaattttgaaatcatgtttcccactcccttctcccaggggtattattttgtaaagtctttttttccccaataaacttttcaaaccccatttttcgcaccgtgaatgttatttttattgaattctgaaccgttttgagtagattagactagaaaaaattgaaaattttgaaatcatgtttcccactcccttctcccaggggtattattttgtaaagtctttttttccccaataaacttgtcaaaccccatttttcgcaccgtgaatgttatttttattgaattctgaaccgttttgagtagattagactagaaaaaattgaaaattttgaaatcatgtttcccactcccttctcccaggggtattattttgtaaagtctttttttccccaataaacttttcaaaccccatttttcgcaccgggaatgttatttttattgaattctgaaccgttttgagtagattaaactaaaaaaaattgaaaattttgaaatcatgtttcccactcccttctcccaggggtattattttgtaaagtctttttttcccaaataaacttttcaaaccccatttttcgcaccgggaatggtatttttattgaattctgaaccggtttgagtagattaaacttagaaaaattgaaaattttgaaaatatgtttcccactcccttctcccagggggattatttttgtaaaagccttttttttcccaaataaatttttccaaaccccattttttcccacccgcgaaatgtatatttttattggaattcctgaacccttttgaagaaaaatataataaaaaaaaattgaaaaatttgaaaacatg

SEQ ID NO: 21596 - DNA, 1929 bp, Heterodera glycines
ttaatgaagtcagtcaaactcaaatgatgtgtgtctcttttttctctgtcagttacgtgaaagcaaaacacaccgacctaagcattatccgtttgctgaaccgacaaccgcccgcttttgaagaagcgttggaatgtgcgaagaatgcgaaggaacggcttatgaacgagtttttgcattcagaaggacaaacgaggcaaaaagactcatcattcgcattggccaagttctaggcgtaattccaaattcagaagttctttttactgtgggctgtcctcttttcatcgccgttttactgccccgtgggtgctgtgccggtgtatttttaaaggtggcgctgaagtggcccaaaagttgcgaaattacgaattcgctgttgaactgctcgaatttcttttggaaactgatcgttagtttttatttattggataatttgtcatcatagcatatttttcgcaaagttcttcgcaatttttgcatgagttctcgcggtaaatggtacgaacgcattgcactcaatttggaacgccatctgaagagtttggacaagtcagcacacttttgtcgactcggcatggcggatgagttggtggggaagtcggacaaactcatcctgcagcatcggctgaccaaaatgaacaaccgcaagaaacagacacaaagccaaacggacttgggatttgttgagttggaagaccctgaaaaggttgggaatggcactccaatttaatgtgccatcgtttgaattacgtatttttagatggaaattaacgggacaactttggccaaaagccttggcgacggagaacaggtcaaccacttttacattccgacaagcgaccggggggaaatcaacaaatgcagcgtcgaggaattggtgttgcaccatttcattacggtggagcatttcacgcacggattccattcggaggtggccaaaatcaaaaatactctgataaaagcccttcactttggttgggcagggcgccgtttggcattcgctctttcgccttttcttcactgatataatttttgacgccgatgttccgcaagtttggctttctcaaattcaggtggacaaacggaaattattatgcttttgcaaagtcacacattttgttcctctgcaggatgacccattggacttgaattttcccgacttttaccgtaatcggaaggcggcgattgaccaacgactccaagaaatccgttcgactcacaatctcgctggcttttcgcgtcacttttctgacaaagtcaaatcgaaagtcgcttcaaattctcacattttgtggcacaatttccaaagtgctgagcaaatcgccgtttgtctttctgcgttaaaatttgcttaacaattgccttttccagacctttttggcctgttgttcgccccttatgctccacgaccttttcaaagagttttgtacaaatttcaaagaaagtcgtagcggatttcccgatttggtcgtttggaatgaaaacgtggcggaaatggcggtcacttactctttggcatttgtgatgcactaaacttggcatttgtcacaggtggtggaagtgaaggggcccaacgacagtttgtccgccaaacaacagcttcggctgcatttcttccgaacccacggcgtccgctctgttgtttgtcacgttgtcggtgagaggggaaaagcgccgggggattatttatcatcgcattttaggcgagaggggggggggggtaaggcgaactgagagcataaggggattatgtaacaaattgaacttgggaaaggagggattaggaatttgggaagggaaatcggtggaaaatacacagacgaaaagacaatgggaaacttaagcacgcaacgatcggatgctttgaacaaacgactttctgctgctgaacgaacacaatgccaaaatgcttccccatttcgtgctaat

SEQ ID NO: 21597 - DNA, 1924 bp, Heterodera glycines
tgtacttctattttgtctgagtcaatttcgattgctcatctattgacacaagcggttccttccacccatcattttttttccataatcattatttctgtaatttttttaaaattgttttataacagtgaaatttaaaaaatagtatcgagtcaatcaatccttcctggtttgggccttctttcatggaggtggaagatgttatattcttttttcttcttttatttaaatgataatatttgttttaaatttcattatttattttttattttgtaataaatattttagtccatcttatatgccatttagtgcatataatgtatgtttttcattatcatatttaaaaatacaatgtatagtaagtattctttatcatatttaataatactttcgtcttgaacaaaggttgcgatttggatccatttatttatatttatttaatttgttttttataaaaaaaagtttattttggcaatttttgtcaaactttacaattgcatagattttattgaaaaataattaatttttttgttgaataaattattattcgttttcaaacttgatagaaatcaagttagagcagcactcctgcgtaatgaaacatttaatttagttcgggatcagtaatcatttctagtaatctttgattttatttattttatttaccagttcgtattttctttcattattcataatgcatttaatttaatttattgggaaaatataatttaaaatatataattatttttaaagcttttcccacaaagtttcaaaagaaactttttttgttgacaaaaacaaaaaattaaatatttgtattttaaatttattgattatattaccaattttttttatcataggtcgcttaagccttaatattcatctcttcaaaccccataattaaacttttatttatttattaggtagcaaaaaagtttacatattaatcaattattaaaattgttattgaagaaaataaaattaaaaatccgcgaattattcaaatattattccattcgttgtaaataaaactttgttgaattaatgagaataagaaatttattttttccaatacatgatgtcgccttttgaatattcacgccatattgatttttttttaaatttttgataaattacaattccaaatttttgtttaactttatattctttttatgaaagattttaatatgttctaacgacaacatttgctgtggttattttcaaattgtaagaccctttccgatttggcagtgctagctgttatgtctttagcttacaactttattaaagcaaagacaaacagaaaaataaatgataaataacaaataaataaatgacggaggaaagacaatcaatgaaatgaaaaatgaaggagagaacggcaagtgacccgaatgagtgaaaaggtcaatattaaataaacatttccaagtgatgacacagggaatcgtgtcaataaataataaaatatatttaaattgtcaaatccacaacatctccccctttaaatgaaattatccctcaatttcatatcgagcgccagcatttgggccgatattcaatcgtttcggcgggcgtcgttcacgctgaggacgtgccaaaacggaaggttgctcgtcatgcgaaccatgaggctgattgttctttgtcgtcggggtctttgttggcgaatttggtctctgctcttcgacaaaatcttttgaaattgggattttgggaataaatgaccgaatttgatttatgtggcgattaaccacaatacccaaagaatggattttgaccttccagaccaaattcttaccatcaacaattttaccttcaagccatgatggcttaccataccgaccataattgagtgttaaattgtgtcaccatttttgaattgtcgatcagaagtgtcatggtgctgatcatactgtcgtttcat

SEQ ID NO: 21598 - DNA, 1180 bp, Heterodera glycines
tctgtcataattgacggtcccatgagatttcgtttattaggggcaccaaaaaatgtttttattcggtccattcccatttttccgaaaaaaatccattcatttttaattaaagcctatctaaacttttgaaaagtgtcggatcggatcggcagtgcacttttcacactcagttacctgaatgatgaccagcccacggatgccaccgccatccaacgaaaggacattgatgaaattgtggtcggacggactgccctcatccgaggacacttcgggcaacttgtccaacacctcgtcatagatgtcctgaacacacaaataagatattgtcaaaaattgaattttcaaattatttcaggccacttaattggctccaattcataatttcttaatagttaagctagatttttcaaaaaatcttattattggaaattttttattaaaaaaaacttcatgaaaaatttttcaaacggggataaattttttttagtaatttatgataattaaaaaaaaaacgcttgaaaattgtttctacttttttctttaaactttcttataaaaactttcgaacaataagttttttgaaaatttcctaaaaaattgaaaaaaaaatcacaaggttaaactgctcccggcatataggaaagcaaaaaataataataacatgcaaaataatgacactgatttttacattgtgctgaatgtccaacagtttgttgaagcggaactggtccttgtcaaatgcccggttctcaaaatcctccaccatcaccgacgtgtagctggccggctttggtgccgttgttgatgctccagccgttggttgtgaggagtttgctggttgggttggcggtgccgtagcagcagcagctgcggccgacgctgccaatgttgttgaactactgcttgacgacaacgacgccgttgacgatgcactcgtcgatgttgaagtggtgttgccggtggcggatgatggcatggaactggtggacggcctcttcagcttgttcaactgcttctcgttgacacaaccggacacacagccaacctaaaatacgggagaaaaaacgaatttttgtatttttttttaaatgacatggtacaaaattcatagattttgtaccttggtgagtggacaacgccgagcatcgcatatgatctaacttttcagcaaatcaaccct

SEQ ID NO: 21599 - DNA, 1047 bp, Heterodera glycines
ggtttgatggcactacaaatgggataattttacatgatacacaaattaccgataaattattcataataaaattgttaattgaatcaaatattattaatttataaatgaattcagcaattttttcaaaaaaccttatttcaaaaattgatccaatattaggtccagagatcaattcaaataacataatgcccaatgaccacacaacatctttttcaacagacgtaaatatattatcctgaattcaaatccatatgttattatttaattataattgtagtaaattagttggattaaaattaattaattccttagttatcactgatcagaattacttttatttgctgtgggctcatatacggaaagtcttttagccaaatgattttggtttgatcagcgctgggaagtgccctctgccgtgggtcttccacgcgttgaatttcggcatcgatttcaaggtgagcatttccgagcagttccgacttgctaaattgatcaccaacacggatagccaccaaatgatcaggtgtcaacacatgtgccaattgaccattgttcagtttcaagtgccgttgaattgcattgatcagtttaagagcaattagtccaattatatgtttcggcactaaattaatttaaatattaaatttattaattatcctgaaaattataatttttattttttttaattatccgcttttttaccataatagttaaaataagcgttgacttcattaaaataatttttgaatgaaattctttgctgtttttcttcatttttgttttccaaatatcctggcacattctctgatgctttgactttaggcacaatttgctgcattcttttggcattgtcaatttttaatggcatttctaaaaaaatatttaaatattttcaatttgttataattaattattcatttcttttaagttaaaggttattattaataaaatttttgaaaataaattttgttcaaagttaacatttagaaacagttatttttcctgacttattttatggaatatttatgttcatttttttaaaataat

SEQ ID NO: 21600 - DNA, 2064 bp, Heterodera glycines
aatttgttaaaaggaatgcttaaagttttcagcgatgcttcattcgttgctgattatgaaaacgcgtcagaaaatagcattagagggaaagtcgtagcgcaattccctctatgttgatcaagacaataatttgcgtcacatttttgctggaatttatacagaaagcagcagcagaaaatccccatcgaaaggataacactcaatttcatgatctgcgatatctcagtgacgaaacgatcagtgacgaaatgataggtaaccaaaagaaatgccactttatgacgcgttaatttatttactttagggacttaaaaataacaattcaaaaatatatgtcaatgcttttatttgtgttttcaatcggtattttgacttggacatatgattatattgtgggaaatgcccatataaacctttccttaattaatgctgaagaaatatttcaaattcaacaatttttgggtggaaatatcggcgactttgtattatattgtggacgaaatgtgagttgagttcttcttatattttataatgtttttttttaaattttgaaggattattttctcggcaaaattacaatgggtctttattttgtcgaaaacataatttgttatgcggtaattgtcatttgtggatataaaatggtcagatttgtttacaaaaacttggacaaaagttcagcaagaagacaacaaattaaccgacaaatcacaatcaatttgattctccaggtaaaattgatgaataatttgaggtgaagttttagattattgtcggtttagtaaattagtatattatgtataacttaattaatacatcatgctaaaatttaattatatttaggcatttataccgttggctatgaatttaataaaccttataatttcggttgaaatggtgatttttgaattccaattgtccccgagttttgtttattcaaatgtgcatcactcttccctttcattggttgcccgtaaatttgtccatttgaatattatgaatttagaaatatttaaaaaatccgggatttatttctacacaagacgtggtttactctacctttcaggtgtatattaggcccctgatcccgaatctgagctctattgagtttcaaatcaattaaaatgtgatggagcagggttaaattttccaaatttcagaccctaaggggtcaacataccaatttccgagaaaatcgacaataactcaataggtattgattgatctgatctgaatataactttttaccatatagatatcgtcaaaatctagcaatttatatttattgtctcatgaaaagcatgagtttaaaaggggaaaagcaaaagtcatgattcgatgactaattaacatttaaaaattttgcagaaaatttgttaaaatagtgaattttttagttttttggtatttatgattattaaatttaaaaaaaaactttaaataaattattttgctttcgtgtcccttatgtttccttcacttttcggcactttatgcgtttagttttcatatttccgttttagcccgtaaaataatgaaaaaataataattagaatggattcttctcaaccaaattaagaataaaaagaaatgaaataatttggtgacgaaaattcgtgtaattaagaataaaaattataatgaatatatataattatgacattataaatatattttaattcaagaaaatgaatgtatttattttaagacaagaaccattaattttttaaaaattttcaaatttccgttgcccaaaatcgcatggaatttgagaaaagaaaaggatgatcacattttaagtggtttgtcaacaaattaaaaagggttttttcctggaattacaaaaatttcagctcgataggttcacggaagtggtccaactcccgaaaaataattttgtgtcattttctattccacaatttgccaaatgctttaaccatttaattttcaaaaactttttgaaaacttggggtgggggaaggggggtggtgtccggcggagccgatacgtcggaatggacattattgcaaaacaaggggccagcagccaattttccaattttgc

SEQ ID NO: 21601 - DNA, 1998 bp, Heterodera glycines
tttcccgagggcgactgcctgaatcgccggcctcctcctcttgttctaaaaagttttttgaaaaaaagggacgcctaaaaagttgtgggtcgtttcttaaattccgccaaggggtaggaaaacaaaaaatgtaagacatataaattcataacttggcttaaattcaatcaaattaataattcttggtatcattcaatagctctagatgttctctaacggaatattaattttaaaatttttttaataaaattttcaaaaagttgtggtcagaaaatttcaaaaaacattgttagtgttgaagcactccaaaaaatacccccctaagaatcgacataaaaaatactccctaaagaatcgacctaaaaattttcaaaaatcactcctaagaaatgaaaatttttttttatcaaaaacccatttttttggcaagaattttaatttaaaaaattatttggcaaaaagtgccgagtctggccccgatcagtagtgatcagagagaagtgagcgagaattttcagatcagacaatgcattggggctgagaagcgagcagcgactcgcggtgactcatttcctccaattcgagggcctaaaaattgggcaaaaaaaaacaatgtggaaattttggaaaattatttttttgtgtacacatgtccaagctgggcagcccatttaaaagcagacagaaaatgattacaaatttgtaaaaaaattttttgctcgaaaatcataaaatttggccatttttgtggactaatctcttaacaaatcgcattaaaaattacaatcaattttcccggcggcgcctgtcggcaccgtcggccccctttgttccccaaaagtttttggaaaaagcgccgcaaaaaccatcttcttttctaacaaaaaatttctcaaattttgatcatggacaatcagaaatataacattgaacattttaagcctgttttgaataaattttgtaaaaatgaggcttttttgcctgccaaatgaggcttttgaaaattgagaagctaaattggtctctttttttcagagaagttccctttcaaatctcacaagcaaagaatttatttatttattttttgctagccatttgtttttaaagaatttttgttgtttttaaggcaatgaatgtgccaaacttttttttaaaaaaaaattctcagtgacgaaacgatcagtgacgaaatgatcggccacctccctgttcattttaatttcctgtcattcaatttttcttgcataattgtcaacatcggcgagtcgtcatattggcgagtagtcggccatcggcaacggcgttttgtagtgtatccgcagttcacattttacttttatattaaaataaaaataaatgccaaaaacatgttaggtatgccaattaccaggactgtcaaaatatgtttcctgggttctacgtagtctaattagtagggatgccaaaaacatgcaaatgcatatattttttcctggcttctccatgctctaaatagtaggaaaaacactttcttttttgtgtttgcgtgtaaaagtcgagacttttatttgcatatttttgcatattttgggtgtttatgcatattttgggtttttttgaatatttaatgcatattttgccatttttgtacatattttcagattttttgcatatttagccattttttgtacatatttttttagatttttttttgcatattttgccatttttcgtcaaatattttccgatttgaatatctcttaggataaaatattgaaaatgcctaaaattaaatccaaatctgaattgatgcgcgagtgggtcaacagcgagtttcactgccgaaaaccttgagaaatttttgtttacaattacaaaaacaaccgatataatttctgaggaataaaattttttttttttattttgcaccccgaattttcaagtttttttgtgcatatttggtgcatatttggcaatttttgtgcatatttggcaattttatttgcatatttatgtgca

SEQ ID NO: 21602 - DNA, 996 bp, Heterodera glycines
  unsure (1)..(996): unsure at all n locations
gctcagagtgagataagggacgcaaaagagacgattaaaagcgattcgaaaattctatcgactgatataataacgatgcagtcgcggcgttgacaactgagatggaaccaaaagttccatatatctttccataaggttggaaaggcagaatttgaatggccagtctatatttacactgagcacccgttgaagcgggtgatgcgaagcaatagcaaactgtatttttaaattctggccgcaattctaccaaaaacgtgtttagaccgcagtaactcggctcagagtgaagattaagggacgcaaaagagacgatttaaaagcgattcgaaaattctatcgactgatataataacgatgcagtcgcggcgttgacaactgagatggaaccaaaagttccataatatctttccataaggctggaaaggcagaatttgaatggccagtcgatatttacactgagcacccgttgaagcgggtgatgcgaagccatagcaaactgtatttttaaattctggccgcaattctaccaaaaacgtgtttagaccgcagtaactcggctcagagtgaagattaagggacgcaaaagagacgatttaaaagcgattcgaaaattctatcgactgatataataacgatgcagtcgcggcgttgacaactgagatggaaccaaaagttccataatatctttccataaggctggaaaggcagaatttgaatggccagtcgatatttacactgagcacccgttgaagcgggtgatgcgaagccatagcaaactgtatttttaaattctggccgcaattctaccaaaaacgtgtttagaccgcagtaactcggctcagagtgaagattaagggacgcaaaagagacgatttaaaagcgattcgaaaattctatcgactgatataataacgatgcagtcgcggcgttgacaactgagatggaaccaaaaagttcccataatatctttccgataaggctgcaggccnatgcaag

SEQ ID NO: 21603 - DNA, 1536 bp, Heterodera glycines
  unsure (1)..(1536): unsure at all n locations
cccccctcctctttattagtccttcgtatccaattagtgcatacngtatcaattagcgtaccccttaattgcctaattttagacacaatcgacgcgttggcctacgaagcggccaaggttttacagcggcagccttttcttttgtccgccgctggtggaggcggcgagaacggctcagtgatattggagaacggaggacggacagcggcagagggcggcggcactttgacaccgcacgcggcgtccgcgcccgggggaagcacggaccaccagcagcacaataacctgcaggtgctggcccaatcgagagtcttggtcatcgagtggggctttcctctcgagacttttgtggaaaatgtgccgtggcattcatttatatgggtattattttcgcattattcgtgttgttcagccgtttggctcttcactgggcggcggtcgctcctcctcgctgggtggcggttccgcctcttattttgcgggcggaaaacgcgactccaacgcgtccgccatcagcggactgtcgtccggcacctgtggacggatggagcggaacgaactcaccgacactttcgaccgattgaacgtagggaaatggggggggggggatgagttggccaaaccaaggccaatgatcagcaaaaaagggccacccatttttaaggaactctgtcggatgaacaatcagctgctgatcacgctgggcgttggccatgcaaaagtggaccaaatctgcacaatgctgtcagtttttgggcatgggaaatggggggggggcgattagagtgctatgtgaccggaagactttgaaaagctggacccatagtggaagatggaagactatcttgtgaaattgggttcggatcagtctaaaatttgatatatatttttttggactgatcagtgatcactcatatacattattatcacacccaattagcattgaccatcttacagaggaaggtatggcattcatccgaaaatgaccggtgccggcggtggcgggtgtttgttcgcctttctgaagccgggtgagtgatttggtgagggaaagggagtcaataaaaggataagaacggatcagactgatcaaaattgcatttgtcacagcagagttttgttgtccgattaccattccgatcacttcagacacttcccaaacaattctgaacatgatcagggaggagttgcgcaaggagggctacgaaatgtggcagccgacactcggaggtcggttttaaatttgaaatttcactttttctcccctcttttttaccctttaccccccgctgtttaggcccgggtgtgctgcagcatcagcaaaagccggagattttcacggcatccagcagctcagcggccagctccagcacaacgtccagcaccgggcggggcagcggctcctccatggctgtgccggtgaccacggcgggctccacccggtccaacacgccggccagctcgcaccagacaacgccgtcggcacggcacaaaaagtgattactgattgactgccgcgggaggttttggacgggc

SEQ ID NO: 21604 - DNA, 2137 bp, Heterodera glycines
agccccgcactgaacccatccaccggatttctggtcaactcatttaactgcttctgcagcaaaagtttggactgttccgaagacataattaattaagggattgtttgataaaggtcagcgaaacgaacgaacaaaatcagtgaattgaatttttattaatgcctctaaaaaatggacaaaaatacaaaccgtaaacaattaaaacagatcagcgtccaattaatttaaaaaaaaacgaaaataagcaaagcaattccctccccaagacgtgtgatatgtagaataaaaaaaagaaaaaaggtaaggtatgtggatttttatgagaaaaattcaattaatttcgaataaattatattttcaattttaaaatttgtcatctaatttaatgcctttttatcgctttcatttcaaaacgtaaatttttgttttgcaccacagactgaaaagtaatgaatgattccggacgactgggtggacgagctcaccctgcaattgttaaatagcgctgatacgtgcgttttcccagctttctttgaaaatttttatttgtaaaatttaacatttctctccaggtattacgctctgctaatgcccagtttaatttttgtaggtttttctttaatagaaaatgagtgtcaatttcttttttgccatttcaaaggtcgtcgtctttcatttcgtaatgcttgaaattggacttgaattcttcataaataactgatgtgccgagcttgaccgataactctttacttaataacattcgtaatgcattaacagataaattttgtaaattcgctttattatttgcagaaaaaataacaaattctacagcatataaaaagtaacaaattaacaaaactgtaaaaatgataatttgtaaacaatttgagattgattaaggccttttttggttcattccgatgctggttccacggaaattggcaccccgccaaagtcccgaccgttcagtgcattttctgcactgattgtgagtccatcctttcccaccatatgacttggcatttctttgcacaaatgcgcctccaattggtcacttgcggcaagaagcaagccaaggaacaacggacttggccgaaacggagacgaaagatactcgggatggtattggacaccggcgaagaatgggtgaacttaggggaaaatttggacgagattaggtacaggagaagtgcaagtgggaaactactgactgttgcgcggcaactcggccatttccattcgaatggcagtccctccggggaatgatgagccgttggcaccgaaaccacaaattttctcaaccttttcagcgagttcgttctgaaggaaaataaataaatgaaattataggcaataagccaaccaaacaaaattaatacactaaattataaaaaaccgcatcacccgtatttaatttttgcaaatttacattattttccgccaaattcttctcaacaattttcaagagagcagcggacggcgtgacttgcccggcaccattttgttgtccattgacgatgcaattctcatcaatgccaagccctgacaaaatagaataattcaaacaaaaaattaagacactgacagacagtcaaccgaaataccaataggtaattaaaacgtcgtaaaaatgaaaaatccactgaaaaacacactgaccaacaaacaaaaggcccttttctgtcagtttaggcacaacggatggattgacctataaataaagcaaattattaacttatttagaaaccataacaaacaaagcacttgcttcgtatcggtgcctaaaatttaattaaatcattgaaagatttcttggccaaaaaccagttggcaaattcgaaattccgacgatggttagattccgaatggtgacccgttgggacaatgttttgcaaaaaagttggtatacccaatccattaaaagctgtaattttaaattcttcgaatttctcttctgccaactgactctgttaatctttcttcttaccgatggcgttcatccaccgacagtttgtttttgtaaagtttccctcaacaatcaaaattgtgtaagtaattttacttatatgaaaattttcattcactgatcaacgaattttccgccagaaaaacggtcgtccgtttgcccaaacgcatc

SEQ ID NO: 21605 - DNA, 2654 bp, Heterodera glycines
  unsure (1)..(2654): unsure at all n locations
aacttccacttctnancancnncanntnaattaacanataaatttctttttttaatnanactaaaanttctncnatttatnattcctaatnaanaaattcnaaantnaactnttcttctatnnttccnacannaaannnncaatatcctcaaaatannnnncaaaatcncatccataaaccaaatccaatttcnnttctcaatttcccnaatctttnnttcccatttncantnccacatnaatccttttttcaataattttancatnttttaataantncttcntcaaattcccccatnattnaactnctaaaaatttcnnnnnttnnaanttctattcaatnatannnaatctannnnacnnanncatcnatctttcntcnttctctaattttctnttctctatttctcttcacttcttttnatctcnccntatccacttcttttaatnnnatancantaaatttcaataaattctnttaataaattaaaatatttacanttaacanaatatcatttntcaattccaatanactacaaccttctttttggtcaaaaaattagcagtttatctttggcgcttttttattatgaaaaggtaatttatttgaatattttattcaagcaattagcattattattttagttaattaagaataaaaatacattgataaataatgaaaacacaataaattcggacgcaaatggagaggctgaagaatgcccaatttgcttacaatcattagacaatgaaaaaatgaaacttcacgacaattataataaaaattcacaagtaaaattttttgaaaattattaataaacctcatcaaaaaataaatttagcacctttttcacaaaaattgcatcattaaatggtaagaaaatgtgtaagattaataatttaaattattttacaaaggattgaatcacagcaaaaaattcgttgtccgctgtgtaattgggaaccaacattcttaatggtaaatatttttttttttggatttttccagccgggccttaaaaaattcagagtagctgatcacgaatatgacatcacttttaataatccttaagccgaactcgagcaaaaaaaatcgaaaaaatcaatcttttcgatcttcgaatttcattttaatttagctttgggatcagaattggtcaaaattaaagggatccctttttaagaatgttagtggtaaaagccgtttaaaatgaaaacataatacaatataatgcttaaagctaattataatatcctttgtatttggtatttgatagctttaaagatttgtcaaaaacaataataaatttataataaaataaaaaatttatgaaaaaattcagaaagtcgagactcagaatttcagacaatagctttttaaaatgagctaatatttaaaattttagactagcttcataactattctcagaagcaagctaaaaaaatctacttactgtcttccgctagcccttccttagattctcaattaacccataaaatttcaaaaaattcgttagtttcttgttgtcatgcaattacactaaagcttgattttacaatttttaattaattcttctaagaagcgattttttacgtataattttttataaatttagaatgcaaatattactgcaatttttaatggacctagcgattttttgtcgaccttggccctgaatccgttggccaatttgttttcgattgccaatgggcctttggaaattgacaatttcaagcgaaatcaagcgcaaaattccattaagcatggcaaacttcttttacaaattatgggcaaagatttgactggcctaattttgctagagcattttatggatgtaactggattatcagttgaacacttttttgaaattggagctgatggcctcgaagaaaaaactgcagttcaacaaattcggaacaaactcgaaattgtcttaagaaagccggagatatctgtagacagaaaatcgtcggctcaggcaatcattaagttgattaaagtgatcagtaatgtctcgaacatgttagcccataaagattttgatattttgcaacatataagcgtgaaattataaaaatgttaaattttgttaaagaataaatgcttaacttttcatatttgtcaaagtgataaatgacccaatttgctcaattttacgccattaataaattatttgcaaacttatgggtggcgctcatggcatttacgatttccggaaacgaggatctgcgcaccgctctttctcactgcagtgagatcgaaaatgaaattaatcgctctaatggagagcttaaaacaaaattgatggagcttttcttaaatttccactttcctcttgtagcttcatcgaagtttcgagaaaaatacatcactaaaaattaaatatttttaaaccgctgcaaataatccttcacgcaatagcagataaattttttatttttgttttgtataagccatattattctgaaaggttgagattttttcaaattctgtcgcgagagcgagtcaagaaaaatgtgtcaaaataaaattttaaaaatgaaaacaaaaaactacaataaactttaaaaaacaagactaaaaaaaatattataaaaaataatttcaaacaaaaaagatcaaaaaataaatgtgaagaaatgcttttcggaaa

SEQ ID NO: 21606 - DNA, 2184 bp, Heterodera glycines
  unsure (1)..(2184): unsure at all n locations
gcatgcctngnncaggtccacatcannttagggcggttgggaaaaaaaatataaaaaatcttttttttttcttgtgagatttttgttacaatttttaaaacttcagcaattcttcatccttcatccgatttttatttgaaaatagttattcattttctcgctttttcttcattggaatctcaaattacacctaaaatttaaataaaatttttttaaagtcaataatttgtgcttttgccgcattttatgccaaattcctttctccatttttggaatgtttcttggttaacccaaactctttcataaatttattttccatttttgtacattttaaactcattaatccgttcaacaaattcctacttcttctttttgtaataatttttattaaaatttaattctttgccttatttgatttttgatcaattttctcttttttatttcattttcccatcattggccaaatatttctgcaaaagttgaagtgataatgtgtttaaaataaaaaatattttttagctaaaaaatttaaaattttagctaaaatttttaaaatcaaaaaatctaactttacgggataaaatttaataaaattttgattttctataaaatttacaaatttttcatcattatcccatcgtttggcctagggatccaactccgcgcctcttacccaagtcaatattaagaaatttaaattttgaataattaatttaattaaaattcaatactcagcccgcttcaccgaacattcaaattgttgaggaacagcagcgttcagtggccgaaattctttcaaaattccagcaacgtgattttgtgcatcccaatggcacggaaagaaaggacaaaaaggaggtacggttttctagggggttagatttcctgaaggtttaaaattttaaaaattttctaaggccccaccagtgctgcgcccgaccaatttaagccgtggctgctccggtgcatccatttgggcaacttcaagtgtgcgaagtgagtttgtgatgcgctttcaaatttacagaatttgcataagatcgaaaaaaatttctttaaaaatttttactgattgattagagccctcgcagggtttttgcgggaatccttgtcctcatgttcctgcattttttgggtgaaaattgcatgtgaattgcaggaggagtccaggctaaaacagtacaggattttcggtctttttctgtccagacccattttcaatctgttcattttccggcatttttttaaaattcagataaattattgtgttaaattggtgaactttcccacgtctgatcactttattggtttgatcatttcttttccaatcattttccaccatttccaaaagctttgggttttgtttttaaatttttggcggtactttaaagtggtaaattttgaaaataattttattaaaaactatgggatccttttcagttcgaaaattttctgacataaaaaaatatgaaaatgagttttatgaaaaaaaaaaatgcaaatcgattatctgactttacctatgattttttttatcaataaatcattgtccgtttaatttggtttttaaaattatcattgtttttgcctaagcctatgtttaggcttaattcagggctcggatcgaaaaattttcaaaatcagaacatcgggtccaaaaaatcagattttggggtcgaaaatcagaacattttgcaaaattgcttcaaatcagttatttttacaatttttcgatcaaaaatgtatcaaatattatatttttcgtctcccattatcgattttaacaattttggggagaaaattagcaaatcatcaattttagcgcattcggaatcaaaaaatcagatttttaagaattttttgcggcgcatttttccaaaaaacttttaggaaatgggcgaggggggagggtccggcggtgccgataggcgccgccggaaaattttttgtaatttcgttctgatttgttaacagattttcaccaaaaaatgccaattttgcaattaaattaaaagtcaagcgacgacttttttttcgcttttaaaaacacttttttgcggggcccttcttccaaaaattttggaggatggacagggggtccggcggcgccgataggtgccgccgggaaaaatttgtgatattagtacgatttgttaacagantttttgtccaaaaannatgacc

SEQ ID NO: 21607 - DNA, 931 bp, Heterodera glycines
attttgaatttgtttggcattttgtttctttggactgctgcctaagctttgaaaagtcttgaaaaagttcatttaaaggcttgcataaaatatgacttggtttttcttattaattaccttctagtctgctgccattcaactattttccagctcacatgcattcctcttcaattgatttgcattctcatggcgctgtcggcatttgtgccgtctgcggtgaccgtgctgatggccaccattacggcgtgctttcatgccgcggctgcaacgcgttcttccgccgtgccgttactttcaatttgcagttccattgcaggcgtgacgggcattgcgacatctccaaaagtaagagaattgaagcggtcatttctcagtctgcccacaaccctttgacatttgtcagatgctcgttgtgcttgtcgcgcgtgtcggctgttaaagtgccaatccgtcggcatggatcggtcggcggtccaagtgcggcgcgagatgaaaaatgtgttggttttaggaaacgcacagaacgcagaaggtgcgaaaccgtttaaaatgttaattgatcggacggacttccatcgaaataaaccaatttgaatacaaatttcagttccaacgaattctgcggattttcttctcctttcgccccctcaggccgatggccctccgttccccacaaatttgcaagtgttgggcagtgggaaaacgctcgatttggtaaagattaagtaaattttcggttgttaattgtaagactcgtcgttagttttcagctgcccgtccgtgctcgtctgctcggctctgccgcttccgtcagcagtcccttggccatccattccttcgatcgtctcatcgaatggtatttccgccagcgctaccgacgccagaaaatgttctgtcagacggcggaacaattctgtcgctgatttccagt

SEQ ID NO: 21608 - DNA, 1235 bp, Heterodera glycines
  unsure (1)..(1235): unsure at all n locations
tccgtccgttttcagtcgccnaagttcgctgccattccatcgatgctttccgtcggccgcacgcgcgccgcaaccatcgacgatttttgccaagtgcgccgggtggagacgttgctgatgttcgagtgggtcgacctgttggaggagttcaaacagctggaaatggagccgatggacaaagtacggatggagagggagcagttcacccaatttggggcgggggagtgccgcggcatttatccaatagtcaaaatgttttcctcttcagacgcgtcttttgcgtgcgtttgccccccgtttccttttgcttgactttgtgctccattcgctcgagtgccattctgtcgattgtcttttgttgcccaacggtgctgcgctcattagtccgtcggggcgtaattcgaacggtcgaccgcgcggcgaaaagaccatcaaatgcaacattttcagatcaatttgggtgccgaggcgaatttggagcggacattgggcaccgaacaatggaacggtaatcgaaatttgcatttttttcatttgttttcttttttagtttgtcagcggaggcggatgaaattgtgcgggaagtgctcgtccccttggccagcaacggcgtaacttttggttggcgttttgctttattaaatccgatattttgtgtaaatttctcaaatggtccctcttttctttgcatgtcaccattaatccaacaaattgcctcattctttgtcaggtgaactgattgcgctccgtttgctgctcctttgggactgttccgtgccgttggaatccgttgccagcgccgaaattgtccgaatggcggccgaacggacgcgcaaagaattggcccagtggttggagttgcattctgcaggcggtggtgtccagggaaaggtgtgtgagcacagccgattaggaaaagtgggggggggggatttggaaaatttaaatgccgagtcaatttttaaataatcaaaccgaaccttttaaaccgaaccgattcaaaaaaccgagaaaagcagtaacaaccaataattttccctcctccacagttggacactcttttcgccatgttcccaattctgtgcgcatttgcggccaaattcgcgcacatttgccggtcaattgccaatttccatgtgatgccccaatggcaatatgtggccgaccttttggacgagtagcagaaaatccttgtgtggctaagccgtaaattaccggtacaataaaattgacaa

SEQ ID NO: 21609 - DNA, 2051 bp, Heterodera glycines
  unsure (1)..(2051): unsure at all n locations
cggaaaatggaaattcaatccgaattaattacgcctctctagacagaatcgatcgattgttttgcttaattttctgaccaccatttcagtacgtgttcttcaaagatgtgaagcttgtccaccattaccatcgtactgattaacaaacagcagcagaagattagtgctgtggatgagcaaaagcaaaacaaaaaaaagaattattttaattttttaattttagcgcatttattcaaaatattgtttgctaatgaatgaaaagacactaataaattaggattcattagagtttattaatgttcaagtgtgtttcgattaaaattggggctcagttggataaattcacatttttggagttgggttcaaatccaatagaaaaataaataaattttaattaatgcataatataactaattaatacagaaaacattttttggactaaaaaaatgtattatagtctttctttagtgaaaataagcaaaaatcagtcaattttaaaggttagggaattaattgaaagttaacaaagctggaaatgggaactttggccaaaatttcgatttttgaagcactataactttttgatttcttcctatgggaacgtaatattaaaaattcacaatagaagtcgatcctgctctatccaatggtatataacacatatgcattttccgacttacagttcgggtggttggttcccttgtaagaatacaaaaacgaatcattggcgatcgaatgtcgtctacatttttttttttgcactacgatttcttcacccatttcattttttgccagatttgtcgactggttcagctaccatttgtcaaactttgagtatcgttggtcatggagtgattggattgaatgtgtcgaggttcgtttttttttttgaaaaatctgttccattatttcgatttttaattttcttaaacctccctcccaaaaatgtttttttaaattttcacagttggattcattgcatccaaagcgcatttttgtacgtgaagtcattgaaaagtgtttgcgcttttcctaccacaaaaaattggtcgaatttttgccctccgaattggcaccgatcattccggacgagccgaacatcatttacattcttgacgaccgtcagtttttgcatattacccattttagaaaccttggtgtagtaccaatcaaccagtcatgccaatttccaatggaaatttgtttttccaatacaaaaaagggttccagtttttttttcggtctacttttggcacacgattgtcagttttggctcaaaaattagggttcgattaaacgactgctcgcgccctaagtaaaatttttgcccattttcagcccaacatccggcatttaccaaggccgaacaattccggggcctcatcatgaacaaggctgacgatcaggaaattttgagcgcccttcgaatgccaagcgatgaacctggcggtggtggtggtggtgaattttccaccgatttttccatcgatgcggtcgccatttttttctccgttttgttgaagctgtcttcgcggacaatgacacattcatttgcggcactgacaaggtatgtagggaaatggaggaattcaaaaaaaatccttggaacttttttcataagaaaaaattcaagaaaaattttttggcaattttncaattttatgatgaactgctaancataagttttttcaaaaaattttccanaaaatcgnctggttngaaagatannaaaaaaattttttggagaaaataaagtgcatgcacccccgcacgaattncactcatttgtattttatttttttacagatacataaacattgcactgatgacgntgacaatgaggaaatgcatcgacattctcagacattgtgagaaaattgaaaatttttatggtcggttaatccaatttccaggaatgaataatggatttgctaacagtctcattatttgatttttgagtgcagccggggggggggggggggggggggggcgggggggggggggggggggttttttttataaaaaaaaaaaaaaaaaaaaatttttttttt

SEQ ID NO: 21610 - DNA, 1263 bp, Heterodera glycines
gctggtctatttactactaaagaaacaaggagtttcgtttccaaaaacaaaatctccttacggtttgcaggaaggggttcgaaatttcgaccttgggggtaacttttgacggcgcattcaggaaaactatagattttccgatccgagggccaactgagcgccaggcgccgaaaagtcacttttttcgaagcagtttttgcagtttttgggattcaaaaattttttaaaggcctaaatgaaaaatcggcctcgataggattttaagttggacttttttggattttttttgtttcttgaccgaaccccaaggtcttgtcagtttttccgaaaaactggctaaaaattgcatacttttttgggccatttcagcgccggctgaataactcgccggggtttgaccggaggaggtcggtgtaagcggcttttttgtacagcttgacgagctctatccaaccatgttttcggatttctgaaattttcagaaattttcgagctaggccccctcgaaaattttccgtttttgaattttattattttttacagatttttccggggaaaacggagaccactttcaagcaaccgtttttcatgctctatcgattggtgtcattttcagaaaaaattttaaaaatttttttggaaatagaaaattttggttgctaggcctcaatttcagttctgtggctatatcttctcaggggttgattttagcaaaaattcatgcaagagcatttttgtagagagttttaagcccaatataatgtgctttatcgtatgtttttaccatgagtttaaaaaaagttataaaattaattgtgattttgaaactcaaaaccaaaggggggaccccatggttttgcatttcatgaaaattttttttgctcctaaattagccaaaatgcatttttatggcctaatttatggtgctgaatacgtatatacgctttattttgcgtttcagattttttggaaggtggttacaaatttttgaaaaatcgtctaaatttgagccccggaaaatccagtgaaatttcgaaaattcataactgtcttcgtttttggtcaaatttagtggaataaagtttgaaaaatagcaaaaaattaggagaattttatgagatttatttggaatttctatcttccaaaataaaaaagtattccagaatttctgggaaaattcgatttttcaaaaaaaaaatcagaactcctttctgaaaaagtattttataaaaataatatactcaaaaaatccgcaattttttg

SEQ ID NO: 21611 - DNA, 1141 bp, Heterodera glycines
  unsure (1)..(1141): unsure at all n locations
catttttgaaaaaatttcaaaattttccggaaataggaaaaattttttggcctgaccgggacatttcagtccggggcntatanctcgtcaggtgtgattttagcgaaaatcgtccaagagctttttgtagagaatntcgagctctatctaatgtgctttatccggtatttttatctntaatataaaaaaagatataaaataaaaatgaatttttaaatgcaaaaccaaaggggggaccccatggttttgcatttcgtgagaaatttttttgctcctaaaattgccaaaaaatacttttctggggtaatttgaggtgctgaacacgaatatgcactttatattgcgttttggattttttggagggaggtaaaaaaattttgaaaaatcaataatttttggcccttgaaaattcaacctaaattttaaaaatttataactcgcctcaaaatggtccaattcagctcatttaaagcataaaaaatagcaaaaaatcgggagaattttatgagatttatttgaaatttataccacaaaaacaaaaaaagttattccaaaaattctggaaattttctatttttcagaaaaaagtttatatctcggttctgaaaagtcattagagaagagtaaaatactacaaaaatccgcaattttttgcttattatataaattttattttcggtttttcaatttttattcatttaaaatatttttaattttattaataataaataaaaatttttcatttgaattaaattattttttggtgaaaattttattaaaaataatttttaaattttgaataaaaaattaaagaatatcatgtttcaatttaaattgaatttgtaaaaaataaaatttaaactgatgcacctattctaatcacttttgtacctcttcccccgtggttgtacctcttctaatcactttgtacctcccgtggttgtaactctcaagcattcgatttttaaccttattttttaataaatacatttccttattttatttaattttgaataatgttgtcctgtttcaataatgttgtacctcttcccccgtggttgtacctcttctaatcacttttgtaccttttttaatcacagttgtacctcttctgatcactgttgtacctcttctaatcact

SEQ ID NO: 21612 - DNA, 1851 bp, Heterodera glycines
cgggcaggtttgaggtgagaagctgggcattgagttggtctcgtcgtttgccgacgtcgccgtagcggtctcgtagaatgctcacgactgtgctgtaattggcgtctgacggtgggtaaccttcaatcatccgtcgtggtggcgatcccttctcgaggtactgtaggaggaggaggtgcttttggaaggcggggtattggcgtgagtggacggcaaagtcaaaggcggcccaaaatgtgatccattcttctgccgatccgctgaacctcgggatttcgattcggctgacccgaagtgcgtcgtcgtcattggtcgactgtcggaagtggccatggtgaggttccgatcgatgggtggggcgattcgatgctcggggaaatgtgagattaagcgggaatgccggggttcgctggttgaataggttttgatcggctcgagccgaattggaaggctgccgtgcgtttgcttgctgtgcctgagccggtgggtcggtggattgccgttggcggtggatccggttttcgtcgtcggccccgtgatcagaaacacgactgctgctgcgagaagagatggcgtccgtcgtgtcgaatcgagcctcgatgtagacttggaggccgtcgaggatgagctgggctttagagagaagagtgatgatcggccattcttcgacatttgggtcggcttgctcgtcgtcgaaggtcgggagtgcggccaggaggtcctcctccgcctgcttcagaaacgggtcgcctagccgctgaatgtggtcaaaacattcctgtagcatgccattgacacggtcgatgcttctctgtagcaattgtcggtcagttcgtacgcccttggcgagtttggtctcctcggcgagcgggatttcctctggcgccatcctggtgaattcagtgagcctcccgaccctttgtcggaggcgcttgacgaggtccgaaagggttcggacttcggcggtgagacgttgacgaatgagttccgacatttccgaaagtctaggattggcggcttgacgcaagagtcgggcttggttggtcgagagcctagagaaggcggctgtcggttggtgggttgagtggagattagccgagagcccgagagggacggctgacgataagagttgagtggtgaaagccgggagcctaaagggtcggcttaaaaggacggctgacgactcaattgagggcttgtcggaagcctaaaggggggctggcgacaaagagttgagtgatgaaagccgggagcctgaaagggcggctggcggctgggagaagagtgatgaatggtcgaaagcctgaaatgggcggctgacgactcggtgagggtttgtcgggagcctaaagggcggctggcgacttgagttgagtgatgagtgccggaggcctaagatggtcgtcggacagcgaagggttgagttgccgggagcctaaagggtcggctggcggcagagagaagagtgacggatggtcgaaagtgaattgaagggcgaagggttcgtggtcccgggtcgtggcaccagaaagtttgtcgaggaaggggggacaaactgggggagggattgggtaggaggggattcgagactcgctcacaagagcggcgacgcagattggcgatggagaaggcgagagaaagggtgtgccgctcgttcgattttgggggggtttctcgccgtctgtgtccacatttcccgtgtttcccgacccctacccaaaggcacctctttcaacaacaatttatttgaagcaaaaaaaaaggggggaggaggcggttaggattaaaaaattgacgcagagcaaggcaacggttgaagaaaggagaagtgattatatgatgtggaagtga

SEQ ID NO: 21613 - DNA, 2791 bp, Heterodera glycines
ttgcaggcgacgctgagagtgatgctaaagaggaggaatattctaataagctaattaggtgactaactaaatttttaattaccgtgtcgaataggcaattgtgccgtttcggtcgataaataaatttaaattcggtgcaatcacttcgtggaaacgactggtgcgagaattggcaaaataaaggtcaggcagcctttaatgagcacaaattatgggatgtatttttaattttgaatgttaccaaatgtaatggcgaatttttgggtcattcaaaaggacaaaatcactgtccgaatgggccaatgaggggtcttgccagctcagatagaggtacaaatcggcatcaaaactctgtgaattgctcgggattaatttaatactcgcattaataagtgccaaaatttgccatttccgccgccttaaaattgcccagtgattcgatgtaaatgccacaaaaaacttccagccgttcatttcccaacgaaggcggcaatttcggatttcgctgcagtctttcgcgcaatgaacggcccaaagaaaaagtgctaaattaaaaatttaaaacgaattaattaatctattaaaaaggtaccataaagccaaatgttcgaataaaatgaacagaaaagcataaggaggcaattgcatgagagaatgaagaaaaacaaatgtgaacaaataatacaaaatattatttaattaaataaaatattttttgctaaaaaaataataattttttaaagtttttaaaaaaacttttttttattcgtgccgtttcgtccgaatgcttcagtttatttattccatttttgcatttttgcccgaattttttgaatttctccccggagagaaattttgatggcatttgaaagcccaaactttgaaaaacattgcttttatttttgttgtgtgctcgtaattctgtgggatgtccgtcccatgggattttttttgttggatctttcagagaaaaaaaaacagacgaaatgcacttgccatttgaaaagaaaatttatttagtcgagtaaaatttgagaaaaaaacatttacttttaaaataaattaaatcgaacaaaaaaaagtcaaatagagattaaattgagaaggaattgtcacggaaaattgacaaagcaattttgttttgttttattttaaaaataaaattgaaatcgaaatttttttaatgattttgtgttggcataagcaaaaatattttagttttttgttttaaattattgactttcttttattttctttttcctttacgcccattgtttttgaaggcgccggggcgaaaagaacaaaacaaagcgatgaatccttttgtgccaaaactttgttctcgcaaatttaattatggcacataataataaaacatttttcggctgaaaatacaaataaattaataaattcgaatgtttatttgctcataaatttgttcatgattaaaaaatgctcttatttgttagctatcattttcagcacctcagaaaccctataaaagggggtttaagcattttgagtttgccaatagagaacaaacaatggaaaataaagacggacgctttttaagttcgcagtatttcctttgtttttgcccccgagggaaggtgccaaagctctccaatatctttttaatttctgctcaaaagtccattatggcatttttagacaatatctattaaaaaactactagaattgcaaaaatttcatcggtggcgcttaatatttggcggaaattttcagattttcatgttggccattataggaaaagaaatattgataagttaatgatttgaaattggttttcggattgacataattttttgggttatttttttttttaaagacaaacaaaagttgttcaatgatttggaacatttttatatcgaaaatgagtgaagtgtgaataaaaagaggcttttcttctgttaaaatgcttcttcattcagtggtcgtcgtttcattttcacttcgatggttttttcttttggccaaaagtcactgaaaatgaaagggaaaaaccaccggcggaaaagcaccgatcagaagggggggggggaattgaagtgatcggagagccaaaaacaaacgcatcttttgatcgtccgtccgtccctttcctatgaatttgccagctgaaccaaatcgggcgatttattgccatagctgttatttttaatgtttctgatgatttagaaatgaaaggttgtataaaaaagtcgaattaataaaataaaataatttttattttattcattttaatgtttttatttgtcatccgttttattgcgttttaatgcattttaaattattctgtgtaattcaatgccattgccatttgataggccataaaatattgttaatttttgttcgtttttttgccttttcttcattttatcttttttttcattttccttcaaatgttcgtcccgtggaacgaaaataaaaataaaatgaaaaataaattattcgatgtgagaagggcttcagatttaaagtcataattaattgcatcttttaattagaaattattaattcccctgggcatataaatcaaatacaaattaaaacgggactgataagaatcgccactacagaacagacggactcatcagtaacggacaaacgaatcataacgaatcatcttattttaattggctataaaaatgaattaataattgaattgaacaatcagattaaattaataatttattataataataatttgaccttttattttataattcccaaatataaaatttcattgaaaatttatatttataatttt

SEQ ID NO: 21614 - DNA, 977 bp, Heterodera glycines
  unsure (1)..(977): unsure at all n locations
ttatcgaaattttaaaattntggaaaaatcgagctcattcgagctctacaataagtccgctggcgaccccctgctccgagcaaactcttacgagctattcgcctggtactgaagtgtccaaaaaaagtgattcttacgttgcctaacctacaggtcaggcctttgatctgatcaaaaattttttgctggcaaagttgtaggccatagttggggcatttcgcttttggggtccgctaagctcagaaagcaaaagcaaaaaatttcgtaacactgagactggcggcaaagtcggtttttgagccgctggtactcagttggcccttggaccggaaaacctatatttttcccggatgcgcctcaaaaagttgtaagacctttccactactttcagggcgctcccggccttcggccgggagattttgtttttgcaaacgaaactccttgtcaatataacatatatagtaattaatcgattttattaataggttcagtaattgtaaaaatttgatttcagcaaaattactgatatttaaaatgattttaaaataacgattccgcaaaatttaattttattatagagctcgggactaaattacatctcttctttttatttatgttaatttcaaaaatttaccctttttgtatttattgtattttatgaaaatttatttctacgaatatattctcacatgtaaatgttttctctctatatatatttttcctttataccttattagcatgttctattttatctttgtttcaatgtactcggaaaagtacccatcctcgacttcgaacttataagttaaatttttagctatttcggtgtcatctgctttttaagtaaaaggtgatattattaatttttatttttacaaagattattttaatttcattataggttctttttgtatattaaaattgttccactaagaacatactaagaattataatatttaaatatttatcatttttat

SEQ ID NO: 21615 - DNA, 1306 bp, Heterodera glycines
  unsure (1)..(1306): unsure at all n locations
tactaagtattataatatttaaatatttatcatttttattataaaaaaatcttttttaaataaataatattaacccaaattttttcatttattatgttgttgttgttttataatttttccatagttcagctgattaaatagtttataaagtaatgatttatttattttattcaaagctcggatgaacattcttttcttcgttagaaatattaatttttttattaattatcatatatttgattaattattgttattcgttacaattttataaaattcattttgggctctatttttatacattgtttattagttttatcatgagggttcggaaatagcatggatataaaatctcaaaatattgccataaaatatggagtaaaaatcgcaaaatatggacttatttgaaatatttcaacctagaccttttaatgagatttttctactatttattcaacataaaaactttacaaacatcgcgaaatatgcacatacaaaatgtaaaataagcatattttccaaattgaagaacattttgcataattcttcaaattggataaatttaagctaaaaactctataataggtaaatatgatatgaaaaatttgttaataattaaaaaaaaacaaaattaagaacatttaaagaaattcgaataaaaacgaataatttttgagctcaaaatggcgtctttatataggaatttttgaaaaatgcaacattaaaaatatgcatgttcatttaattgatagcattactaaaattagtcacataaaacggtttaaaaattctaatgttttcattttttattatttgacattttttcaataataaatttttttaaatcattttttttatttgtttcaatgtttaataaaatttttattttgcttatttgatatgacaaaaaatgtactgcaaattctatttttttatttatttattcgtgacttgttcccgtttttaagaagtcttatctaacttattcaatataatatttgtatttattttcttgttttacaataaaatttccagcaccagaaaacaaaaatttaatttattttttgttttattttttcaatattaaaatatattttaagttttatttttttaatatttaaaatcttttattcatatttattaaatattttgattcagttctcagttccagtgccgagtgctttgttatacaatcgaacgtttttacatgtaatattttgctgtttaattcaaaaacgtgttttaatgtatggacagttttataaagggggaaaatgcattttttttcaattgnttattattgcgtttt

SEQ ID NO: 21616 - DNA, 2297 bp, Heterodera glycines
  unsure (1)..(2297): unsure at all n locations
agtaccaaaatttcttgggtccagcctgggtttttcctttacctggatttttgtccagagctggttcaacatgaaattaggtccaggcatttttggcttaactgcaatttatgcatccaatgacttttacgcgtccaattaatgatcgtctgtattcaagaacaactttccctttcacctgagcccagagactttcaaactttaaatgttaccatgtatgtaggctttgaccaagtaaaaaatggcctaagaagctaaggatgttcattgattggacgcttaaagtccagtagagctcttagctcttttcaaagtaccgagctctactggttatactcttaaaaatgttccaaaaattcccaatttgtacagtttagttgcaaagtaaattgaagcgtgtaaatatgggtagcgaacgaagcccgacaaattgttcagcaatcgacgattcctcacagtctgtatttgatgaatctgaaatattaccggaaaacacacaaatcaacgtttcggaacgatctctttatgtggccaggtctgttttttggggttttgttgcctttttcgtcctcaatttccctctgtttagctttctttctttctgcactgtcgtccaatattcgctgtatttcgcctccatgtggccctatttcaaagctgtccgtttcctctccctctctctttctctctgtctttgtttatttccccctttctttctttagctcgatagtgaggccgacgaaggcttctccacttacatcgttgctgcttattcgctgggtcagcttatcggctcgccactctttggcttagtgtccaatcgaatgcgcaaagtgtcgtctctttcgctttttgtttttcccttcgaatagtgcccccccccctcccattgtcagattcgttacgtcctttacgttggccttcttctgatgttttttggcaatgccctttacctttctgtccacttttgtcgggaagaacggcagcgaaagtattggttatgggctgcgcgatttgtcacgggcattggctcaggtccgaattcaatttatcaatcccgatgattattcatgcgtcacgacttcgtgtgctttagctaacatttctttgctgaaagcatacgcttcgacagcgagcgtcccggagaatcggtcgaaggcaattgctttaattaccggcggagtggcgttggggcagacgattggaccaggtgaacttttagggagatcaatttggaaaatgacttctttagcattgcaatatctgttcactccctttggttctcatcctggctctgatttgccgttcggtcttaaactttcaaagtgcgtttattcgttccctttttgttatccttttctaaggtacactgctcctgctttcatggcgtgtattatgaatgtcgtcaacgcgttgtgcattaaaacgatggttaaaaactatttaaattgtacgataattcccttcttttttaagttcgttgaaaattacgttggcgttcattcttccgaaagcgaacgaaaacaagtaaaattaccagaacattgagtgaactcacaaatattaccccttttcagaagtcgaatacaaataacgacaaaatgaccaataaaaagtccaaattgcctccgtacgacaaaagggcggcgctgttgtgctacggaacacggttcacgcagatgttcgtcaactccaattttgaagcgtaagcgaattaattgctgggatgggcgggggtaattttaggggtcaattggagacaaaccaattaaaattgctataaaagtgtttgtatcccaatttatcatttcaaattcaaatttttctctgtttgattcgttaagcatcggttctccgttatccatgatgatgttcgcttggacaagtgatcaagtgctcatttacatttcccttgccgtgagtgcttttttcatcggaaggacacttttctcaataacaaatgcttttcagcaaggcattatgtctttgctcgccttcctcacttatttggtgttcatcgttaccaaaatcgacaaaatgtgcgttttccctttcatttctcacttttgcctctttcccttaaggatcaatgatcgtgccaatttgctcgcttctttgtacgtgctcctcatgttcttcttgatcacttattcatatccctttttgccggggaatgttgaaacctttcaccaccaaagtgtcacatttccattttctgttccattttttcattttcagatcactccaatcattctgagcncggttggttgtaacgcggacaaattcgattgggtttg

SEQ ID NO: 21617 - DNA, 746 bp, Heterodera glycines
ttttgaatttggccgaaaaagttttgcgcaaagccaccggaccattcattcacaccaaattgaacactgaagaatttgttcttctgcgcgcaattatttatgctcatatgggcaatgactattggataatttaaattattaaataaattaattaaattatatttattttttctttttttagtttcgcctggattaagtgatcaagcacaaaaaatattgttggccgaagcggagaaattttctacaattttaatcaacattttgcaggtgaagttcttttgaacttttctatgttatgtttaaacataaagagctctcatttgcacttatggtgggtcgaatgattgaaaaattaaaagttgaagacaaacaaaaaatttaaaagcatttaaaattgcaaaatatgtacctaaaagtagtgaaaaggttcaaaataagtgctaaatgccgtaaaacagccaaaataggcgctaaatagtatttctaggtgtacataacttgtctaatttattttaaaattgggcacaaaatcccttttttgtgtcagtcatacatattttttaccgaaaaataattatgatagctccggtttttgagagtgttaataaaatgtccaaaatggttacgccccctcatttgtcagattaattggcataattcttatggcacaacatttagcattttcctcgtcagcggcctcattttcctcccttttggcattttcatatggcatcttagcattcctt

SEQ ID NO: 21618 - DNA, 1168 bp, Heterodera glycines
  unsure (1)..(1168): unsure at all n locations
tgactgacacaaaactaatatcncaatgcattcaacaaaaccttaggcctccatgacacttagttcattatctaaattttgaaaaacaattatatatggaaaaactaaatcacagtctcagccacaaatacaaattttagctcaccttttacataattctgagtacaaaaggcaattactttaacttcttcagaaatgctacaccctatgatgaatggccgaccggcagttagtgtggaatgataatattgccgaagcggtagagcagaaactttaaacttgttgaaatttattttaattaatcacttcaattttggctaaatcagaaaaattagacaaaaaaacaaagatctaataacaattaaacattaagcctaagcagcgcataatatttcacgcaaggaacacaaaaaccaaataaacaaacaaacaaactgaaaaataacaaccactaaatcaaatttaaaaaatatactgataaaaagaaaaacatttttttcgttcacaaaacaaattcatatgttaataacaaatatctttataaaccatgacatatataaaaaaacaaataaaataggtacatttttaagaatgtttattgcaaaacaaattgaaaaatcaaaaccaaaacatttccaattttcaaatgcatttttaacgcaaaacaacaaaacgccacgccaattcaaacgatggcagcatacaaacactcaactttattatataagtgtttaaagacaattctatagtgtttatagtgtttgtacgctcttacttttgcttttagttttttgttttcgaaaattaaagaaaaagcgcttttattttacaataatttttttgcttgaaaaaatcatttaattaattttttcttttggaaaaatctcgtttatatatggcccatttgcaataaaaatttcggcccgaccattccgtaaaaataacaatcaaattttgattaatttttcgaaaaaaatctagtgttttagggcgtttcgttctcgtctcgtattttcttttgtttgtctcgtttttctcgtatttttttttatatttgactttaaatggtttgtaaccattttgcgatttacgaaatatttgaattttccaaaccattttctgtttgaaaagtattttattgaaagggaagtaattactaattagtctt

SEQ ID NO: 21619 - DNA, 2260 bp, Heterodera glycines
aaaagcagttcaattttcaattaattttatttcaatttcttctacatatattttttgtaaagtaaatagtatcaaaattttaatttattttgattacgttaaattactcctaaaaattttttgtttgagacatggacaaattttatttaaaaaattacaaaaatttttgattcctttttaaatgctgccaacataagaaggcctcaaaaaagttgagaattcgcatctgctaaagcctagactggatttgctgcccaaccaaaactggtacaatgatggcttggactaagttatttcggggtggacttgccaagttccttccgcctttgcgcatgggcactggttcactttgtcgtcaattttttttgtgcatggcaatgtcggattgttcgggtcgggagtgccgccaatgcgcatttccacttcggccaacagattgcggatgggccgcagaatttcgacgccctccgccttgattttcacacagcccgggatcaccggattttttggcaccagtcgaattttctccggattaaaccgtatcaacggccggtatttgctcagctcaatgccccttctagagaggtaaactgaacgatgggaggtgatgaggtgaagcatctgatcactgttttagctagattagtgcttgaaaaatgtaaaaaaggcacaattttatttgggttttgcatctttgcaaacctttctgagttttagtgagcaaatagagcttgttaagtaagagccgttaaaagatacgaaaattttggatttgatcaagaaaattaaaataattatggcttttttaaataaataattttccgagtttttcaaagacttattttgctatcaaaaatttgaagctaaagatttttcttcactaccttttcagcacctaagctttgcaaactcataaatgaagcttttacattaaaagaagataattgctcacttggactacacgcgccggaaacccgaatgtccacctcggcacggtcctcggttcgaacatggccacaaaacaaagccaatccgagtgtcacaaagctgtacaacatataccaaccgtaacaacttagcctgatgcttcttcggtcgtctgtcgtaatcttcattatcttttagagtgaatttgatttggtttgctttgcttttctcccaccagcgatcgatcggagcgatttggggtgattttctgggaaggggaagagatgaagggaatgattgaatgtgcgctttttgtgttccgttgttcgggcgagatttgtggtggggagagaggcgcgcttttttgggattttattgctggacgagagtcgcaatgcgcattagggggatatttggttgtgaaatggatataagtgaattctgttgatcccagcgagcgagagttggctgatgcgcgatgaatgcacgagaaaccaaataaatgaattagttgaccaaatgatagtggtggttccgttaattgccggaaatgacaattgcggattaaggcgagagagtgtaattagtgttaattattgataacaatcggatctatagagactgactaaaattattattatttgatctctaaattcttgactgaaatagtcatcgagttcattttgcgggtaattaactcaatcagtggttgccggatcggtggttaccagcaggagatcggctaatgatcaattagtgtatgaaaatgttttttggttgcaaccggatatactggatttgagaaaacgatcaatgcactgacacagatcaacaatcaccacaccattttcacattaccttatccccccacgtttgttctatctctaatgaatccaatattaatattccgtgatccgcccgactggtgctgctgctgatcggacgatgtggaagcgatgaaattcaaccaattgccaccccaattggagacaggatgttgcgcgacacacaaaaaccaccccgctgcgcccgtccgtcagtcgtcaaatgatcaatattcgaaattcccaaatcctcctcgcttccacaatccattcaccaatattcataaattttgaaaaaaaaaaacccgctgatccataacaatttttggtgttataagcaaagcaaaattagttgaaagaatgatgggagcaattgagaagatagaccattaaggatttaggacttgaggtggataaatccggtcataaagaaggacagtagtgctatgtcgttgtttaaaaaaccaacaatatgatttgatgaaaaattatttataacttagctcaaa

SEQ ID NO: 21620 - DNA, 2098 bp, Heterodera glycines
gaaacaaagcaacaaaaacatagttttttgaaaaacaacaacctattgacactttattttaatttcaacaccttatggtttttttcggtttatagcgcatattttcggttttttaatcattttaatagtttttttaagtttttagaacagttcatattttgatttttgcacataaatcgaagttttataaacttaaaattaaattacttaataatgacatccaaaaatgatgtcacttttcttcaaaaatctccttcaatgagcgatatgaagccccttcgacttcgtagaccaagcattgtcagcaccagcagaagcggacttgggaatttgggagtggtaaaatacaaaatattacaaaaaaatatatatttaaaattatttttaatttatttcattatgatattttacctcttcattagagtttcgaatgttgagtctgtcaacataactacaagtataatgtaaggattgttttcagcaatgtttgaaatcccgacaccgaactttttggttattttttagggttatttccgacctcgagactttttttaaagacgggcttctacaaattaaacattaaaatgtttttaaattccttaataattgaaaattaataatgtgaagctttcctttttttaattaaagatttatctatggatctgggattaattacccagtaattagattaagccattaattaatggttattaattacattaagccattaactcgtcatctatcgattgaaccaccggccaatttggctgatgccttgggaatgcacaatccaaattgggctttttatcactacagttcgcccaattatcggtcagcgtggccatggcgaatgttccgtgaccgtttcgatgtaagaagcaattggcaaaaatgcaaaaccaaattaaatgcattttttgacaaaaaatcgtcataattttctcgaaagtaatcaaaaaatcactatatttttctattaacctaataaatttatgaaaataaattattttttattaaaattattttaatttgcttaaatttttaattttactttttactttattaatgaattaattaattaaattacaaattttatatagtgtgaacaaatcatgtacaataagcacttctctgtgcagcccatctacagaaatgtgccattgaatgtgccatcgcacagaacgtaaaaaatatttttaaaaaatgaataaatttcttatttagcaatttttccaaccaccaaagagctgggtattggtcatttgactacgattatatgtaaattatatttataatgaatatttgtttagttaattaattaatggaaccacattaaattaataaaaatttattaacatttttgttttttttgggtttgtaagacatctgtttttttggatttgtaggaactacgataatatgtaaatattgtaaataatatatatatttagtgaagccaatttatatcaattacatttataatttaaattcaaaaaataaaaataaaatttataaaattttacaaatctttttttcatcatccgtttcattcttccgattctccaaattgtttcctccatcttgaaacggtacttggaccaattttcaatgttttggcaatttccttttcactcatttttggattttctcttttcaataaattttcatttgtcccattttttcttcatccgttattcatttacatctttttgtacaattgtgagtttttcttcatcagtttttgatttgtatttttgaagaccaaattctttaatccatttttgaatatattgtcgatttgtccaaatttttttgctatttttacttcaattttactccattcttttgttgaatattttcttcctttttgcttaattttctcttttattttgtagaattttccaataatttatctttttttcttctcatttcgttgttttatatctttttcttcccattttctccaaatatttcatcaaatgttttctgttgcaattttttatccactgattcaacataattaatattaattaagacgatcaaaaaaataattaaagtgaataataggcatagtttcatattaattctttgattggtt

SEQ ID NO: 21621 - DNA, 981 bp, Heterodera glycines
  unsure (1)..(981): unsure at all n locations
aaagcaaataaataaaataaataaataaaatttaaaaaactctcccaagcaaagtaaattttcgcggnattttcagcccgaccctgcccttttcggcattttggtccaattcttcgagacgcctttgaacctcgaaaaattcaaagaattttctgcaaaagaaggcccactttttgagttcacaaaaaaggtcaaacattctctgggcttgggtggacagaagtgggacgcgcttagggaaaggccgtggcaattgaactttgacactgatcacattttcaacttcaccgccgactcttctgcatacaacggtaggtgggcagaaaatacggtaaaacaatggtgaaatgttacggtaaataaaaaaggaatatgtaaagcatggggaaatgttacgatgagtaaacaaaggaatacggtaaagcaatagtgaaatgaattatggtaaagcattggaaaacgtttcgataaataaaccaacgaatttattaaaaccaattgtatgtatttgtaaattaaatttttattgccttaaggtccatataagcttgaagtggatgacggtttgcaaaacatttacaaatgcatcagctccgataattcttcacttctcaccatttctgccgcgtgcactgaccaaattctgccggaggttttaatgtccgcgaaagcgttgctgaacattgtcaacaaacggaataacaaatcatcaacagaggcaagtcacacagagaggaaggagtagtgaactcgagacggaaaatccaacccaaggcaaaaattcccaaaatttaagacttggtcttgaaaatcttcgtcaagatttcgcaaatttcctcaatatgccaaactttcggctttttcatgactcattgcgtgaaatgcaattgctccccccccccactggccaggggcgtagctagaaacattttcggggggggggcgaccctttttttttgctcttcactcaataattttttt

SEQ ID NO: 21622 - DNA, 812 bp, Heterodera glycines
ccccccccccctagatcgccttgcacctggaagggaggggggggggggggggtgtggagtcacgcagaattttacaagacaaaaaaacagttggtcctcacgcgccccgccccttttttagtcgaattttttatttttgttttactccatttacagatgtacaagcaacacgcgcaagcactgttttccgttttgtcctcctttttgtgcagtgttggcacgaaagggacagaaaaaagtgactgcaaaacgacgcatttggacaatgcaaggcaaatgtacaagcaaatgggggtgagtgagcatcgttcgaaaaggccgatgaattaattggtttcaaataaccattatttttcttgctataaattttttaaaccctataacattgtttaaatagcttaactacattttttatggtattgctggctgaatgtttgccttatagcttcatagtttcaaaaaaaaattagaaaccaaaatgaagttaaaaaacggcgccgccgaatttaacaaataaatccacaaaatagctttctttttacgattgcttcaggtgaccgacgagcagaagattaagtcggatatgcttcttgcgcgtcggacagtgttcaatacgatcattgcgtacaacgacgccaaaactggcgaggcagtgcacgcggcgattgtggcagtccgtgctgtgattagtggcggaggggacgcggcaaacgcggccgtcagctcgagcgagttgaccaacgagtactaatcggttggcaggacgtatactgaagatcagctgacagagcgatcggccgagtgtttgcggt

SEQ ID NO: 21623 - DNA, 2080 bp, Heterodera glycines
actcgtcgctgaaatttcgtcgccattcccaatttttccattcatttaaaataacaattttttttatttggttcgttcttattttgtttaagtattcaaacaattaaggcaaattattttcctaataaaagtcataaaagtccaatatattcctgatcactttgttaattgagcagaattaaacaaataattcaaattttgggattttctatttgcgttgttcttcttccgttgcggcaatttctcgccccgccggtgactgtcgcgcgccgatttttgagccaatttggatcagatgtcttttggcatttgtgtagatcaaaaatgccttagatattccgatggacaattttcggtaaccaaatgcgcagtatttgaacagttccacgcaaataaaataaatgttctgggcgatggagtacagaaccatggacagatctctgagcaactcgaaactgaatacctaaacaatttaattgttttacgaaggattaactcagtttatataaaccgcaagtttggcgggcacggagtgtttgaaaatttgcactgccgtcgatgggtacgactgaacacgctcaacccaagtggcgcgttcccaaaggccaagtccgcgacgttcggcaacctaaaaaatgaaacaatttgttaaatcggcacataaaagcaccttctcacaggtcaacagcctggtgatcagtcgggaataattcgtgttgaattggagcgactctctgtgccaatggttgtcgagagttggcgtacgagcgaaacccttgcggatgagttcggtgttgaggttaacgtgacggatagcatgaaaaggaaggaaattgtttaattcgacattataattttgcaggaatattttaaaaaaacttttttttttttttttctacaactttttttgcggtaacgtccgcttccacaatgtccggttccgtttgtgctaattttatcacagaaaatttcacaaatcgtcctttcaattgcatttccttctgcaaatattcaattccaacaggggataattcaattccagccaagcgaagattcaaatttccaccctaaaacggcaaaataaactgaaaaaaacaatcgacgaacgaaatttaaaaaaaggtttaaaaataactaaatcaagtttatgcaagtggactaagttttctgcagggaaagtttgagcacagcaccaaattaaagaattaaaatgaaaatattttaaatgtataaaatgcaatatgccttaggccccggaattttttcggaagaaaaccggattcggtgaatgtatagtttactggtcccacaaaaagaggctgttttgaacaattctaggatttttactattttttgaaaaatgtaaaggcggcaaagcacacacactataattataaccgtttagtcaaccactaaactattctttaaaaaattcttaccactttcgattttttggtaccaaaaagtctaggaatacgaattgctggtcgatgttccactttgattatgccatttgactccaaatcgcgcacaattcctttcataattattcctttctgataataatcttgcggtatttgcttcacgtggttaaaagctgcaaactaaatttttaaaaaaataatgcatagaaaaactgcttacctaacttattgcatttcaaaaaacttgttgaagaatacctaccaattttgaatttcgaatgaaaagtcctaatccaagcgcacccgttccaactatcagcccctaaatgaatagcctatttattagaggtttgtaagcattaacattgaggattaacttacacgaactattaatgctgaataacgatcgaccgggtcaaccattctcaatcgagtcgcatcatcggcggaagtgatgccatcatttgcatttgttgaaggcattgggtttttaaaaagtgcaattttaaagtacctacgtttaaaataaataaaggtaaactcaatataaaatttaattttggatgattgatgaataggattagtagggctggcaaaaatatgcacatgcatctgggagggctggactgtgggaggcctgaaacgcacgaaaacca

SEQ ID NO: 21624 - DNA, 2174 bp, Heterodera glycines
  unsure (1)..(2174): unsure at all n locations
tcacggaaaatgcattnnagagttctgtgcnagtgagtatttcttttaatcattttaatttttgaaatattcaaaaaataataaacattttccaaaatccattaaaaacaaacataatatgaatggattactgtaggtttatgaccatttaaaatcagcttaaatttaaagtcagcatataataaaccatttcgtttttcatgaaaattctgattcgctgacgcattttccattgatccattttccatccgtttttactcaactcttcaccgcacacaaccatcaaatttacttctggtaaagttttctccccttttcttttgcagcaaaaatattctacctgttcagaaattgtttttgggaccattccttcggtgtccaagatgtacaagtatttcgcgtcatcatcaaacgacgcggacacatcgcgatcgtgccgccggcggtgtttcgtcccgcgtctctgcctctttgcatgtccactgctttttcatggtcctcgggggtgtcaaaaaattccggtggtggtattggtgcccctccgctgctgccctccccggatggcatttgtgctgaatcgtcggtgctcattctgtcggaaacttcaaaaaaatgcttaattttcttagaggaatttggaccaattttcgacaattccaaagtcactatatgcttgtggcttgtttaaaacacatttaataaacagcatttattacagtatttaagacaaaaataaccgcaatattttgctaaatgaatatgcatagaaattgacattcatcaatcacatcatcatcaatcatcgtcggttcgtcccttcattgggcatcctttcccttgcgccatccagctttggctgcgtaaatgtgatccgtcattttcttgcaattttccttgaagctctcttcctcatcaatgcgtccatcgctgcagcacaccacccgtccctcactgtgctggccaaacgatgcgtaaaacactgcttggccgtagaatgggtagaagcaattgttctcggcaaagtaggcgttctgctccagccagcttcgcttgttcaactaaaatatgaaaattcaaaaaaaaatattttttttttccaaaaaatgtcatcattattcgtcgtaattcattttatttaccacgccattcgtttggtcgatcatctccggttggcattttgtggtttgttgggtcccattgttgaagccacggttgtgttcacggatgtcacggacgaagcaagcgcgcagatagcgaagcatccgatgcaatttgatgtccttggaaaatgagacacgctgcaacatgaacggaatgtccgaacggcagccttgctgtagcaaaaaaatgggacaaaatcaaaattgtttaacagtatagcaacataattatatatggggttctaactaatgcattcccggggctcgaaattggtcgaaatggatgcccgtgattagggaccccgaaaaccctcggaaataagttttcatgacttttaagtctgaagaagttagacggatttaatgcctttgaatgataccaaaattgtagctaaatagctgtattaacacatgaaacaaagtcacaacggtcaacaaaacccaaagtaatttgactcataacaaaaatgattggactcttttgcgattggattaattgagagtgcattcattcattagtcagtcattagaggagcaacaaaaacaaaaagcacacagcaccagagcagcattgagaccgacgagatgggagctgctgctccggcttctgtccacactcaacattcgattcgggaagaagttgctgtcgctgtctttcggtggatacatgaagaaacagcctggaaagagggggaacataaatatttaattaggtaatagtgatgttgaaatgaaagcaccagggtttgaacagttcttcatcccatgcttgttgtcatcggacaacatgcgcagatcccggtacaaattgatggtgatccgacattccgtgcggtgatgacggtggtcgtccgttgatccgtgctcgtcatgctgagccgtgccgccgatgaagaaaacgggcgtgaacataaggagaagaagaaaacggacattggccatagcttttatgtgaactgtaaaaagaggcacaaaacattattaatttgacgaaatttaatgagatgaaaatga

SEQ ID NO: 21625 - DNA, 1835 bp, Heterodera glycines
ttcgaattactcccgctcccgcccgggactcccgttccccccggatgggattttaacgggagcgggatttttacgggaatcccgttcgggactcccgtcccggaaaattttgaactcccgatcccgctcccggaaatttttttttaccgtactctagtatttagggagttagagttaagtaagtaaaaatggtcattttagaggtaggtatttttgatggctgatttaaagaaaaataaaagagatacagatccagagaaatagtgattaaatagagcaaagttaggactataagaacacaaaaatataaaattttaattacaaaaattgaattattggagagccgagactgaaaggggtctccaaaaacggcatttttcaagaccaccaagtaacataatgttttaaaagtggttttggaaattctgaatttaattaaacaaggtaaatcgggtatgttgagttcgaatatggtcttagatttggtctctgggatcgcaacaaacctgtatctcgaacttcatgcatggagttgagcagtacaagctcaggtttaaaagataggtcccgtttaaggccatattcgaattctactggtctaaattgtatagaaaaactaagattttgttatatcagctttggtttttgaccataaaaaattcgagaaaaattagtgggccaattttcaattttggcatggtcgggaaaaaatgcagaaaaatgtatcaatcaaataaaaagtgaaacgatagtaagatataaaagagggcaccatgaagaacaaaataaaaaaagaatcatttaaataggcgcagaaataacggagttttgaatttttaaaaattggaaaaaatttgggtatcaaaaattatgttccaccctaagtatatactttgaatcacatttaaaatatcaaaatcaaatttattagacattttgttatcaaataaatatatacattttaaaatgataattaaaaaaaaatttatttttaagttaaataaaaataatgaaaaaaatcattaaataaagtaattttcaagtggacccatattcaatttttgtcaactgcgagagaatgcgaaaatttaaacgtttagagattaaaaaaaaacaataaatttataatcaaaataaatacagcaataaacttactattttacaaactaagtataaaataaaaataatagttcttcaacggaattaacaaaaatagagaattggtgcaatgacctgctgctggggaattacatcagtaataaaatagagtccggactttaaggcaaaaaaaaaattttcaaataggcacctaaaatgaaagacaaatataatagtactcacaatttctctagcttttataatgttgcattaataatacaagcatacatatgcaaaaactaaatatagcttctgaattaaatatgaacataacaagattttcttcaaatcactacatgtaatctggacagtataaaaatgaaaatgaaaactttatcaaatttaaatggtaaactaataaaaattaaagaaaaatttattgtgacattaattaaaaacaaatttataaaaaaaacatttgaaaggttattgaaaagggttaattgaaaaaattcttattcatttcagaatatctcgacaaaaaaagaacggtgtaaatttcgcccaatttattccattacttgaaatcactcttaaaagtaaaagcattcataaagttttacatctccccattaaagtaaataaaaaaaactttgtaattgatattgaaatcaagcaacatttacatgatttaattaatgaattaattaataaaaattaaatttaaaaaattaata

SEQ ID NO: 21626 - DNA, 2041 bp, Heterodera glycines
gcttaagcccaaaggtaaacgcttcgttttttaatcatttttataacgaatataagccattttaattgtgtcattatttattttttctaattgatccatcaaattgatttatttatcgataattgcagagatggaaatttacaaaagcctctcattttagaaaattaattcacataacgtccaacagatgactaattttgtgatttttagctgtaatttcttaaaataaaatgaaatttttccaatttgtttaacaaatttactttccaagaattataaattttaagtatgagaaagccttaaaaaacgaaaaattccgatcattgcctcatttttcattactacgtcggtatatgcctcttgaataattcatagccggaaatactaaaaagcaataatttgaaatgccaaaaattgtccaaaatatggatattttttaaactttctcacaatcaatgatccttttatatgaaattttatagaaattttgttttaaataaatttgaaaattttttatttcggcgaaatttttcatttttaaattttttagcatagtttttttgttcaaaagtcactcttttgcgaaaattgggttgataaaatgtgtttaagtgcctaaaacttacctgaaaaaaacaaacaataaatcccagccatggctataagatttcactaattatttattaatttacctataaatttttactgaaataaaattgaaatgatgatttatgcatatgcaatttcttttgttattcatcatttcttattgtcattttcaaatgcagtgccatcagtgagtttctcaacagaagtaattaattggggtaattaactcatgctaattaggttgacgacagcgcactaattgcatttatgaaaagcgatcaaaaaggaagtcaaaccaatgactataaatattcaatccaaaaatatgaggcccatcttggcattctgcattttatggtgaagaattggcactgtgacaaaatgggagaccaatttgagggtatgggacaactcagtctaatgccaactccgtcccaatgcttatggcaaacattgaaatatttaaaattttgtttttaacattactatttaatagtgatgctcgagagtcttggcttcgagaaaccatcgggttttttgggtcacggcttcgagtctcggggtcgactctgttcggtctcgagcatgactattatttaaacatatttttggaggaaaattaaattcaagaaattttaaaaatttatatttaaaaataaaggcattcttaaaataatttttacaactttgcatttttgcccgccaaaaattctcaaaaatagcattttttttttgcataattttacaaaaaattttcccaggacccacagtacaaaatttttcaagagcgagactttcaaggacgcggaaaacgcgtccttatatattttgggatggtcttgaccagactgaggtgacccaacttgggaatttggagactttgaacggacagaatgccacaaatatcgccaacttttggaccttttgtacgaatatttgtaccgagaatattttgacggattgccaacagtgagaccaaaatttgtacttaaaaagcgacgagaacaatttgaaattgaagccccattaatttatgtggtgaattgcatggccagaatctcgagattttatttcaattcaaattgggccgagaattctgaatggaaattaaatgtatttttcaaatggggcaattttgacccaattttattgaatggggataaaatgaattatttttattttaatcgatcggcaaaattggacgacgacaaaatgaaagtgccaaaattggaggaggacaaaaagaaagtgccaagatgggaggaggacaaaatgaaaatgccaaaggacgacgacaaaatgaaagtgccaaagttggatggggacaaaatgaaaatgccaattaatgaacggattttgcagttggcaattgatgtggccaatcatgatcagacaaatgaaagtgtggacgaaataatgcggaaaaaattag

SEQ ID NO: 21627 - DNA, 2291 bp, Heterodera glycines
  unsure (1)..(2291): unsure at all n locations
tgaacttggcctgtgtgtcctgcaccaccaaaaccgacccttcaccatcggtgttcgcctcgcccacgtcgccgcacacaattttcacggggttgaacagcgcatggaacaccaacttttcgatcttgctcttcattgttgcactgaagtggtcaagaaaataacatttattatttaatttgtatcagttttctaacaaattgcaatgcaaatttggcttttcctgtggtgcctattagcaccccgcccgagctcacaattcgcgctctaattcccaaataaagattacataatgaatattctcactgtaaagcttctagaaaacaaggggataaagtaagtcacaaccaaatctttaaaaaaatagccgccaataacagcagaaacccaattaatacaagaaccaatccacccacctaaacacaaggcattgccgatcaggccgaatatgttccgaaattgacttcacttgcggctcttaaatgaaataaaatagaaaagcatgaaaatatgagaccgaccaaagcccaaatcgaacattcggtcgacttcgtcaaagacgagaaaagttgtacggagcaaattagtcgcctcaatttttaccaggtcaatgatacggccgggcgtacaaatgcaactgaacaaaaaaagcaaggcaattaggaaaagcaattagtaattgaaaatgaaaggaaataaaatgaaaaaacattaaattcaaaaataatgtaattaattttacagctctgctccctgctccagcgccttctgttgctcatatttcgagccaccgccgtaggcgcaaacaacagaaatgttgtacggcacgcagaatttacgcgcctcgttgtaaaccttaaattaatttttaaagaatgaaatggtgggcaatttttgaaaaattttaatcaagttttttcttaataaaatacattaaaatttcaaaaattattaccggcggacggcaccgccgggcctccattttaccatttttaacaccaaaatggcaaaanttagttttntttttttttttggcgaaaaacggctacaaattcttgttggttttttttgctctcaggcactgaaattttaatataatactggagaaaattgtccctttccgagatttttttaagttatgggcttgttcagactacgattcccgaaaatgaatgaattagcgacctgaatggccaattcccgagttggcacaaccaccaaagcgatgggaccgtcgttgggacaaagttcaggttgttccaaaatgtggcaaattactggcctaaaccgtatgaattgattactgtatgctttccaccggttaccaaatgtatgcgagcgttttgccgctgcccgttttggccaggcccaacacgtcacgtccggcgagtgcggctggcacagcctaaacatttcaaattgcctacaataccattgaaactgtgatgtttacggtatgacctgtgcttgaatttgtgtcggcttctcaaacgaagccttgcatattgacgacatcagcactttgtcgaattggaaatgcgcaaaactgacgacaggtttgggcggatcattgccgtagactcggatctgacaatggatgtaaaaatgtgccaagaaattggcaccaggatttgtagtcagaacaaatgattacgtaattcccccgcaaaaatatttaattttaaaaataattcgaggggggggggagtacaactgacatcaagcgcaattctcagttcgaacacgtcctttggactgagtgcctttatttcgccgtgttccacataaaaattcttgttgaatggcttgtacctaaaattacacaactcataaaaatgggacaaacacacaaatgttggcattatttgcactcattggctgacttactcaatgttagcatggtcaattggcggcaatgggtcgatgatcttaattcatttgaagactttagagaaaaaggaaaattctaggaagatttatgatccctggtctcgacttttcgggaatagctagtccacccctggccattcaaaatgttcttcgatcttctctggtcctagtcaattgtaagaccttcttccatgtccaaatgatgttcccgtcctcgtcatattcgtacacttcgccgtcctcttcctcgtgccgtttggcatattcgtccataaacctggacatttggtggaaccatcaagcagcagaaccaacaaacaaaatgggcacaaggttgcgaaaatgatatgaccaaccaaatcgattgactctgaaaaatttagaaatcagtcaaaaataaa

SEQ ID NO: 21628 - DNA, 1012 bp, Heterodera glycines
  unsure (1)..(1012): unsure at all n locations
aaattcatccaatcnaatggacaatgctaggctcgctcaggtattccaaaataaagcagaaaagagttattcagtttggcaatttatgggtccccagagaataattttcagaaagtatggaaaagcgcttaaggaaaattcatccaaatcagtggaaaaagattcctaggctcgctcaggtaattccaaaataaagcagaaaaaagttatttttggcaatttatgggtccccagagaataattttcagaaagtatggaaaagcgcttaaggaaaattcatccaaatcagtggaaaaagattcctaggctcgctcaggtaattccaaaataaagcagaaaaaagttatttttggcaatttatgggtccccagagaataattttcagaaagtatggaaaagcgcttaaggaaaattcatccaaatcagtggaaaaagattcctaggctcgctcaggtaattccaaaataaagcagaaaaaagttatttttggcaatttatgggtccccagagaataattttcagaaagtatggaaaagcgcttaaggaaaattcatccaaatcagtggaaaaagattcctaggctcgctcaggtaattccaaaataaagcagaaaaaagttatttttggcaatttatgggtccccagagaataattttcagaaagtatggaaaagcgcttaaggaaaattcatccaaatcagtggaaaaagattcctaggctcgctcaggtaattccaaaataaagcagaaaaaagttatttttggcaatttatgggtccccagagaataattttcagaaagtatggaaaagcgcttaaggaaaattcatccaaatcagtggaaaaagattcctaggctcgctcaggtaattccaaaataaagcagaaaaaagttatttttggcaatttatgggtccccagagaataattttcagaaagtatggaaaagcgcttatggaaaattcatccaaatcagtggaaaaagattcctaggctcgctcaggtaatttcaaa

SEQ ID NO: 21629 - DNA, 2170 bp, Heterodera glycines
aaagggatggaaaaaccaatgaattacatacgacaatcgttttcgtttcttcgagactcttaaacgagcaacgaataacaaagtaatgaagcacaatccgaccgaacgcttcgcaccgacaatgatcaacaaacaacccattctcacatcagtactcgctgaggtcgatctcgtctactccgttctcgagctcatccaactgcggaatgtccaccgaataacgaaggacaccttggacaaagaaaagagtaatttaaataatttcaattcattaagtgataatcgtcgttgtttttgctggccataatttgcagtttcaagtttcaactaacctccaagtcctccaaaaccgcgtacaaactgcgctccttcctgcgatttgtcggtgacaatttcaagtgccgcaccgaatcgtttgtaattgttagcgagccattccaataatggcgtgctggactcaatctcgtagtcagttccagtctgaaacaggtgacattcaacagtaacaatagattgttttttatttttctgctaaatgagaatataaatttggatgggtgaattacctccgggtccacaaagttcgaccggtccttctcgtcgggcttcagattaacgactttttcaccattggttgttcggaatgcgtatctgtttatgggtttgttacgctattctacttgcacttctcattgacagaacctaccttatcagatccaaattctcccaacaaatcagagtttcgatggcgcccatttccaatggctgtcagtgtttcttttaccccgtaaattgccttgttagtgtcttgggaaatctcgtcgaaaaaggcgctgatcagtttcttctccttgatgaatttaacatccgccaaagcatcggctgccaaatctatcgcttggttgaacccgttttcaccaccgtatgatatgtcgacagttttgattatttttgcctgtaattaaacaaattggaaacaaattatcccaaattttacctgtaatcgttggtcaaacattgtcggactggggcgagttcattcttaaaatcagcacttccggccaggacgaggcccaccaccgcgacttttgtcgtttttgatgaacatttcaacggccgtctccgccacttttctgacgtaattgtgtcgcttttccatgcgcaaccttgcaaatcgcagtgcagattgccctccccttccatgcttcttaggtaattcgacagagaatttgtgtagcacctccctggcatttccttgcaaagtcacaaaaagtgatccgtttccgtccatcacaataaacccgaatttgttgtcgtcagcgagtagtgctaaactttatattaatattggtttaggaggaatttgaattgccattcaatgcttcagtgtggaatttgttgtcgcatagataaagtgatgtgttcactgctttgaagggttcaaaatcgatgttcactttcttttcctttccgtcctctgtgacaatcgttccacaataaacaaccaatccattctcgggcacttaacgaatttgttaaacaaaacaaaaaaaaaatccagagaattcttcctaatccaaagttacctcttgtataaagctttaacctcgcctggactgaagtgattgcccccaaaacagagagtctgttgactcgcgactttatgttggacgctgttccaaattcgtctccaagcattttctggatacgagcaatttggtctcttggcggaatgatcagggaaatcatcgaagtaccatttctgtaagataaaataaaattagtaaggcctaaatggtattaggtaataccctttggccatttcaagtgactttataagacgcttgattttccagagctcaacattgtgatcggcttcaccttcggaagaagccattcaaataaaaagttggaagaactaatatcaaatttgtgaggttttaacagaaatacttgttccttaaaattaaattaaaactttcaaaagaaaacagagaaatcaataaaaaaaattctttatcaggggttggggtcaattccctcgtgtccggtaatcccgacactgggtaatttcgacactgagtaatttcgacactgaactattttcaaaactttcactgttttacttcattttcgacactgagttggacactgagtaatttcgacacta

SEQ ID NO: 21630 - DNA, 2074 bp, Heterodera glycines
tacagttatggggaaaaaagctccgaattgtctttgatgcctcttcgcacgaaaagggagcccggtcactaaatgacaccttattttctggtccaaatttatacccggacttggccgggaaactcatacaattcagggccactaaatttccaatttgggctgatattgaaaaggcctttttaatgatcagcctgagagaatctgatcgggagttttcgaaatttctgtgggtcaaggacataaaagctccactctcgggtaaaaatatcatagtttttcgttttaaacgaattacgttcgggatagtttcatgtccgcttttgctggccgcaacactcaaatatcatttggacacgcaccctagcagtctcgccagggaaatagtcgcgaagtcattattatacgtagataacctgctcttgttggcagacacgcatgaggaagctcgcagcaaggccatcgaagcgcaaacaattttcgccgcggctaaaatgcgtttatgcgaattcatcgcagcggttccgattagtcttgtcggtatacccgaaaaggaccggcttgaaaccgagactccgaatgttctcggaatgaaatgggttattaatgaggacaatttatcgctgtctttccctccggttcccggtcctgaagggctaacacggagggtggttctaaagacaattgcttctttttttgaccctttgggtttatgctccccgtgtctcgtggggcccaaaatgttcttccaaaaattatggaatgaatcccagggatgtgatgatctaattccgattgctgaatgtacggaattgatgaaaatccaaaaacattgggatagtgaaatcttatcaatcccacgtcacactcgccgagtaggcagcaattcgttgcagttacacgctttttccgacgcatcgcccgaagcttttgcatgtgccgtctaaattagggcagaaatgcaaaataagaatgttgtgtcgatggtgtactcccgttcgcgaattcgtccaaagaaaatggcgactagtcaatcggatggtctaaccatcccacgtttagagctccttggaatcctaatcggaacccgagcaattaaattttgtgaaaaaacacttaaattacgacatcaaaaaatgctttctttggtcagactctcgcatagcactttcttggttggcttcaaccgataaaatgccaatttttgttgcaaaccgggttagagaaattcgttccaatcggctggtcactttcagctatgttcggtcggcggataaccccgcggatttggcgactcgccaaacaacgcccgcagagctgaaaaacgccattctatggtggaatgggccagaatggctgtccaaatccaatgaattttggcctaaagagtatacagtgcaacttccgcccgagcgaaaattgctgggagcggcgatgtatgtcctgcggtttctgtcaatcatgggagaaaaaagaagactatttacggaatttcgggaaaaatcttttttgagccccgaaaacaaagaaaaggcccggatttggattcttaagatcgctcagagggctattagccccccgaagagacttatctggataaaactggtctcctccgtctcaaatcgaggctgtgcggtgcaggaaacgtcgatttcgagcacccagtcatcatcccgtccgattcatggatttgcacgttgctcattcgacactcacatttgagcttgtgtcatgctggaatagattcaacgctgaccgcctttttagcaaattactggtgtaagcgggccagacgaacggtccgttccgttatcctcgcatgcaatacctgtaaaagggacagggcggtcaaatttgggcttccgtccatgcccccactcccacaatcccggactcgcccgtccgcggtttttgaaaatatcggtatcgattttttgggcccaactctttacaaaataccaaacgagcaaccggccaagtcatgggttctcttaattacctgtttggcctgccgagcagttcatcttgagctcgtctcatcaaaggcagcggagcactttttgctcgcatttcgacg

SEQ ID NO: 21631 - DNA, 1843 bp, Heterodera glycines
agagtccacttcgccagaaaaagggatatttgtccactatatgatgctaagatgatgacgtcatcactgcgaggggtactgtagtcctgctgaaattcgcaataaattagctgcaggcaagcggcctcgaacttttgctctgccaccaaacccaacacactaccactctgccacgagaccagttgccagaaaaaggataattgtccactatatgctgcaaagatgatgacgtcatcactgcgaggggtactgtagtcctgctgaaattcgcaataaattagctgcaggcaagcggcctcgaacttttggtatgccaccaaacccaacacactaccactctgccacgagaccagttgccagaaaaaggataattgtccactatatgctgcaaagatgatgacgtcaccactgagaggggtactgtagtccggtgaaaaatcgcaataaatgtgccgcaggcaagtggacttgaacattgacatgccaacaacaaccactctgccatgtgtacatttgccagaaaaaggataattgtcaactatatgctgcaaagatgatgacgtcaccactgcgaggggtacggtagtccggtgaaaaatcgcaataaattagccgcaggcaagtggattgaaaaatcgcaataaattagccgcaggcaagtggattcaaacttttggtctgccaccaaacccaacacacaaccactctgccacgcgaccagttgccagaaaaaggataattgtccactatatgctgcaaagagtgtgacgtaaccactgcgaggggtacggtagtccagggaaaatcgcaataaataagccgcaggcaaaaggactcaaacttttggtctgccaccaaacccaacacactaccactctgccacgagaccagttgccagaaaaaggataattgtccactatatgctgcaaatatgatgacgtcaccactgcgagggatactgtagtccggtgaaaattcgcaataaataatccgctgtcaagcggattcgaacttttgctctgccaccaaatccaacacactaccactctgccacgcaaccacttgccagaaaaagaataattgtccactatatgcttcaaagataatgacgtcaccactgcgaggggtacggtagtccggtgaaaatcgcaataaatgtgccgcaggcaagtggacttgaacattgacatgccaacaaattccactctgccgtgtgtacatttgtcagaaaaagaatattgtctatgacgacaccactgcgagggggtttgtagtccggtgaaatccttctcactgctaaaatgtctggacaaaatgctaaaaactttgtaaatacgaaaaaaagtattcaaaagttgatcaacaaatattatgaaaaattgatgaactaaatggattcgttgattttctttgaaattgggtctatgctttttttggatgcatgcctttgatgtggcgacgcatcagatgaaaacaatttgttaaaatagtagttagtgtctacaaatccgccggattacggtagcctcccatacctatgggaggggtgcacggccaactgagcgccagccaggtgagcgccgccgggtgagcgcgggccatctgagcgccaaaatttttcagtactgaagcctaaacctattgcgcgacttttttttgaaacccaaacctattgaaggggggggggcgcgactttttttctgcaagcctaaacctattgcaggggtgcgcgactttttttgtttgtaaaattttttctgaaaattatttattattatttttatttttaaataatattttttatttttttcaaattttttaatggaaaaattctgccgcaggc

SEQ ID NO: 21632 - DNA, 1909 bp, Heterodera glycines
  unsure (1)..(1909): unsure at all n locations
agtattcctaaatccttttcaattaatgatttttggaattttaaggaaaaataaccagtagcaattgctgtgcatttattttgtttcgaaacggatgtcaaattcttagtcaacgaccccgaaaacctaaggaacctgttctacccgactctttataaattataattttttcaaaaaaattatgggggacaaaccatataagagccgaaaagatttgctataaataatgaaaaaggtgagatcgccgtcatcactttcttttcgcttctttctcatcgccgtcgttttatcttctcaaaatggaattgtccactcataaacttttgttgcttcctccgtccctttccctcctcgtcgttttctttttccccaattgaccgtttccacgccaattcaaattccgcttttccaaaatcgtaaaattcgcgttccatccgataaactttatgctgcttgaatttgcgcaatgtttcaatggttggcggaaacttccgaagagtgtgccgcaaagattttctgtcctcttaaaaatttaatgtttaattgcgctaaggcagagacatccgggaataataaataattgtcgtcctgagacaccttacttttctatgtctcaaaatcataaaacatttttggcattttttgtcgaaatttaagtagatttttattggccataattttcaatagagagcatgtacgggccgggcccgtatacggatttttacgggcccgtaacccgtatttttttcggctgatacgggttaagggttttacgggtttttagcccgtaacccgtatcggtgtcaaacccgtaacccttacccttatccgtacaattacgatacgggttattttattgggttgtttaataaatgaatagaaagaggaagagaaagggaagagtttttaagtggtcatattaaaagttagagtttaatgaaaaaattaattgaattccatgccaaaaaatccattgccatcttataaaggtttttggcgcgtagcgccctctagagacagtgtttaatagcgaagctatttcaattttaaaaaataaatttaaatcagttactttcagtgcccgtagggcactggttacaaatattaatttattatctcgttctggtcaaaactattgttaaatgttcgtaataaaatttagaacaaatctatattggtattttagtaaaaaaaaacttgttttttctttataaaaaatattttcaaaaaacccttacccgtatacgggcccgtatttttcctggatacgggtttttacggactacgggttttacgggtttttagcccgtaacccgtattggtgtcaagcccgtaacccttacccttatccgtattttctcaaaatcacgctctctaattttcaaccaaaaaatcatttttggcaaaaaatcgggactaaaaaataattcacatttaaccataaattttcgtatcttacaaattaacggaataattaacaatggaattggtccaacaaatattatgagggaatatgtaaaaaaagacaccgtttagcaagcggaaatgttcgccggcgccaaggaaaaaggcgggcaaaagttgctccagcaaaaggacggtctcttcgatgcgttccgtcagcccaaccaacagaaaatggtcccgcaaattgcgctttgccaactgaagggcctgcgcattgccgggaatacttaaaaagggaagaaaagtgaggaaatcagaaaaaaagaagtcgtaaagcctattaaacaattagttagtgagtgacaaataatggaaaaagggggggggggtaaattccgtattttgggtgaaaaagcccaaaattcagcatttttcagaaatgtaaaaaataaaaatcaaattttgtgccttgtaaaaacctaanttgctccattttttgaga

SEQ ID NO: 21633 - DNA, 1471 bp, Heterodera glycines
aaaatttacttttcttgacaaaaatttttaattttaaaaatttttttaggcatctattttgggttttttggtcttaaaaatcccagtcctactcatttgcaactgcaaatagtgaataaaaattatttttgctcattttggatgaaaattatgtcactattcgtcactattttggacttttttcactattttgtcactattttggcactttttcgtcactattttagttaactatttcgggatttttcgtcactaaaagttgctgccctaataataattatcttttaatatagaatttcatattttttttaaattgaatttataaaaattaatttcatattaatttaaatatcaaattcttgtacatttcaaaattctctttttaattaataaaaggaataattaattttattttttaaaatttataataaattgcattcaatttttgtacctcttctaatcaccgtcgtaccttttataatcatttttgtacctcttctaatcatttttgtaactcttctaatcacttttgacctcttctaatcactgttgtacctcttcaaatcactgttgtacctcttctaatcactgttcttcctcttttaatcactgttgtacctcttctcatcactgttgtacctcttctattcacagttgtacctcttctaatcactgttcttcctcttttaatcactattgtacctcttttaatcacttttgtacctcttctaatcacttttgtatctgttctaaaatttaaaaaacggccgcgaagcggccgaaaagaacaacaaaaattagaaacgggcgtgaagcgcccgtctgagtcgatcaaaatttaataacggccgcgaagcggccgtcaaagcccaacaaagtttaaaaacgggcgcgaagcgcccgtccaaggccaacaaaatttgaaaaacgggcgcgaagcgcccgtccaaggccaacaaaaattgaaaaacgggcgcgaagcgcctaacaagctaaaaaacgggagctaagcgcccgtataagttcaacagatttaaaaaacaggcgcgaagcgcccgtccaaggccaacaaaaattgaaaaacgggcgcgaagcgcctaacaagctaaaaaacgggagctaagcgcccgtgtaagttcaacagatttaaaaaacgggcgcgaagcgcccgtcttgagcctcgatgtggactaaaagcctctaataattttttaaaaattcaaaaaaaaaatctccaaccaattcgatcaatttgaatcgcttcacagtctaggtagcgaagctcaagaagcgcgaagcgctttatcccaagcccatagccgacggttcacgcacccgctagtttatatatatgttatatagactaggagtttcgttagcgagaactacatctcccggccgaaggacgggagcgacctgaaagtagagtaaggatctgaagactatttgaggcgcatctgggaaaactata

SEQ ID NO: 21634 - DNA, 1658 bp, Heterodera glycines
  unsure (1)..(1658): unsure at all n locations
gcgccgcattcgtgacgtcatcctcgnccttgaccaattgttcaccgatctcatagacttgacgacccgctcaatgcccaagcggcgcagcagtggcaaaccaacaaagntgaatgaaaaatgccaaaaaaagcnagtgataaatgaatcgttcaggatggatttgcccaaaaagtcaaggaatacatgaccaaatactgcccaagaaactgacaaaaagacggagaaagggaaaagacgggcgataaattggcaaggattctttaatgatggacggatttgactaaagtttgttttgatcggacattatttcaactcgtttacatttgatcgttgttataaattttctattcttttttcccatcatttgtcctcaatttgctactgacccttcctttacccctcgatcctaaaagagaagtctaaattttggatgccattttatagtaaaatgcgagtgaacatgaaatttaaatttatgtaggcaaaagaaaaaaaataagagatctgtaaaaagtgaaaaaacaacaaaattcactgcgaattctggtttcattgttcgtgcaatgcgcggatttgctcggaaagctcagcgagttcgtccaaattttgtgtgtcttcgcataaggcagccattttggccattgaaaaggcaatcttaaaacagtctatgcccagaaacaaatgggtaaaagaccaatttcttgcgtttgtcctcctcctcctcggacatctttctcaaagttcgtttggcctctccgaattgcccctcggcaatttgtcggatccaattgatctcttggcgatgcgaaagaaagtcactgatccttttgccacgttcagctaacaaatggttgaacattccttaagaagaacaaatgtggggatgcgtaacaacaacaggtctggagaaatacctttttgttggtaccaggtgtaaaggaaattgtgaaacctaaaaagggatttgaatttattatggaacatccgataaattgtgggtcacacccgtccttttcgtactgttccttataccgctccaatgtcttggcacattgttgtttgtccaattggttgtggcagtatacgatcaacattgtgaaatcctacaaagagcactcattggacaaccatagtcaagggaatgtcactttgtatctttcgcccaagctaagtgccacgtccattttgccaagggacgaaaatcgggcgatgattttcgagtcattccgttgtgctggcgactgttgcgacaacacaaagtcagcaagctggaaagaggaaaattttcattaatccattggttggaattgcctgaacgcattgcttgaaaatcacagagttttgcggttgcgaaagattcacaacggcactttccgcatggtcatcagttgtggctcggtttgttgtcgactggagaaagtgcaaagcggaattcaacttaaaatttaaaattatttcaatgtttcacttcaaataaaattgaatgggaaaatatattctctataaacggttttttgaaaaaggcctgaacctgggcctagactccatgttagacctgtattcatacatggacaaaaatcaatgaaaacccaggttgccggaaattgcctgaatctggatcatacctgtgcaagggggtagtcgggggggggggg

SEQ ID NO: 21635 - DNA, 788 bp, Heterodera glycines
ttcgactcaaaatccaaatcgactattttttgaaaagatctttaaatattataataattcattattttcgaagacattctataaatatttaaaatgattttttggaaacaaataatttaaaaattaaaatttccccagtaaattgtaatataataataaaaattttctaatctttaacttctttatttttttgttaaagttttttcctaaaatattttttggtttgtatcaaatccaccaaaaaacttagactcgttcttggcttttctggacccggaaatacccggatccggtttcccggacccatgatgtaactaaccctaattagcataaaatttttcggaaatttaaattttttcaatatttttggtcacaatttgttgaaattaaaatttcatgcttgtaaatcaatcaaagagttgccgtaagataaactaatattatttaatttggttccatttaagaattgaaattctgaaaaaattggaacttttaaagggaactcccagagccaaattaatttaatttcttatttaaaattacagatcagacaggtcgttttttcgggtttttttcgattttcggtttttaaccgaaaccgaccgaccgaattcatcaaaaactgaaacaaccgaccgacttttatgaaaaattttaaaaaaaaccgaatggctaattggagcgacattatatgttaataacaatattttagtgctttttttgtgctcttttcattttgaagaaatttctaaaatattttcagctattttgaaaaaaattataaacaa

SEQ ID NO: 21636 - DNA, 1480 bp, Heterodera glycines
taatcagttattgtaaaacaataatgtttattatgatatttttctctgaaatttgagaggaaatttaccattgccacttgcaggcatttcgtcgaagctgtattattttggcacagtgatggtggaataagtagtgcaaaagtcaatcagaatgcattgcccgttgcatttttgaacatttataaggtcaaaattggtcgggtgataaaaaaaaagtttaaattcaatttttatcattagtcattttgcaattcttttacgctgtcgatggtgcaaaaatttcaaatctgagtgcaaatgtgccgaactcgagctgacacatatgaaaataggtaagtgatgaaaatccaatgtttcgatattctgtagttggaagtttttgccggccgaatcactttataattatttaaagttttatcttatcgtctctgaatttaggtagtttctagagctaatttaattggttcaatttaataaccgagaattgcaagccctgctacgttaaaatttttggataattgataaaatgggaattttgccaagattttaacaatttaacccatgtaaccggtttttcaaaaatatctctattaattagtttagaattaaattagttaatctttttcttgatattttctctggaattaaaacctacgagtccgtttaaaagaattattgaaataatttaatttccagaatccaatttacaatattttttattttcttcagccatttctgaagggcagctgagaaagagcagtgaatgcgctaaaaaaagttggttttattttttattattaaaaaattgaaaatttaaatgcctgtatttgagcataaatgacatgataattttggctctttttgcttaagtttaagaaataattcatctcatttgttacaattatttaacattttcaattttttgtccaatttgtgtgttagtcacaatcttttttagcattttgaatatgcaatgactaaatttctttcttcatttccaacggtttttttctcattttaataaaattaaacattaataattattccgaaagagtttttggatacaaatacaacgcttaagagtgttcaaatttttataggttaatcataaacttactgctgaagagttttattcaaagtttctgttgctgaagcgtccctgacccctatcaaccaaaatccatgttatctgattagtaatctaaagtaatggcatttctcatcgctttcactcatttgcaaatgtctttcagcaatgagacaaaaatgcaaaacattttataaaactgttgactgtttctgatgaaattatttttataaattgaaagttccagcaggatcttagaaatccaataacaaattaagaattcgatttgtctactttcgaaataaataaagaaattttggcgctagtttaaaagagcactattttgaaaattttttcaacttctttttggtcaaaatttttttttggtttttt

SEQ ID NO: 21637 - DNA, 1909 bp, Heterodera glycines
  unsure (1)..(1909): unsure at all n locations
ttaaagggatttatgggcaatttcggtctctctagccttgtaatgaattttaggaggattccacaacgttggaacaaattcttggtccccatgtcatttgagttttaggacggtccaatcttggcactagtccgtgatcaccatggcaatctcggtcaaaatatggaataaattacctgtctctggccttgaacaaattgttggcccagactaattatgttaagcctcgaaaagttggcaccatcaaaaaaaaagcgtgaaaaacaaacgcagacccgctaaaaagtgtgtagcaaatttcagagtttcggcattttaaacaccatggcttgatgcttccaatcgtttaagtttttgcctttaacgtccccctccccttgtgccataaatgttattgcggaatggcattggcacattcattcattgcttgccaatggtcggtcccctactgcttgctggctgtgccgtgttttcacccccaaaaataataggcgttgctaaatggttgcggctttcggcgccccgtcggcggagtctctcctccccccggagcgctcgccgttttcaattgactgaacacagcgagtacggggctacctccagcagcagaggagcgagccaaaaaaccattcaccgacaattttgggcacccgagggggcggggggaatttcgaaattggtggacggagaaaaaaggatgggacggggacacatgaggggcttggatgaacaaaaattttatggaattgccatggcattttcaatgctaggccaaagaggaggcaaagggcgtggccaattgtgggccaaattttgggacacttttttttggtttatcaaaaactaaattattagagaagagtcctcctgtcaaattttgaaaaaaagttggccaaatctcaaaaagaaataattaaaaatgcatttcctggcggactttttgtttttttgtcataaattttgcgaattaattaccgaaattttttgaaattttatgggctgatctttcaaaaggatggatggataaaaatatttttggcactattgaagctaaaccgttataaatagtcagccaaaaagtgatgtgcttggttagttttcatcaaaaccattgcccgcgggcattggcaaattaattaaaaaacgggggtaggggggacaatttagggccatggaaattgaattgaacaggaaaatttgccaaaggcaggaaaatgaagagagaggagaaatgaatataatgaatggaattgaatggggaaaaagtcaattaccgtatgccgaaggaatgaatggttactgtagcaattcttcggaattctaattgccgagattttttatctcaacgtttcttcgacatttcaaatttggtcggtctcaattcttcggcattttcaccaccggtggtactcaaatctcaccaattctaaggcaccgggtcaacaattctcggcatttttctttttttttttgaggatttgaaatcgggagacagagggggtataggaaaaggttggctcggcagcttctcagcctagcttgaatcaatgaaaagcgcacttggtcctcgtttcatctattacatcaacgggactcatctctcaaaaaaatcttgagcgccaaaatgtatttggaaataatttttttgaaactcaattatttttttcgaaattttaaataattaatggaatctttgggttttcggaaaaaacgccaaaaaaaggcatgaaaacacaaaaagggataaacacgatttttcgaacaaaaaaataatgaacaaatcaaagaggatgaaaaaaggtatcaaagcaacaattttccattcaaaaatttgaaatgattggcaatttgtcaaaagtaattaattgactcccacataanttaattagacgctcttttctccgcttca

SEQ ID NO: 21638 - DNA, 1384 bp, Heterodera glycines
gtcaagcccagtgttagacaaaattgctcataacgccaaatagcgcatttggcgtaaatttttgcgcgctatttcaaaatttacactggaaatgccttttttgtattttttattttgatctgccataactcgcttcattcccaactaaactgaacaaatttggtatctaaaaaaagattttgaaaaggagaatctgcttctaaacgaatgctaagcaatttgacatctcagaaaaaagttgtgatactttcaaatttttatcacgttataacgcaagtcctaggcagctctttctaaccaaaatgctaaatttattcatttttttattgattctaaatgttcaaagtgattttgtacccttataaccaaaattattataattttcgaatttatgttttttcatgtgttagagacatgaaaatagtacgccaaaaagagagaaaaagtaatgcattttcatgttttatatatatctcatgaaaaagtgtataaaacataaaatggctgtattacattatgcagaatttctttctctatcgctatgcaaaatttggtatagatttaacgtatagaaaaaaagttaaacgtagcgaagtgaatgttgttttttacataataaaaaagaagagatagtacgccaaagtgagagaatttataaagaaaaagagtaacgacgagatagtactaggcttttctctgcacagtggggcgtacccattgtgaggcagagcgtaaggagagaaagaggtagaaaggaaagcggtgaagtggggaagcgagcgactgagaggagaaaacgcagcggatagagtgaaagagaaagcgagcgggtgagagagagagagagagaggagaaaatgaatagtaagagaggaagtaagagagaatggaagaaaaagcgcgagtgaggaaaaaaataagtgagacaaagagagtgaaagaataaattgagaaaaagagagggtagacggaagagtaaggtgagagtgaggaaagagagagaaataaagaagagggaaaaaggaggtaaatgaagagaaatgagattgttagggcaataaattttataattgaattctaatactactttcataattgaaaatgcaagtccatggcaattacagatcattctatttttgaaaaagaggaatggcagcagatctgatagccggaaattcgaacggatttatttcaaaaaatatttgaatattgaaaatgtaaaaatatttcatttatttataaaaattattataaatagtgaatataaaaaggtttcattaaaatattcttcaaattcctcagacagcgcctatcagcagcgccagaccaactttcccataaaatacaccaaaattttttatttcacatttcttaaaataaaaat

SEQ ID NO: 21639 - DNA, 1601 bp, Heterodera glycines
tcacaaaaatttcacggagggggagaaaaacgtagtgctcccctttttaaaaaaactaaaaatttttatttcaaaaatttcttatattttttagctaaaaaacgttaaaaataaaacttctgttttcaaaaaataattttagaattgtcgattaagttttttgtttttaaaaaattgtgtggatgagaacgagcttcatccgtaataaacacctgatttgcgtggtgaggaggcaaatacgcgctcaaattggaattcttaaaaagaaaattaaattaataaagtaataatatgttaatacataaaaattgcggaaaaatatttttgtgttctgtcggtcgagctgttcgacgagtgtttgttcggcttcgttccaatggctgcggttgacaatgtccaaaaggggccgattcagcacactttggaactgaaggggggctgaaaatgggaaatttgaaaagggaaacatttgaaattttctttggaatttgtcgaggcataaatgaatccgtttgatttttgcttttaaggggttttcaggtagaatttgaagggcccattcctccaatgaatttacttgtaaattttttaatttatagtttttcgttgaaaaaaaaattttaaaaactttttaaaatttaaattatggcccaccgtaaagctcttcgttggaaattggcagcaaaaccgaaggcgtaaccggcaaatggtgaagtcgaggaaaggaatgctcaaagagacgaggctgaacacggttgtggagctgaaaacaaagggttaacaccacatttaaggcccaaaattaaaggaattttgcggccagcaaaaattggatgtttgaggcttcgagaaaataatacatatccattttgttccaatcaaaataaacctgcatattgtaatatcttgagcagtattaaagatattagcatttagaggctatttaaaatgcatcaaaaaattcaccaaaaattctaaaatttaggccaaaaattttaactaaaaataaatgaaagtgttcaaaatttgctttgcctaccgcattcggcacacaaccagcaaacggttgcctccgacagcgatggaacagtcgcgaaccgccaaggcaaaagccggcggttggacgacgatagggaatttcgatgttggaacgctccaattggcaggcggaaaacctgtaaaaaaaattccaaataaacaaattgtcggaattatttatccgaaaaaaccgaaaaatcgaaaatattatatataaaaattaaaatctcatgaatggagcgattttcgggctcgcaagggcaaggaggggctggaaattttcttaatagattcattaaaaattctagaatttttccaggcggtctgccgtttgatttgtgtacctttcccctgccaccaccatacatgcacaaaaggtgtctcagcccaagggccatacgacgtacgattgggacaggggggtgtctcgggcccgatttttcatacgaaggtcaaatttttctccgtttttttttttttttgctattgacaactctttatgacgaccttttttttgctattcaaaccacctttccacggcggcccgcccgctccacgactcc

SEQ ID NO: 21640 - DNA, 1768 bp, Heterodera glycines
gacctggaccttgatttcctggacaaaaatccaggaaaatccaggtccaggaaaaatccaggctgccgaaaaatggcctggacctagacctggatccaggaaaaatccaggcctggattcaggtccaggtcgatctctaaaaattaccaaacaaatgtttaaaaattttggccaagaaaattgggaatttttataactacctattttgaaatctagagcctaatctttctgtccccactttgtcaaaatttccaagccccattattttggcacgaaaatagccggcactgaacagcaattccagcgtttgtgacaagcgttccaactgttcatcgtccatcactttttcttcttgctttgaatgctgctccatctctgttttctcgaataaaatttgttgttgttacatttatataaggttaggatttatgtatatttttatggccgaacagatctgaaactattttcaatttttaatccatcaacacgctttaacatccccttttacagatttaacacaaaatataaactaggcaaaaaattcattccctttgctgggagggtaacaaaattgtggaataaactcgataaagaactaataaaaacaaattctttgaattaatttaaaacaaaacttaaaaattcattagggtaataaccggaaaagcaaaaaacagaattaattttttaagtgatttggcatttatactgtcgatctcaattgactttgacctcattttattaatatattttgattttttggtcatccatatatttatcacttactctacgacatattatctgaacagtcgtcagagtaagtggttttgcccttctgataacttttttattcatgaataaactctgaaaaataggccttttactacggtttaattaagaaaacataaattcaaaaaaataaataaaagtataaaaaatggttttcccacgtctttgcatttcctatgtttaagagtggttgggtcggaaaatccggcccaaactggtcacatgaattttctgttttatgtgaatattttggcttgataatgccaatgacaaaatcagctgatttttgcctgcttttggtttctgatgaaaaataattgtaaattatcacagtcattttgttttatgcttaaagtatggctctttgcagtttatccgactttaaaaaataataaaaaattaaagaagatatggaaaaaaatcttccaaaattgtagaccaacaaaaatttaaagtttttcctttgaaaatttaattttgggaatgcttatggcctggacttaatccggacatgcttttcctgggcaaagaaaaaaccagtttatcaagcgctaaaagtttctttgttagcttatttcgtttccaaaatttttgggtttcagttaaattttttacaaaatattaaattaactcctaaaattaaatttgtttattttttgttctaattatcataatgtatttttatggtcgtgtaaattttattataattaaaaaacaactcgaatctgaaggaatccaaataaataatccacattttatgaaggctatctatgcaaacatccttaattaaaaacgagacttttattgaaatcatttcataatgtattggttcattattttgggtaggattcgaatagacgtccgccagttttggcgccagggtcgtttcggcgccagggtcgtttcggcgccaaaaatcagaaacgcagaaatagtaaaaaaaattttgttttgtttcaaaacaatgaagtcaataaaa

SEQ ID NO: 21641 - DNA, 1693 bp, Heterodera glycines
  unsure (1)..(1693): unsure at all n locations
ctttcttcggaaaagatttctgattgttgtggactcatattcgaagtacccggaggtattcgaaatggccactaaatcagcggccgcaacaatcgaacgactgcgttatctcttcacgcgtcacggtataccggaaacattggtaaccgacaacggaacgcagttcgccgccagtgaattcacaaaattcacagaagcaaatggaattgcacatctcttttccgcaccgtacaacccaatgtccaatggacaagcggaacggttcgtggacacttttaagagagcatttcgaaaaataaaaggggagggagtgccgaataaagaaatcatcaacacattcctggtaacttaccgcacgactccgaacgattcgctgccggacgaaaaaacccctgccgaaatgctccttggccgaaaaccgcgcacaacgattgatctcctaatgccgcctcttccacagccaacggagagagacacaaaaatggagcaccatttcaatcgccggtttggcgcccgaccacagaaatttgtgtcaaataagccagtttgggctcgacaccgactctcgcagaattggagagctgggacaatttgtgattgctccggagtcatctacacggtcaaattccccgacggttcgacaaatcgctttcatgcgaatcaattgagaaaccgggaaaacaccgaaaatggccacgaaccattggcaattttaaatgaggcattccatctgccgatcaccgcaccgaacgttggaattgtagggcaggaccttgagccaaggcctgacccgatcaacgatgagcaccaggacgagatcgaaccggagcaggcccgtcgaagcccgacaccgcagcaacaacaagtgccgcgccggagtggacgaaaccgccgagcccctgatcggtactcgcccggatgagcccaatcaaaaggggaggtgttcgggtgatgaccccgagagagacatttaatttattttatttatgtaattccctctctctgtctcccgcactatttctctcatttaattgtgtctgcactccctttgtaaaggtcagacacatcattcctcccccacattgtgacccccgctcatttccataattcattctgtcttcttgttgtattcccacatttcctccaattgtcctccgccccaaatatttatttatttgttttccaataaataattgattatttattggactgtttaagctcggttaggtaagaccgaacaattggcgacgcctctcttcgactcaagccgggttggctgagcatcatcatcaaaagccgagtcggcaatcaacaattttgaaattctaaagccgggtcggctatcatcgaatttcttaagccgggtcggccatcatccaatttgaaattctaaagccgggtcggctatcatcgaatttcacaaagccgggctggcattcgtcgaaaagcagaaaaccaaaactgcgaaattcttcaaagccgagttggcattcgtcataaattgctgaaagcgaacacaactcaaaatggctgtgaacctcgaccaattggtgagattgatgacgcagcaacagcaacaatttgaggaccaacaaaattggtgcagcagcagtcgcacaaaattgcgcagttgctagcaaaccaaatgctgcaaacatcgcagctggtcaacanatcccgccaatgcagttgc

SEQ ID NO: 21642 - DNA, 1500 bp, Heterodera glycines
aaaagtcgcgtccaaattggcattttataacaaggcatccaaggccccaaaattttcagaatagtattccgaggcttaaaaattttaatctcaaaaatttgacaattttagtggtgcgcttttcaaaaactttttgaagcttggggggggggggggtattgtccggcggtgccgataggagccaacgggaaattttttgaaaatgagtataatttgttaagagaattttgtaaaaaaaattgtctaaattttgtgattttcgagccaatttctgggaaaaaatttggggttttggggccggcggtgcctataggcgccgccgaaaagtttttcggaatttttaattaattttattaagaaaattgttcaaaatttaaaatgctcaagagtccccaatcccccaaattagtgtcggggggtcgggggggcaaaaagttgggggccgtggacctcggtgggcgacatgtcgggggtcgggtcggggaataggtcccaaaaacatctcgggtcggggggctcggggtcggggggcaaccctagtttaaatagatgtcacatccgtaataaattatttttaacaaatttgtggcatatggaatgaacagtactgaaaaagatatcaaaaaataataatccaacccgacctcattaattatatcaaattttctcgtcgctaagtgaaaaaaaattaaattatctattaattgaaaggcgttgttggttgatcaatgaagatggtgaattcgtcattttactttccgtaaaagctactcacaaaaaatgaatttgtctggtggtgcccgctggggaaaataggaaaatttagttgcaatttattaaagattttatcagaaaatgactttttgatttttggaaataattttgaaaagtgcttaatcagtagagaccggaaatttcaaatttgcggatcccgctgcgggattggaactcaaaattttttgtgggacgggatcccgcgggattaatcccgcaaatcccgcatttaaaatttgcgggatcccgcgcgggattgcgggactttggaaaattcgaaaaaatttcaattatatttcaaaaaatttccaaaaaacaaaaaatacctgacattttgaaaaagaaattttttaggggctggggctgcatttaaaggggctgatgggtcgactaagattttcaaatggatcagcagacggtaaaaagagatcgggaaccaaaatctcctaatgatccataaatttgaatatttttgcttttcaaaaccgcttttttttggtgcgctattttttcaaaaaactaggaacatggtgggggggaggaccgccgtagaaattttttgaaatttaatacgatttgttaatagattttgtaaaaaatgaccaaattttgtaattttgagtgaattctttaaaagagaataatgtggaggccatccggcggggttacctatcatttcttcactgagaaataatttttaaaaatgttggcaaaatgtccattatg

SEQ ID NO: 21643 - DNA, 1647 bp, Heterodera glycines
ttaataattttcctgcaccgaaggtacttacatgcgggccctcccactaaggccctcgtgggtgggcgcttccgacgccaagaacccggtcccttgcaacagtccctggtcacggcggaagacgcaaaagttgcaaactgtcagatttgaagagcaaaatctgaggtaaaaatacgataaatacccggacagtgaaatgaacgcggaggcgaattcgattggcaaaggtggcagaagtgaaagtcgcgcttcaccaccgacggcaaaacattgcgctgggaattcggtcccactttgaacatcatcagcgcgtttaagtaaacattgaggccgagaagtgagcaggggacgaccctcacaagccaaccataaaaaaggacggaattactaaatgtaaccattttaagcataccttgctgaacgggtcaaacgaaagggaaagtggaaaagttacggcatataaaaatccaatcggaagggcaaaaaagataaaaatcccaatctgaactcaatttgtatgacaattcacatgcgaaatgaacaacttacaatgtcttgtgtgtgcatcttgaccataaatttacgggccgattggatgcaattattgttttgttttgtaagaccttcaatagacgtagaagcgtaagagtcattgtgattattcgtggacatctgaaatatcactactcataattttgtttatgcatataatggtcgagaaaatataaaaaatccaccctttgtccctttactatcttacaaaaaacaatatacataagtagggttgtaaattatatggattaacatattttttctgcgcatatgctataaagaaaggggctcaaaaatggcatttctgcgttaaaattttttggtttgctgaaggtttttagtccatataaatccatattttgggggttttcgggaataaatccatatttagccatttttgtgtttttagtccatatttcggccatttttggcaaaatttcacaagaaaatgcaagaaaagggaaaaatacaccccctaaagattgattttttggaaattttaaaaattacagtccaaaaaatatgaaaaatttgaattttcgtcgtcattttggcatttttaataaatcttttcatcattttttgcgaacttttctttttttaaataagaatttttttaaaattttggcaaacttgaaaatatttttatacaatggacgacaataaatttttttttgcatttttatgttttaaatccattttttggttgtttattgttttttttaaatttatttaagcaaatattgaattcatacacctttttttggaatttttgagggtttaaaacacatattttggcagtttttagtccatattttggtccatatttggctatttttagcttttagtccatatttcgtgcttttttagtccatattttatgtccatattttgggttttttagtccatataatttacaaccctatacataagccaagcatgcatttttctactgggagaccaaaataacccatattcgaacaaaaattcaaattttcaaaaatatcttttatggtgcgaaaataactcgaatacgagttcggagttcgaatttggtagaaatggatgtcagattcgtgatcagcgaccccgaaa

SEQ ID NO: 21644 - DNA, 1410 bp, Heterodera glycines
tcagccggactattcactcactggcggagcatcaactgggcacaacatacacagagctgcacaaattcagcagcctaccgcttctctggcctcgtctcttcctgctcatcatcaacaacaattgctgcaaacccaatcattgctcctcccgcagcaacagcactttcaacatgttcgtctcggaactatgacttcaagtgcggtgttgactgaacaacagcaatcgacgcagcaacaacaacaattgcaaaatttcgctggagtggtcgcgaatattcttccttcagcggttcctcagaatacccaacaacagcaaatggcggctgtttcaccggcgcaagtgatgtggactcagcaagcgcaacaaagccaggcacatcagcagcaacaacagcagcaaatgttgcggcatcagaagaaagtccatgtcccgcagcaaatggcatcatcgtccatgggaccatcattcttctgatgatttaaaataatggattcttaactaattatcttaaaatgtattttatttctcaaacttttcatcttcaagtttcacatgtgcctgtaaattaaaagtttcaatgatataagtatatacataaaaaaatggaaaagtgaagatacgaacatcacttgcgtttgataaatgaatacattcaacggttttggtcggttttatgcgtcccattacatggcattttatgcttggcgggttacgcgtcccaagatttttgatgtccgtcctacagcatttaatgcgaccttttttgatcgagttgcactttttgtctgggcctttaccttcgttaaattatcagtacgcacattatcattcatacatctcatgcagttttcatattgaactcgcacgaaaaattgaagctaaaactcaatgcttaggtcggataattaggtatctttcagtctcgccgaaacttcacgttgttgcggtgaaacatccttgaaagcaattgcagactgaagatttattattagagctgggaatttaggtacttgtttggtttaactgatagatttcgtatacatttttagatgcctataaatgtattcattttacattgttttttttacctattttcaaatcattaaaatatgtttccaagggttttcgagatcgctgaacatgaatccggcatacatttcgtataattccggaccccgagcccgaattcgaacaaaaagtcgaaaattcaaattttttgagttttacattttggttcaaacttgtttacatacacggaaacgaactgaaagtcatcagtgcttcaataaaagatcatttaaaccatttttagttttcgacttttgttcgatttcaggcaaaggtgcagaattgtggtcacgatgggaaagaatagttttttccggggttaaaaaaccgctgaccacgaa

SEQ ID NO: 21645 - DNA, 1076 bp, Heterodera glycines
catgaaatgtgggcgcggtggagtttgcacgctattatattaaattgaaattttaaaatctaaaaaaaaattcaacagtctgaccctcgcaaagatacaaataatacatttgtagtcttttatccataaaaaattgtaaaaagacgcccaaaataagcatggttaattgagtggatattcgtttaaaactttagattctcaacttgattaaaaattacttttttttagattagacagttgaattttttaaatatttaatttttaaaatccttaatctggtgcccaaacttccccctgtgatacggatttggtcgaaatggacgtcagaaaatgatgaaaatgatcccgtaccctatttttcgttttatataaaaaaaattttcccattaataattctcaaatggtgccatttttcaagcaccgtaaaaatactgttttaattttattaaagaattggtataagtatcggcggtggcattgaccaaaaccatcgacagtccgtctacagtgattccgtctgtaccgtataaataatttaagcatataattgaaatgaattcaatctatttcaagcctaattgtaaaattatattcaaaaaaggagaatacatccctaaaatggtgctgagacgtcaaataaaagccaacaaaaaggacattatataaaaactatcaaaataaagttttactaattttaaaatttgtttcttgtattgctttttgaaaacaacgatgaaatttttcttaaatgccctttttgatgattggcttttatataacgacatagcactctaaaaactgaacttttatgatatttttttcaaaattaatgcaaaatttcatttgtaacgcctttatattttaattaataaatttaattgaaatataattacataaaaatgattacatttttcctactacttaagggtatttatgtgacaagcgtggaagcaaagtgatatgccaattccttctttacaacttaatcatttaccattttaagttcacccgcagaagaagctgggctgaaagtgcatgacaaaattctgcaagtgaacggcgtcgattacgtaaaa

SEQ ID NO: 21646 - DNA, 1388 bp, Heterodera glycines
tgaacagcgcatttttttcccctagcaaaagtgattttgtaagaaaatttttattttattttctctcgggacaccaattctgaaggaatacacctttttcggtaacatgtggtgaattagatatttttttgtactggttgagtttatggtgtccttacaattgtcatgtcctgcagaagtgccgaattttgggccaattcttcaatttgctggcgttgattaacccttgcagaacgcatttggaaaaattaatgatacctgcaaaattaaatatgtaaaaatttaatcattcggatactatattttggtgtatcggtctgtgatttaaattcattatgaaaagttaaaaaggcaattgctttttgaaaaaaggtttagaatcaagcaagctttttcagtttagtatttttccatttgtgtctcggatttgaattatggaaaaagggaaggaaacggacacctcggatttttatactaaacgatatgtcaatcgattcctcttaatgagagaagacgaatggtaccatttttagggcgcggcgacaattctgaacagagttacagacccggtactgaaatgtccaactacccccgggactcaaacttccaacacacaaaaataattgagactaaattaaagtgcagcgggactggggtccactgcgtttcggcgctcccgtttcggcgccagcatgtttttggctataacttttttctttgtaaaccaaatccaacattgttggtgtcgttcgaaagcttaatctatttagaagctttttctaagctattgctttgcgattagacaattatcaaaatagttatgcatgaaaattgtgaaaagtcgaaatttttgaagttttttcttaaaatttttacaggcttgaaaaacttttcgtttttgataaggctaataaagcatgttaagagctttcgaatgataccaaaagtgatgaatttgctttcctaacatgaaaacctaaataattattgctaatcttcattatgatttggataaatgaatgaaaattttatccgaaaaagccaaggaaggaaaggcgaaattagacaacgcaaaatcacaaggagacgatcataacgaaaatgtaaatctggatgacgactatgatgacaaatttgctacttttgtttcctctccattttcataatttttgatattattaactacattccgattcttctgctgattattagcataattcttattcaattataattgatgcagagtctatatttccccatttataattattattttgactttaaaaattcatcatttgttgaaatattatattttaaaacttggattactaaaatttcttggacaaaaaaaatttaaattttttcatgggaatgatgacaaatcttgg

SEQ ID NO: 21647 - DNA, 1583 bp, Heterodera glycines
agtttaaaaagaaaaagttcaaagagccaattgtcccaagagtagttcaattattaattttaagttaaaattattgggtgggggacaccatagtctggccggcatagtctgagctaagtttaaagcatcatatacttctttattttctcagctggccaaattttatgaatttacaaacattcgaaagctctacatcgatgagaagctctttgagaaaccattaccatacgagtcaaccgcttatcaaaaagccgaaactcgatcactaccaaacggatggaatgtatgcttaccaacaacggctaaagatctcgagaccagggatggtgaagcgctggctcgcaattcgtgaccgaaggcgatttttggcgaaaatcaagttcgcttgggagctatcggaagtctcgcttcggatgtagacggcggcggcaaacgtgtgttccgacgcgtcgcaaaagacgtggagttgtaggcgactgtgcttgccgagaatggagtgccggggaacgacaagtgtttggtgttgccaaagggaaagggtttgattccaagtttccgcctcggtctcggggaggggtgtgtcccaggcggttccttctccccacaggcgttggaagagccgtttggcgggcagaagacatggcccgactagtccaagagggtcgaacgtgctggcgatgatgctcaagactgaacgccgtgtagcagtgatgtctgtgtcttttgggagactgaaggtgatgcagtcgctgggggtgtcccaggtcagtcccagaactttggccggcgttttgtcgagtcggtcgtcctcggggattcgtcccatgacgtttggggagtggctgaggaactcccggaggttcatgtcggcgtctttgaggatttgtttggcgatggacgacttgtcgatggcctcctcttccgtttcacactcgatgaggagattgtcgacgtacatattcgcggccaacgcttgggcgaatgggtgctcgtgcttgtcgaagtgttggaggagaacagcggcaaggataaagggggagcacgtcgcgccgaacactagccgtttgtagcggtagatcaagagattgtcgcctgagacaggacgggcagggtttttcagccaaagcattttgcaaaagcgcctgtcctcgggttcgacttcgatggcatgaaaggcgccctgaacgtcggccaacacaggaattgtcgctgaacggaagcggaggagaatcccgcaaaggtcggggagcaacactggcccgcggtgaagacagtcgttgaggcttggggtgcccttggcatgagcactggcgtcaatgacgatcctcagtttctttgggttgatgacggcgtggtgaggcaaaaaatgctcgtcgttgtctcgcccagtcagctcaataatgtcggcgtccatttgccgtgtcagttcggcggagtaacggtcgagaagctcaagagagcattgcagacgcttggtcgttgagaggagacggcgatatgcgatggacccattcgaggggaagggggaggccgaggttcccgccaagtgaggcgaacggagtaccggccagacggaaattggc

SEQ ID NO: 21648 - DNA, 1700 bp, Heterodera glycines
aaacaaaaaaatcgattttttcaagtgtccgttgggggtactcaaacatttatggggagcaaaaatccaacgcagaattaaagtacaggctatagggaagctattcccgaaggattcggtctccgcttaaatctgggcgcatcggacggggggactgccccgaaaaaaatatttatgaaacaaaaaaatcgattttttcaagtgtccgtttggggtactcaaacatttatggggagcaaaaatccaacgcagaattaaagtacaggctatagggaagctattcccgaaggattcggtctccccataaatctgggcgcatcggttcggggggactgccccgaaaacaaaaaaatcgattttttcaagtgtccgtttggggtactcaaacaattatggggagcaaaaatccaacgcagaattaaagtacaggctatagggaagctattcccgaaggattcggtctccccataaatctgggcgcatcggttcggggggactgccccgaaaacaaaaaaatcgattttttcaagtgtccgtttggggtactcaaacaattatggggagcaaaaatccaacgcagaattaaagtacaggctatagggaagctattcccgaaggattcggtctccccataaatctgggcgcatcggttcggggggactgccccgaaaacaaaaataaatcgattttttcaagtgtccgtttggggggtactcaaacaattatggggagcaaaaatccaacgcagaattaaagtacaggctatagtgaagctattccggaaggattcggtctccccataaatctgggcgcatcggttcagggggactgccccgaaaacccaaaaaaaaattttttggataaaaattatttaaatgaactgactagataatatttaaaataggtttttctcttcctttcagtatccctgcaaagtttggtgcgcttctgatcagtttctgaaaaaaaagttaagcctaaactttttggcctgtttaaaaaggaattaaaaatttttaaaaattttattcatctccctttttgatagaaaaagcatcagagtgcctaaactaacatgtaaataaaatttggtgcgtttcagaaccctttctgaaaaaatatttaagaattaattttgcaaaaaataaataaaaacgaaagactcagattttcgaaaaattttttagagcaagctagctcggcgctcatttcagtgtaagttagtcctttaccggggagtatccctgcaaagtttggtatgcttctgctcaattagcaaaaaatatgagtgatcaaactttcactaaaaagttaagcctaaattttttggcatatttaaaaagcaattaaaaaatttttaaaattttattcacctccattattgatagaaaaagcatcagagagccttattaacttgtaaataaaatttggtgcgtttcagaaccctttctgaaaaaatatttatgaattaattttgcaaaaaataaataaaaacgaaagactcagattttcgaaaattttttttgagccagctagctcggcgctcatttcagtgtaagttagtcctttaccggggagtatccctgcatagtttggtacgcttctgctcaattagcaaaaatatgagtgatcgaattttcactaaaaaagttaagcctacatttttggcatattaaaaagcaattaaaaatttaaaaatt

SEQ ID NO: 21649 - DNA, 1045 bp, Heterodera glycines
agcaactgcaacattcacctccctccttgacaaagcgtccctggcgtagaacagcgggggtccctgcccgggctggtgttcattcgacgccgccagtatccccacagccccctgcagcagccgcagcacctcaacatccagagcggcggcaagacaaagacaaatccggcattactggacaaaaagggaaaaggaaacgaaccaccaccgcctcatcgtatacgtcagccgcttctggagcagaaaaagaagaagaacaacaacaacagccagcagctgcatctacatcatcatcaacaggcgccgtcgttgttgccggagctcagcgcctgggtgaggcggagcagcgacgaaaacagcaggcccttgactacacgtcacgtcacgcgggcacgctgggcatcggtgatggtcagcaggtgtacaagttcatgcatggtgcataccgcccgatcaaaaacagcagtttgcaagccgtatcaccagtgtacagcgaaggccggggaaagtgcacaagtcgaggcacacccgtttcacatctgaactgctaaagtgttgcgtttcgcaccctcccctccctcgacccgtctctcaccgttttggccaagagatgacaagtgttgtgccatctgttcaatgttcagtcggtagggcaagtgcagggtagtgaccagattgcgcaactccaccgcgttgacgctcagtgagagcgccagtgcgggaaatccgccccatttgagtgccgcaccaactcgtcggcaaacccttttggcttgcttggcacattgggcgtggatttggttgggcgggacacccccaatgccggtcagcaccacacgaccactgcgaaagatgagtgcagtggtggtggtggtggtggtcgcggtggcggcgctactttgctgcctaggcccgctacgcatgcgcatcacaatggcgtggaagcggggggggtgcgtactcggtgcacaccccgttgcgtgccaaagccaaaaactgtgcaagggaaaagcactgctgttgctgctgcgacggtgagcgattg

SEQ ID NO: 21650 - DNA, 2109 bp, Heterodera glycines
tttaatctatttataaatttcaattatgtagacattaactttaatggtattttagccattttttcaagttacacttccacacccattgctcattaccagcgaaatcatggagtaaacagcgcattcgaattgacacatttcagtttattttctagtaaattttatttctgacccataaatgcgaaccaaataagtgtaaatggtacaataaatattttaaatgatgataaatcattttataatctgcagagatccaccagattttgaatggcatttgaatggattttgaatggcatttgaatggcatttgaatggcaattccctctcacaaatcgctgtgtctaaaaagtcatctaatcaaaagtgttttcttaatgaattactataatataagcataatcaatttcttatttgccttgcaattttcttttgttcggcttgcaaaaagtgaacaatttctgagtgtccgtatttaaaagcaaaatccagcgcagttttgccttaattatgggagcacaaaaacattaacaattaaacgtattataagttgaggccaagacgaaaacagaactgagaatggaccaaaagcctattcaaaaaagaccccgaaacattttcaattagcacaaaaaagtcagaattgcacaatttatgggtgggtctgattgagtgcctttttaattgtccctttcgctcgctttaccgtatttattcctttcgtcgatacgcgcaccgttagagagcaaaaaacgcacaacgtccagctaacggatggggaaatgaaattcttttttaatagacgaatttttcttgcccttatccttttccctttaaatccccttttttcggctacaatcaaaggcattcattatcattaattactcttcccttcccctctcccttcgctcactcgtcccgaaattgatgccccccattagcgcgttgttccccgcgttgtccgttcgtccgatgttcgctccgttctttacgagaaaagcagctaaacactgtatgaatatgaattgagagttgccgagatatttgtttgactcggcgaattaatcaacaaatgccgaccaatttccttatggcccgcgtcacaggcggccatcaaaggggtgatgccaatttccaggcccaattcgacatgggcaccgtgcgcaagcagcacacggcacacctccaaatggccaaacgaagcggcgacccaaagtggagagccgtctaagaggtggggaaaagcacattaaacgaagggccaaaaaggtttaggaatattttacgagagtaaaaaatcaaatcaaaaaataagtgatcagaaagagttaattgggccctgagttttggacttaaagcacatttaagaacgaactcataattttttgaacttattcaaatcacattaatattattcaaaatgtctgtgtatttcgtgtattttctaaattatttttcaaatgtcacttttttcatttttggcttttcctctctcaactcactgatcaaattgtcatcggtgttgattttccttacaaaggagaggtacccaagtgaccatgggacttccgaatgaaactttcagggtaggtagattaccccccccccctttgtattataaatttttttttatttttgctaaatgaagcttctggccgagatatgaagcttttcctttttgccttttcaatatcattttaaaagaatgtaaagccaatgtgagcgtcggtggcctggtggttgtgccttccatacttttttcttcttctaaagttcaattccccaaccctgtaaataattattttgtttttttttcatatccaaattagtttttaagctttttaatattaataaatttgaacataatatttttttcatttttattcgacattaattttggcacatgtgataattttggtagaaatgagtgaagcaaaggaatttgtcacaccatgcacatctaatcattataaattccgaacaaaaagtgatttgacagtgatcaggaaaaattgttgggaataaatatttaacgggatgagaaaagttggaaaattcatcattttgtgataaaaggtagccccccttatgccaagaataacgacgaaatga

SEQ ID NO: 21651 - DNA, 2143 bp, Heterodera glycines
ccccctgcccaccccatgtccacctaaaatgttgcgttattttttatgaaaaaaataaaaatgtgaaatgaaaaacaaaatcaatttcgaaaaatgtgctcattgagccttctctgctgattccatgttgaacagccggccactggctcttcctccaggtcggggtccaccggcgccggcgctgcctcctccacctccacaagcatttcttgcaccggctcggccctggcccgcttgcgcaccggctgctccagcccatcactctcgccgccagcgtcatcactgttcgcgtccgcctcctcttccccctcctcctcctcatcatctgtctccatttgctgcgcctctgccgaacaccagccaaacggtcgcgtgcggatggacagaggcgtcggcgtgaccgcttcagcttcttcctccgccgcggctgcctcgcctcccgctgttggtggtggtcgcaggacacgccccttggtgtagacggggcggtacacgcgggtggagcgacgcgtgaagatgtccgcctgtcgagtgcgcacaaagcgttgacagggcacggcaatggtccgctgctcggtggccgcctccgcaatgtcgcctccgcccccaccaccatggttggcgcgctgctcgggcctaaagaaaacagcgaatgagtgtggtggtggtggtgcttgtgcaagtgtcgtaccgatttcggcgcctttacctgacaaaatggttgatgaccagctggcgcatccgtccgtactgcagctgttggtctgctgcgtaggtgagctcaaaggatcgcaccttgcgctccgccctcaggtcctgacccgtgcgcgcgtccacgtgctggaacccgtagttcttaggcccagcagcgaagaagtcgatgatgcggcggccgggcagctcccgcttcatgtcccccaatgcattgccctcccgcacaccggcagcaccctgtcgcctcacatacaacacgctgtccgtgtcgcagtacagcgctcggccgcccacccgccggacctcctccaaccattcgtacaggtagagccgtgcgtgtgatgtcacaaagcaggcgacagccaggttgttgtgctccggcgcccgtgcaaacggctcccgcttgcgcaccacacagcggtccagctgctcgttgatgtgcgtgaagctgaccacctcctgccgcgcatccatcaacagctcgtggaaggcgcgcgcactgtccgtgtagaccacctcgtcgcgctccggccgctccgccatcttgccccacagggagttgagcaaatccttggccagctgtcgcaggcccgggttgtgcccaatgttgtcgcggcgtaggtggacgccctcctgctccgcaaactgacgcacgtgctccgcccgggccggctcgtcgtcgcagccggccggccaaccgctcgcctccgccttcagccgcagaaaggtgttcacgtagtcgttgaacagcccgttgccgctctccggcgacgcccactgctcgtagtgccacacctcgtgcacctgcagcacacggtagccgaggagcagcgccctgttcagttccacatgcgtgtaggcggcggtccacgcgcgctcgcgttccgtgtgacgacaggtacgctgctgtcggagctccgcgcatcgtgcgcacaggccgaacgtgagtcgtccgtctgcctgtgtgcgatagggcagcagcggctcgcggttgcccagctcgtccgcgctgggtggcagcactcggcagaagaggaagccgcggaaggggttgtcctccggtcggcaccatggcagtgcgggtggtcgaagagccggtggtgatggtttagctgtagaaaaagggggcagaaattagtcatgatcataaaactataattatacataccacaatcagtgtgggggtggcctcctgccgtttgtggctgctgctgccacagctgctcaccggtccacacacgtggcgtgccgatgggaaacggccgcgtcttcatgcagaacgggtacagagacaccttggcaaagcagatttttgaacaaaaaaaattaaaaagaaaactcacaatgtcaatgtacacaatttcctcgtctggcgcgcaactgtacagcagacagaagggctccacacgaccaccgaacagggcgtgct

SEQ ID NO: 21652 - DNA, 2032 bp, Heterodera glycines
  unsure (1)..(2032): unsure at all n locations
ccggggacctctagagtcttgaatcaggattaattattgtttttaaattagtttttatataatattccatttaaatgcaaatttttttttcattttaaattgtttcactttttcattggcccatcctcctgctgaaaatttggtgatttggccatgccgtagttctgcgcccgctgctgcgcctccagcgagcgcagtgatcgcatgcttttcgtgtcgccggtggcccaacggccgcgcactgacaaactcaaaatggcactaactttgcttacaaattactaatagctttcctccccattttacctcgcatgccgacgcaacaaactgttgtagcgttgcgcagaacgccctgagtgaactgaatgaacaattttaagggaaattccgaataaataggctaattgcagccgattttggcatcgatggcactttcgacccccccccatccttccccccccccccgccgggaaattgtccccgcttttcattccaaatatttttcattttatcctgcatatttttgtcccattttggcctaccacgtcgcacattcaccggcgcatttgggtggtagcgcaatttgagggcactgcgcttttcctgccgctttttggcctgccaacggcaataggcacagcatactttaaagtagacgaaggtgaacaccttgaaaatgaggacaaaattaaattccaattaaaatttaaaaacattcgcttttctctttcacttctctctctctctctctgacctgtgccaaactttcggcaatgtttgctaaacacaaaagcatcagcggaatgccgaaggtggcgtacacaatggtcaggccccgggcaagcgcagttttgggacaaatatggccatagccaatggtgccaaaatgggagaaaagtgccaattgaacattttgaaaaaataaaatagagaataaattacgtgaatactgtgatggaataaagaagagcaccggaaaactgaacaaaaaaacaatgaatattttttaaattattttttcaaattaataataattatttaaataaacatttttaataattattagttaaaattgtttattttaccgtccattgaaatgtcgggtgactgtcgtcgtatttttcgtcatagccttggcatactttttgaacagtttcaaattccctccccccaccttcgtagttcacggcgaacaccagcgactgttcgtactgcttgtaaagtttgtgtgcctctgaatttcaatcaattaattatttttcaattttggatttccccttttttttgcttctcgcctcgtttaatttcgtcctctctgatcacttcacttttctcgataaattcgtacaatttttgcaccacctttttggagagataaaaattgtcatatttttaaatcatttttaaattttcattttaaattcatttttttanatttttctccaccgtccatgtatcgttggcgatatgcccctggaaatttttgttcggccgggnnttcgntggcncggnncatnnnngcgcccnnnncggcgtnnncggcccccnnnnngcnnnggccgncntgggnnnggncnnncncgnctngctgngnnngtccggcngggttttttnngcgnttnnnntttgtgntngcnngngggngttcgngnctgntnnntgnnnnnnngcggngnngtttctcgnctcntgccnnntggttttccctntnnnntggcctttgccgtngggtccctgccngnncctggnccgngtttttgngttttggccntnntntccntggnntcnnnnctctcgngcntntccctnnttnnnntggncgncccttttttncctttctcgtcnnnnncgnngtgcgnntgcngcncnttctgntgctcgcccttgccctttttggggtttnnnttttggccgctttttgttgttctgtgccgttgtccgcctccccccagggcccntttccgtgtntccnntcccccggggnctccttaaaggccaaatctttccggcggaaggcatagggcggaattcg

SEQ ID NO: 21653 - DNA, 1542 bp, Heterodera glycines
ataataatcattttttatgaaaaaacatttaatttttcctttattagaattcattcgatatttaaattcaaagtaaaattatttgctcgattgtcaaccgatatatgggtggtcatttacatatcataaaatattttgtatttgtgcctcgtttttgctaattttataatcctgtatgtttatttataggtggtcgccagccattcattctgcataatctcggaatttctcttttaaatttcttaccaggggtggagcgcgacgcagcaatttgaatccgcgctcgcgaccgcgtgagctttctgtcctcgctccatccctgtttcttactaataattttgtatttctgcattttgagtatgttgatgctcttacctaatcattttttgtctccaagtcgaatcataggcgtctggcgatcatgtatggaagcgacctttaccttttcgagtgtgttacgagtagctgattttcgcatagcccagatgacggaaagtgggcacgtgaaaagcacaaataaaaatggattcggcattgcaacaatttgagaaatcttatagaggactttgcaaatcgtgactcgtttaaatatttacggatctgttcttatggctcgaatttttgaatttttttagctaggtgtacgcttttttaataattaattttcactgacgaaatcactcactgacgaaatcacttactgacgaaatcaccgggaaccttaagggacaattaacattaattaagaaattccgggaggggtcggtttagtctggccggtttagtctgaggtgacgttttagtcagggggtcgttttagtctggcaagctgattttgtgccatatggattctaatctgattttttttcaaaaaatgtttaatttaatactaaaacatatttatcaatgtatttccaataaaaaaaacaaaacattgaaaaatcattgcgggcacatttcataaattcgagataatgtaccaacgagaaaatcgctgatgatatcgggattaacattgacattggcatgcccgtaagagtcgaagaattctcgcatcggcgatatcaccagctcgaattccaacgaaaagtttcaggcgaaaaattcggccatctttgacaatcagttgaggcatacgtgttcaacgcttttactttgcgaggatcatcaaaaaatcatcattcgaccaacgctgcttcaaccgcatcgttgccacagcacagcagtgacgccggctcggccaccggtgaattgttttacgaggagtgcgacccgccgccgtcgtcgatggcagcagcacaactgacggcggtggtgccaccgcaacaacaacagcaagcgcaacaaccgccgcaacagtcgcaggactttgtgctgggcacggcaatcgcaatgtactgcttgaacttgatgatagaattttctcaattttttgaaattttttttaaaaattttttctgagtctgtcttcaaaaaaaaaaatttcagtcggcaacaaatctgggagggtttccagcaaatgtgtcactatttaaattttat

SEQ ID NO: 21654 - DNA, 1055 bp, Heterodera glycines
gaagtccgttaattaagcacaattgtttcgtttcgagcaattccattttcattttggcaaagtttagacgaatttcctataaattaataataaaatttatttccatttttattgtttctgttgcgttcgtccacctcaatctgttgttgatcactgaatgatcttgggttgtccaatttttgaccaataagcgaaccatcataacaactcgcctctgaaattttggaaaatttttattaaaacactaaaaagaaattcacgtctataagcttaaaaattttaaaattttcgttcacttacaataataattgttaaaaatcccggaggttggtataactactaattaatccgcacactaattacaatatttatttttgttcacccatttctttgccaattaatcttttcttacccctttctgctggtgtgaaaatgctgctgcttgacaaattggtagaagttgacatttatttatttttttcaaaaattgctgaaacttataaaaattttatttgtaataatttttttatttttatgtaagcgtattaatatgatgggtgtgcattttgaatggcttactgctgattgattgccaatatttatagggtcgacacaaataaataaatgtacggcaaaatgatgacccaaaaagtgggagagaggagaacagcagaatatgggcaaagtaaatgacatgagaatttgaattggttcaccaattttctcttttttaatgaacgatagtgcaaaaagtgaccattaaaagagggaaaatcggagaatcagttattaatgttagtacaaacgtccttgaaattcagaagatatgatccaaaattcaggttttttgctagacttttaaaccctaaaaaattcagaaaaatgtatttatattcatatttgctaaaacagacttaaaaatacgctaaaagctgccaaaaaatgatttaaccttaaaaaatgccaatttttattaaattctagtttcacaattgcaaatcaaatacatctccaaatttttgtaaaaatctctttctgtagtcagctaatatttt

SEQ ID NO: 21655 - DNA, 896 bp, Heterodera glycines
  unsure (1)..(896): unsure at all n locations
cagagcaatgagctacngaatgatacaaatatctttgattttgatatttttttactagggttctccgggcccgcgtattttaacaaaaatcttttgctggtatttccgggtctcgcaatgatgagtccacgtccgggtccaagtttttcaaccgattttgggtacggagtccaaccctgtcttgcaaaaaattcattgttttaaaaatgagtattttcatgtttaaaagcttgcaatttataaaattatacgtaaatatttgaaggagaaaaaattcaaaagaaaagttttcaagcgggtcctgaaaatcaaaaaaaaattatttaatttcatgaagatgaaagcatatactttcaaaataatataaaatattttcatgaaaaatatataatttacaaataaacgctttattatttatcctacttttttttgctattcaaacaatttctttttgcaggcctttttttaaagtttttgggacagaggagtccgggaaaattttgaaaatttacttttgatttgttaaaagattttaccaaaattgaccaaattttgtgatttgagccaatgtgttaacttgaatcttagcaaagagtgaaatgaatccaacagaaatcgacaaggccacaggagcaataaattatttcactttcaataaatatcaaactaatttttttaaattttttcgttcgtgctttgaaattgtattattttttatctataatataatataataattgggctatttttacatttattttaggaaaattgattttattgattccgcctcttttattcaattagcaattataaaattatatgtgttaaaatgctttcattttactcatgaaatgatatatatatatatatatatatatatatatatatatatatat

SEQ ID NO: 21656 - DNA, 2766 bp, Heterodera glycines
  unsure (1)..(2766): unsure at all n locations
tatanngagagttgggcctaaaaagtcgatcccgatttgctcccccacggaagacggttgtgtccgtgatttaggaagaggcgccttcggtggcagaccaaatttaaccgctcggtcctttttgcacaccgggcattcatttatgattttacggaccgtacgtctcgcccttttacaccaaaatttggacagaaaatcggtgagggtggagtccacacccgcatgaagcaagcgaatgtgcgagtgccttatgagcaggacaagaacccacgaatccgtcggcacaaaaactggatgctcaaaatctttatctccaattccacagagccgtgatttgagcctaatcaaaccgtctgtgtcaagataagtcgggacgggggggagcattcccctctgaatttgtttgaataaccaatttaaaacgaatttttggttttcggggtccaaaaaatcggaatttctcatattggggaacagttgtttgcttttccctattttggacaggaatcgtaaaacgacgaaagcagtgccgagaagctttcgccaagaaccgaatcggtcgaattcgaaaatgtctggcccaattttcacaacggcgaccacaacgggatcgggcgctgaactttcctccggtggcagaattgccgtcaattcgtctggccaaaggtttgctggtttttccaaccattcgggtcctttccaccatatgttggcggatcggagctcatttggactggtcgggtgggttgccaggtcggcagggttttcagcggaacgaacatagtgaaaattaactgaacgatttgttcggatttcacgtatgcgatttgacacaaaaactggttgcttttctgtgctagaaatccatgctaaaacaattttggaatccgtccagagatggacactttctatgtcataaaataaatgtgattggacgaatttggctgccctggtcccgatcagaacccctaagagttccaaacggggaattgtgagcccgtcgggctgattttcacccatccttttgggtttaaggcgagaacgggcgtaaatgagagagttaattacatggccctctatttccgctctcagatataccgccgtcgcaaaaacattgggtgaagcatctgaaaaaacatgtaattgaatagctccattttttgtgcggggtgtatttcttgggatcaaaattgtttgatcactccactgacttctgatcaaatcccatgcacttttttcggaattttctatgggctggtcccaaccgcgggactggtcccataagctctgaaaataaatttttgcccccactaaacagggggagcataaccctagggggtcgaaaaacgatgcgatagttttcaaaactatcctccgagtaagtaccgctgggtttggtacttcgggaaatggcagggacaaatcgtccgactgtaaaatccatttcagaccaagcactgatggctcgtcttcagagaggcaatcctcttttggaattgtcgtcagaagttcaggtttggccgcgacaaattctcggaggcgcatttttgcctctgaaaaaatttcttgcgcttcgatggccttttgttcggcttcggctgggcaatcggccaacaacaacaaattatccacgtatagaagtgacttatgccggatttctctggccaaatcactcggcgatgtgtccaaatgatgttgtaaagtggccgctagtaaaaaggggcacgacacaatcccgaaagtgatccgccggaaacgatacaccagcaaattatttccggacagtggtgcattaacgtctttgacccacaaaaatttggaaaattctctatccgcttcccttaggctgaccattagaaatgccttttctatatctgcccaaattgggtgggcggtcgcccgaaattggatgagtttgcccgctaaatcggggtacaaatttggacctgcatataatgtgtcattaagtgacggtacatttttctcatgcgatgaagcgtcaaaaacaattcgtaattttttccccataacggtatggtggggcaaaaaatgctgggggtcacaagtccgggacgaattttcaataattcctcttgctaaataatcctcaatgatttcattgcatccctgtaaaagacgcggggaattgcgaagtttatgcaccagagcggaaaatcgcgaaaaggcaattcgaaaattttcaggcggatattccgtctctgacttccagggaaggcccacttcataccgtccttccttgtcctttttaatggttttgttgaatttttcaagcgccatctcgtcatcttttaaaattggagaatcggaaacgccgatcgtttctaaagcccaaagtttggcaacatcggattcgatgggatgaggtgtgttgaggactggacaacataacgacggatttgaggttttctcggggacaccgcaatcttcccctccaaaaatgacaccaaaaacggttctgattctgtaaattccgggtcgaatttcatcccaatccaagataaaacgccaaaaatctctaacaccgatcatgattcttggcttgacggagcatggcaatggattttctgagtcctcggaatttgctggtgtcatcaggcagtcaatggacgacgttattctctctgtctgattcaaaaaaacttcttcccatccgccatcctccctagctaacagcactgaatagcagggggagatgaattccgaaaaagtttctttttgatttccaacaaaacccaccaacgacca

SEQ ID NO: 21657 - DNA, 2255 bp, Heterodera glycines
cggggactctaagcaggatctgttattttttctttttcaaaaatggcacataatctgtaaattttacatgatttgccaaaataaaacaattaaattatttataattaccaacacagacttgttctcatttgtactgattcacattttttgctcattttcaggtgattggtcgcatgggcaagctcggtcacggcgagttcaagcagtggaccgaaattctgtcgaaaaagaacctgaagagtcgcaacaacgcgctgaagggcaaagcgccgccggaggaaagcggtgccgtgtccgctccgtgccagtcgtgtgcccagtcgcacggctgggccgagacgcccgcgctgttgtccgcctgcctggtgtccaccgagccggagccacacttacgcgtgatggcctccacctcgccgggtgcgctcggcgacagcgccggaggcactggcaccacaaatgccgcaggcggtggtaccggtgccggcggaggaatgaagccgagcggcggtggaacatcgggcggtggcggcggtgccaacaccatttcgtccgcctccagcgcgacaagcagcaaaccggcgatgggcagtgccggcgcggggcgccaatcggcgctgggtgccaatgttggtgcgcagcaacagtggtggagccaaacggcagtcgcctgtccggacgaccgttccgtcacacacattatggtcttccaggtacattttgggttcgggttttttggtgccggattggacggcacatattttctccctccaccgagggattccctgttttttttgtgccaatgccttattgtgttaattttagaccattctgaatgtgtcgctgggccaccaccagggcgaggatatgcttcagagtgcgtttgacgatgatggcgacctcacaaatgtgttgggcggcttcaattttgttgaacagaaccaagaggaattggaccttgacaatttggagattgacaaaggtcggttttcacatccgttcatccctcaaaagattggaaatttctaaagggatttcgattacaaaaaaggcgtatatttcgggaattcgacaaaatttcgccgccaaaatttaaaaaaaaattttgaaaatttttctaataatttttttcattgcgcgaaggttgggcaaatgaaatgctttgccctgttaacatgctatcatcattatttatggactaaattttaaaaacaattttgcagacgaagaaacgcagatcaacaaccagccgatggccatcgggtacaccgtgtccacggccccactgcctccgggcatgccgtccagcttttggcaccggtgccctgccgcacgccgtcgtgccggcgcctcgggcattgcacatctcaaatcgtcactgcacatcaacacgtccaacctgaacgaggagtacgggggcggcgcggcacagcagcgggagcgcgactcgggcggcggaggaacaacggcttcatcagctgggggaggagcagcgaatgcaaaggcaaccggcgccgagcagcaacaactgccccatgcccaacaccctttggacgcagtggccaccgacgacgtgttaaggtggtatttaagattgaacgagaagatcaagccgtaccaggagtaataatgaagggtggtgaatctccaaaacaaaaatatttcatgaattgggacattgtgaaaatttccattcttttaaacaatttactcttaaaagccaataatattcatcattttatatggtctaaaaacttaataaaatgctatttttgtcgaaaatattttcggctgaaaacaaaaaataattcgggattcactctcctaaaactgttctgcttgtaaacctgagttctgaaccgatgcgtttaatttctgctccttccaattttataaagtatttcagcattccttaactccatttgtgttcaggtacgtgttggagtcgtacaatgcgttgagttggctttcgcttgacccggtgaccggcgcgcgtcgttcctgtctgcccgttcacatgcaggccatccaacggctgaacttggcggtgaacacattctgggggagcgctgaacaaaatcaacaacaccaacagcagcagcaacagccgaaatgatcgaataattaattatcaaatcatcgaagaaaagacgcagcattcgcatcgaaaattggcattatcacatcttttacacatttctccattttttgttgtaaacgggtccctcggttcataaacataaaaccttctagatttt

SEQ ID NO: 21658 - DNA, 1708 bp, Heterodera glycines
ccttgcctgattcaacggtaaaattaattttaaattataataatgaacatgtgcaatgccatggaatgagtaatattcaaaggaaacaagagaaataggcaattttgaatctaaggattgaaccgagaatagaaagtaggtttgacaaacagctgactgactgtatgtgacgagaaagggtagataagggctaaatgtatgcgtgaagcaggtcttgtaataggaataaatgaagaaatcatatgaggatattgtagtgaaccatagaatcaaggacaattaataatgggtgtaagagatagagatagagaactcagaaatgtggttgaagagagtcaatattaaatagtgagaatttaatgtgagtttgtaaggcaaacattaggtaatgtatagggaagagaatagtttgataaagaacaagaatacgaacacttggaagataacggttcgagaataaaacatagtgttggaagaaaagatattgaaaaatagctaacggaaacgattatttagacaatatgtaggtctgaaattaataaggaataacagtgaaagtaaacagatatagaagagtagagaaagtgtattacggagaaaaggaaaataattcaaataaacccgaaaccaaaatctctaaatataggattttgttaagaaagcagttggcgttagcctctttccatttgttccttttagaggaatcgatttacaggataagatgacgcagtgacctcacccccctctccttcacttatttggtttcctcagctctgcccttcctctccaacacatattcggtcattattgctccttaccatcgcaaactcagtttacccactcccttttccatcctatgcgttttgccaaatcaataggaaagatatattttattctcatataaattttagaccacgaggataacaatttgcataaaaataaaaattcatagtcaaaagaatgaagttttcagtgttcggtgtcagagccttgcgaggtattggtgaccggagggccaagcttaattaggtattggctaccggagagccgagccatgtgaggtattggttactggcgggccaagcttaattaggtattggctatcggagagcagagccttgtgaggtattggttactggcgggccaagtttaattaggtactgactaccggagagctgagtattggctaccgaaaattcatcttttattattttccttgtttttatacatttctaaaatccttgcggctgtaataattagttacttacttaaaaaaggtttatcgctacccaaaaagttgcattctttttcagatattttagaattaattgccatatttcctagccatcaataccataactaagttaatctgtcaacaattatcatactcatgtagtgttcatcatttcctttgtctcagccttcaagtattctgcttcattgaattacaacaaaaatgtggcacataatttaagtaccatcataacccttctttccaccagaaatattcagattgtaaaaattaaagaataattggttataattataattaatgcagatgtcataccctaatagcaattggagtattttagcatgggattcgaccataccaaaacacaaatgtaaaagatctccatcaaaacttttgttaataatttttctcgcatttaaatgattaagttggttcttaagttaaattacccaaaaa

SEQ ID NO: 21659 - DNA, 2069 bp, Heterodera glycines
cattggccaatcccatcaaatcccatcaattgacaatgccattggctaatccaatcaaatcccatcaattgccaatgccattggccaatcccatcaaatcccattgctattggccaatcccatcaaatcccattgctattggccaatcccatcaaatgccaatgccattggccaatcccatcaaatctcatcaattgccaatgccattggccaatcccatcaaatcccattgctattggccaatcccatcaaatcccattgctattggccaatcccatcaaatcccatcaattgacaatgccattggctaatccaatcaaatcccatcaattgccaatgccattggccaatcccatcaaatcccattgctattggccaatcccatcaaatcccattgctattggccaatcccatcaaatgccattgccattggccaatcccatcaaatgccattgctattggccaatcccatcaaatgccattgctattggccaatcccatcaaatgccattgctattggccaatcccatcaaatcccatcaattgacaatgccattggctaatccaatcaaatcccatcaattgccaatgccattggccaatcccatcaaatcccattgctattggccaatcccatcaaatcccattgctattggccaatcccatcaaatgccaatgccattggccaatcccatcaaatctcatcaattgccaatggcttgaattaaattattctttttatttaatttaaaatttcaaaaaaaaaagtttttttatctaaaaaacaaaaattgaacagtaaaaaatgcccaagtgatcaatgccataaaaaagtgcaagggtaataataacacagctgttttttaatttatgtttcaattgtccttttccatgccaaggcacgctttgactgttggcttaagtgtcacgtaaacctgaaaaattaattattgtaatttaataatttaaaacgattgaatctacccaaattccgaaaagtgccgtcagtgaaacgggaattgcaacaattccggcgctaaattgtgaattaagcagtttattcataattgtggattacgaaatttacagtgtccacctgactacgcccatttgcagtgtgactacggtagcggcgacggcgccggacgcggcgccgccgaggccgacgccgaacagcggcgagtcgccacacgccaacatcgcggaagcgcacgtcgttacgcgcttctcctcattcaagcgcttgtaacgctctaattcatgctgaaaagccgaaaaagttttgggcagaaatggggcaccattgctgaaatatcgctgcaaaacagtgagtgcccatgccatttacagtaccctttcaatattcaattgggtacggtattcaaaaattgcaattatagtaattcatttaatccaaacgccggacattgatggattcttgtagtcgggccaagttgttattgcgcacatcaccagaatatattttaggacacctaaatttgcattaatttcgctattttactgtacctttgtctcattattgatacggcggcatactgagtagggaccaaatacggtacgttaccggtcgtaaatgttcagcgccttgatgccgtgctttatgtgtgcctcctgcagcttcttctccgccatcattcgacttgaccgtgtcgcgcgatccatcgccctacagtacgccacttttgcctccatcgcaaaatccacgcaagccaattgtaaattactgtaaaacaaacaaattgagcacgtggtaatgggccaaaaaacaccgcacgcgtttagaatggcacgcgggtccggcatttcgacggcactgtcgaaaatgcgggcgtattccttaaaaattaataaaaagcaaaattaattagaaatttaatattaaaatagcgcgaccactcacccggacgcattcgacgaattttcggacggtcattggccgcccattgagcatttttggcttcagcaaattcggtgccaccatcgactcgaccagtcgcttcacttcgtctcggaacacgggctcatgtctgagcattttttttctgatt

SEQ ID NO: 21660 - DNA, 1371 bp, Heterodera glycines
gcagcatctccagcgccggcatctggtacgatggcatctgcgatgacgtttactgagttagcaatcaaataatttggcaaaattatcttttggtttttcaggaccaaaaccgcagcatctccagcatctgcatccaaggggtcaaacaacaagcccaagcagcaaaagaactcggcatctgcttcaatgacatctgtgatgaagcggactcagttagcaagcaaatactttggcaattatcttgtggtttttcaggaccacaaccgcagcatctccagcgccggtatctggtacgatggcatctgcgatgacgtttactgagttagcaatcaaataatttggcaaaattatcttttggtttttcaggaccaaaaccgcagcatctccagcatctgcatccaaggggtcaaacaacaagcccaagcagcaaaagaattcggcctcggcatctgcttcaatgacatctgtgatgacgctgactcagttagcaatcaaataatttggcaaaattatcttttgggttttcaggaccaaaaccgcagcatctccagcatctgcatccaaggggtcaaacaacaagcccaagcagcaaaagaattcggcctcggcatctgcttcaatgacatctgtgatgacgctgactcagttagcaatcaaataatttggcaaaattatcttttggtttttcaggaccaaaaccgcagcatctccagcatctgcatccaaggggtcaaacaacaagcccaagcagcaaaagaactcggcatctgcttcaatgacatctgtgatgaagcggactcagttagcaagcaaatactttggcaattatcttgtggtttttcaggaccacaaccgcagcatctccagcgccggtatctggtacgatggcatctgcgatgacgtttactgagttagcaatcaaataatttggcaaaattatcttttggtttttcaggaccaaaaccgcagcatctccagcatctgcatccaaggggtcaaacaacaagcccaagcagcaaaagaactcggcatctgcttcaatgacatctgtgatgaagcggactcagttagcaagcaaatactttggcaattatcttgtggtttttcaggaccacaaccgcagcatctccagcgccggtatctggtacgatggcatctgcgatgacgtttactgagttagcaatcaaataatttggcaaaattatcttttggtttttcaggaccaaaaccgcagcatctccagcatctgcatccaaggggtcaaacaacaagtccaagcagcaaaagaactcggcctcggcatctgctacaatgacatctacgatgactcttactgagttaacaatcacataatttggcacaaattatctt

SEQ ID NO: 21661 - DNA, 1443 bp, Heterodera glycines
tttctgttcctctttctgttcctcttccactttctgttcctcttacattttctgtttcaatttctgttcctctttctgttcctcttccactttctgtttcaatttctgttcctctttctgttcctcttccactttctgttcctcttacattttctgtttcaatttctgttcctctttctgttcctcttccactttctgtttcaatttctgttcctctttctgttcctcttccactttctgtttcaatttctgttccactttctgttcctcttccactttctcttccactttctgttcctcttccactttctgttcctcttccactttctcttccactttctgttcctcttccactttctggtcctcccgtacccggtttaaaaacttggacccggacccggcttttctagacccggaaatatccggaccctgttttgcccaaatacccggattcgtctaaccctaaaattaactcattttgagatttataaattatttaaatatttattagtatttgtttatttttaatttttattcgattaattttaatatttattattttattaattcaaaaaatcattagcattaatttaaaataccataaagttaattaattaaaaaaataaatttaaaaaaacaaaaattagaataatttcaatataatatttgctttaaaataatcagaagaaatgggactctaacccatggcaagccagcaccaaaggaaggcacactaaccacgaccaccggatcgcttgcctccttttaatttccttttcactttccttctttttttggaataaaatatttataattttatgtttaggtaacttattaatttgtctccatttttaaatgattttgcacaaaaaaggtcaaacaatagatttttgggctaaattagaaagaaagaattattatttttaatatttaaaataaattatttttaacaaacttaattaattttaaaaaaataaaatcattcaaaaaatgtaataaaataatggatgaaaacacccagaataggtgggacccgaaccgtcgcccaccaccaccaaaggcaaaaactaaaaatgtatgctattaaaacagcaataatttagctggaaatatttattgaataaaagtaggagcagtaaaagggctgatgatgtaaatggaaacaattgataattaactggggaaagaaaaggaggagacattttttgcttattgaaaaggcgaggttaaagaccactggcgagtgtgcattacatataaaaaaaggaaagaaaggaaagaaaggaaagtaatcaatttttatccaaaagtactttgctccatattttttattatgcctttctttctcttttaactcacttctaaaattcttataagaaaaacattaaaaacaaattttaaaacgaataatttaaatataatatttgacgggaaaatcccata

SEQ ID NO: 21662 - DNA, 2467 bp, Heterodera glycines
  unsure (1)..(2467): unsure at all n locations
ataaatgaatttattntggacccgaaactcagggcccaaaaatttacgaaaaatttctgaaatacgtagaaactgacaaaaacttttgttactaaaggtacaaaattcgtaaaattcgggaaaagcaggggaaaaggcgcgcctatgttgtaatgaccattaatgatgttcgagagtctcggtttctagtaaaaattttgcttacaaatcaacaaacaattatcgcgattagactctctctcagtgtacagtaagtaagccaaaaaatacagtatatatgtttatgcacaacacttactgtattcgtcgactgttgccggcggtggtgccattgcatcggcggttgaattggaggacgaataaacgacggactcatccgacggcggcgaaccgttgtgatcagtcgggggaggaggagaagcggacgagccaaaacactgacgaaggggggggggagagctgggatggacatctttgaagaccaaataaaactgcaaaaaaattttaaaaaagtaatttttaaatatttcaattaatgactaccgtattgtacgttgtgttgtcattcattttgtttaattttatttaattaattttttgagataaaacaacgaatggcaaaatgctgaattatttgcttaaataaaaccgaaagctcacctgacaatttatttaattaaatgtttctgaatttacataatatttgtgattttttgtgtctgcctttctgttcatggcacctgccaattaattaatgaaattacacgttttacatcttttccaattattaaataataaatgaataacgctttttgtccgtaccgaactgagcaaaaagaattcatataaatgatttttttattataatgagaatgagaatttattttttattttttgaaaaaggagctaaggatgagaagagtgacaatgtattgtataagggaaaggaatattttccaaaagctttcaagccattttttggtgtccgatcaccgtgatggaatgatctaagcaatttggtgtaaagtaagcgttttttctgcttgcattaaaatttagcttaaaattagtatgcattttttcaaattaactattaaattatggaatatcaaggtaatatactgagactgttttctatatattaaatctttttaaattttcaatttataaaaactcttttaactttataagactgaatagaagagacccgatatggagcggaatcccgcgcgggattttgtggacgggatcgttctgaattccgcattattttttgaaaatggcaaaatttgctgaattaagcaatcccacgggatttcattctgtcgcagcgtgacccgaaaaatttaattttgtaagcgatcgtcctgaatacataacggattttaaagaatttttttcctggattctacatgctctaaatagtaggaaaaacactttcttttttgtgcttgcgaacaaaagttgggacttttatttacatatttttacatattagtagatttttatacatatttacatattccggaattttatacatatttggtaaatatttttggattttttttttcttaattttcatttttttttacatattttgaggattttttagggaaatttttgaaaatcctcaaaaaaattgaaaattacgtcaatttgtcgtatatattttcattttctttttcacatactttgagaatttttgaaaatttatagaaatttcttgttaaaaatataaaattttttttgaaaatgtaccaatagaccaaaaataatttttaaaacactaaaatgtgattctaggccctatttaggtcattttaatggcattatgtgcctatttcaccctttgcgaagaattcttttacaaaaaataatcttttaaaaattttatttgcatattcggtacctatttgttttttgtacatatttcgggatttttcttacatatttatgtacatattttgactatactttttgtacatttttttgacagcactagtcattatacaaaacaatggtaggggtaattcgtcgcttttaaaagggaagaattcttatataattataattatggaagttctatgctttcacgcccaatcaataaatattaaaaaatattttgaatacagtcttttttaccaaaacaaattttcttcagaataggcgaacaaaatggttttcttaactatgaattttcctcctaatatgtatatttctttttctgtgccctcanaaatcgaagtccgatgccatcnggttcgtctgtctttccatggccaaccgaactctgttggccagggttggcaatcacatggcttggaattggcacattttggtgcgcggaaatccttaaaattatttaaataatattatttaattaattttatttgcctttgcttgngtgtccatgtgcacatccgtaacttcaatgttcatttcttggccaattgctttgattgcttgg

SEQ ID NO: 21663 - DNA, 2371 bp, Heterodera glycines
ctactgcagaaacatgcactgcttgagtccgacttgaacattgtggcagaccaaattcaattggtcagccgcgaggcggaacacttcacgcgcgaggaagggccggacggaaaaggttggcacggcaaagccatgggtccggcaaaaatgccaagtcaacaacggcaattcccatcagcagggtacaagcctgtggagccagccgtggtgcaggaacgggtccaattcctggatcaacgctaccaggaactgctcgaactcgccgcccgtcgcaaggcgaacctcgaggcgaacaagcgattgtgccagttcaactgggacctgaccgacttggacacgcacttccgggagcaggaacaagtgttggcacagaaggacaaaggacgagacattgtgtcggtgagagaagcaaaggaaatggaaggccgaaacgaatccgccaaaaggtcaaccgactgttggccaagcacaaaaatgcggagaacaacttggccgacctgggcagaggcttggaccaattgcagcagcagggccaacagctggtggacgagcaaatccccgggtcgggaccggtgccgttgcggttggccgagacgaggacgtattacgaccatttgagacgattggcggacgaacggcgcaaggaattggagggggcggtggagtactaccaggtcaaagggatgccgccgaatgacctcggttcaacgacggaccgtttagttcttccacgacgcggacgacgtggaggcgtaccttttggacactctccgcgtggtcagcaccgacgacgtgggccatgacgagtcgtcggtgaatttgctgatcaaaaagcacgacggagtgtcggacgaattggtcagtcaatgagcgaattggtacataactcggactgatcggagtgatttggcaaaatttgaaggaacgatttgaccggcagattcaacagttggagacacaggcagacgcactgccggaagaggcacgagcgcacccggtaaaggaaatgggaggacggcattttttaaatccatccggcaatctttctcaccgctaagaacattgcgtcacggatcaacggcacgcagcagcggaagtccgatttggtggaggtggcgcggctgcgcaagcaaagactgctcgacgcactcagtttttacaaagtgaggacagagggacaaaggtttttcagtcaaatgatcaattaattaattgtgttgttaagctggtggccgacatcgaatcggtggagtcgtggattgatgagaagggcaaactgctgaagacgttgatcccggggccggacttggaggaggtggagataatgaagcatcggttcgagacgttgcagaacgacatgcacaaccaaaaggccaaagtggacacaatcaacacaatggcacgggacatgcagaaggcaatttacactcagcagatgattagtaaaaccatgaacacaattatttagcaggaacatccgaactctgatgacattttggccagacaaaacggtaattcagaaatggaagtgtcgtcgcaatttgtcagtttgacaccccccccccccactaattacccctaacaacctccacccatcactttaaagctttgaacgcccgctgggcacaactgagcgacatggtctcccagaagaaggaggagctgaacaaagctcatcgcatggaaacgttcagaatcgactgccaagaaacgatcacatggattgaggaaaagacgagggttggcattggcacaaaggcaaaaactatcactaattaccataattaggtgttggaagacaccgacgaaatgaccggcgaccttaccggagcgatgaaatagccccgaccactttccatgatggagagggacctcgccgccattcaagccaagcatgccacgtgtttgggactccaaatattttccatatctttgcattctcagactccactcattgcccacccaatcgaatgccattgagcggcaaaagccgcaagaaacggcaccaaatcctcagaacatgacgcgcattccactccctcgctgactgattatgacggaatccgactttgtttctcgcggtcggttagggtgaagatatattgctgaatccactggtgcgcgagcaggagtgtaaactgatctacgcaggcgacttgtcgcgatctctgctccactcgtagcatatcaaagcgaagattcttatgttccgcccttagtctgcttggctaaaattaacaacaaaattttgaaaaaaattttttgcttttttgaccagtcattgttgctccttcaattccttctgcaatttcggcgtccgaccaatttttttgcttgcattttactatcaaaattttttgatcgtccgtca

SEQ ID NO: 21664 - DNA, 1788 bp, Heterodera glycines
  unsure (1)..(1788): unsure at all n locations
tgaataaaataaacataaaaaacggtttttggcaataaaaatttaaactaacaataagaaaaacttaattattggtctcatgaataatttttatatttttattaaaaagagtggcatgttattaaaaatgtttattaaaatttgttttgcaaaaaaatccccattcgaatttgtaaatcaattttggtcagggttggcagtgatggaaaaagctactctcattttgctatttgttgtacaacaacagcaccgtccagcagcagtcggtgcagttcgatcgtgcggaacatggaatagttgtggccgtagtcgtggaacagtttctcccagcggcgagcagtgcgcgactgcaccggcccaactgcgtcggcgtccgcagtgccggcgagggttgtgccgaccgtcgtattggccgtcggcgtcggcacggatcggtgcgggtagtgcgcgtacagcggctcgcgcacaatcttgcggttcagacgacggacggtggcactggcggactgtcgggcgagtgccaactgatcaagtgggagagagggggatggcaatagttaattaggcgcttaattgggaattgcgtgtgaggtgagtgaatagccgcagggcaaaaaaaggaaatccaattaatgatcaaactaattaagtgggaggggagtggcaattaggggcttaattgacaagatgagggaaaaacggaaaacaaatcaagaaacatatggtattaaaggacattcaagcagagagagtgattggcatgaattcaaatcggtggcattttaaaatagaaacttaaaaaaggaatttttaaagaaatgtccacctttttttgcttttcagcttcaagacagttttgccagaacagtttgaccctttgcaacactttgaaatggcccgcaactgttgagaagatgaactcgcgctgaaataattaattataattaaattttaaaataattaaattaattaaatattttggcaccggcatgccattctctctctttttctcacatttccctgctccttgttcagctgaatgcgaatgccattggaaatgccctcctccacatttttgtactcatccattgtcacaatgtcgcgcaaaagaatctttattaaaaaatatattttaggatttcgaaaatttggcagaaatttcgaacggacggaccaccacggagacgagccgttccatgcgcgaggcgaagcacaaaaaattggcggacaaatgcaatcggccgagcacacaacgcttgtcgtacggagtgtaactgaaacaaaaaaggacaattataactcgtccaataattttttttaattttaatttataaaactttgtttaaaatttctaaatttttttaaaaaattgacaaagctaaaaaatcttgaaaatatttttcttaattgtttttctttgtggctttggcacttctgcaagacatttctctactgaataaatatgtaaacattacagtggccaagcattttagcagtttcacaattggattatttattaataattaattacaaaaatcgaatcgataatgaaagaattaaattaaaaggtttacaggcgacaagtcacgtcgccgtccaatcgttcgtcgtgcggcagcgagaaacggcacctgaagacaatcattggcaaaaccatttgaatagagaatgaaaacaaatgtttaaagatgaaatttgacaatattgtgggtaatgtaagcttccctactttaattatgctttgtatatccanattattaattattgctcaatttgttctcgngttta

SEQ ID NO: 21665 - DNA, 1428 bp, Heterodera glycines
gagaaagaggaggaggcaaaaagaaaggaagattgcgggtgggggatgggcgagagtggtggcgttgggcgtcggaggctcccgcaacgcatcccacgagggaaatccaattgaagtccttacaaaaagcactctctgggccaccgcccatccgtccgttcctttttgcttatgctttcccttcgctcggatgcttaattaactctcgacagagatgcaaaagatgcgctcccgacttatccgttctcctcctttcggaaatggcattccttcgcctaccaatggcaccccttctccaaattcattcaattcactccttgccgctccctttttcttattatcaaacgttcaacaaattttctcacaaaagcagaaaaatttcgtctcaaatgcattaattattgactgaaaaccgaaaaaagaggaagagaaggcgggggggggggggggggggggaatacttctgaaagggggaagaaatggggacaaagcgaaattcagaaaaaagggggaaacaacgcaattgtgtacaaaacactaggaattcttctgcgaccatattggtcaacaaggttttcaggtttcgcaagtgttctaattttcagatttacctgaattaagggtagaccaatatttgaaaatatcaatttttaggaaataaaatgttgattttttccgtgttaattttggggtaaaaatttgcttctctaacaataagcagtatgatattgaaaataaattaagaacctgtaaattatcaatgtaaggaaattgcccactgtaaaacatctcctataaaaacctatttaatttgttcactcacccgaaggagacggtcgaatttttcagcggacaaaagaaagcgtccgtcgtccaattgcatttcgcgattctccagcaaattgttcaaaattggcagtacgttccgttcggccttttccacgccatcgataaataaaatgcgtccacagagagcggcacggacagcgcactgaaatgtgaggaaaggcggtgaaaacttgagccggatatgtctggtaaacttttttttaaatcgcttacaagcgctacaggcctaacctagttttcccttgtcagtctgggtgggaaaaatctggttcgggcgcctggtgggtttgcgaaagtcctagataatcaaacagtagaataaatcttccaaaatgaggaaatacgaaaaaaaaaaatgtttggctttgatttttcgttggatcgccccccccccctccatttaccaaatcagtgtaataggctgaaccggcgcggatttcgcgcctttgtttgatgtcgacctctgtcgtgtcccgcgtgatgctcagatactcaaactctcgattgcagagttcctttatttttttaagaaattggactattccatttggcattccccacccataaattggtggactc

SEQ ID NO: 21666 - DNA, 2082 bp, Heterodera glycines
ctcttctcaatttggaaggcaaatgcccctctgctcactctgcctttaagggtggcacgccaaatttggccagggcatctcctcaaaaatttggttgccaaatgcctgccctctgtttaagagtgtcatgccaaattggacaatgccaaacaaaacacgtggatgatagccccaggctaagcacatgcttactcaatgatgtagcaaatattggtttttacatttgcactttatatgaattacaaataatttttgtaatattaaaatttttattatatgaaagaatgatgcgaatgtgcggtgactgacatttgtagcgtcaacaaaaaaacgacacaatttctgcgcagactttgcgtcacttacatttgcggcacttacatttgcggcacttacatttgcggcacttatatttgcggaccttacatttgcggcacttacatttgcggcacttacatttgcggcacttacatttgcgtcacttacatttgcggcacttacatttgcggcacttacatttgcggcacttacatttgcggaccttacatttgcggcacttacatttgcggcacttacatttgcggcacttacatttgcgtcacttacatttgcggcacttacatttgcggcacttacatttgcgtcacttacatttgcgtcacttacatttgcggcacttacatttgcggcgctgagatacaaccacataatggacgcaactcatacacaaattttatctagaaaaatctttttaattgacaagtatttttaattgggagaacccaggaaaaatatcagcgccgcaaacatttcgcttggaatgggcgatcgtattgaccaggggtggagcgcgaccgcgattcgcggcatttttttttgcgcgatccgcggtcgcggccgcgtcaaattgaatgcgcgatccgcggtgcgcggccgcggcattttttttttgcgcgatgcgcggaatttggggctccgcggcaattttggaccatttttaaaaaaattattttttgaagcgattgttttttacgttaaatatttttaaaaataattattagtttatgtaaaagcaagagatttgaaaattggattctttttctcactaattccttcaaaactaagaaaatattcattaatttttctagacaattttctttttgtaatttaaagccaaatgactcatgaaaaagactctatttggttttattttgacaaaattgacaattcttcttatgtcaaatgcaaagcatgcaatttaattttaatgttttccgtaaaaatcttaattgttttagtcatcaagtggatcatcaaatctctcaattactatggtcattgatcacccggaaagctaaaattggtgccgcaaatggacaaagatcgggccgaattcggcacgagacctcggcgaaagtgcgaattgaatgtggaatcgaacaaaattacagcaaaaaaaaaacggaggttgtgagaaggcaaaaattcgtgacaaagcatgtggaaatgcaaacgcgacaaaaaagggaattaaaaaaaattaaaattaaaaaatgcaataaccaccgcttcattctgtgtctgtacttttatggcactaatttggacaatttgcgacgccacacttcgtccacaatattctcaacgacctcaaccaattgaattcaatcagctgctgccattccttaccccgatttgatcgctgatgatgggccaaatgcaattggtggccacaagcattgtccaaatggctgcacaccagggctggacgtaactgattttcaattacggaaatccgtaatccgtcattacggcgattttttcagttacggccatccgtaatccgtcattacggaggtccaaaaaggccgtaatttggcgtaatccgtaatacgtaatccgtaattttcaaaaaattttaaatttaaaaaatttttaaatttaaaaaatccaatctaaaaattgttaagattaatttatgatcagaatatctgcttgtttttttgaggtgaaaatcccaaaatagtttttttcgcggtgtgctttttccaaaaaactggggaaatgtgggggggggggggg

SEQ ID NO: 21667 - DNA, 2301 bp, Heterodera glycines
cctcactcatcctggcatcgttcgaatgaagaccctagctggagaattggtctagtgaccgtcgatgcacaccaacattgaatcactcgtcaaaagttgtgttccgtaccaagaagcggccaaacggcccgcaaaacagcctctccaaccatggccaccaacaacatccgttttcgaacgtgttcacattgatctggcagggccatgcagtaatggtaaaacatacctagtggtaatcgacacttattcaaaatggcctgaaattttccagttaaacaatacttcgtcccattcagttagttcacagttacaatggttgtttgaccgttatggtgttctgaaaacgcttgtgtccgacaatggaccccaattttcgtcatccgtttttgaggaattttgcaaaaataatggcattaaacacattttcagccctccatatcatcctcagtcgaatggagtagcggaacgttacgttgactacttcaaacgccaactcaaaaaatgcagtggtgatcgaaattggcttagcaaatcacttctctcatatcgatcaacaccaattgctattttaggccaacgctcaccagctgaattgtttttaggccgaaaattgcgcacaaaattgtcactcatgaggcccgaaaccattccaaagcaacaacatcacgaacacacgtccaaaatgaaattgcaatttgacaaaaagcacagtgtaaagccggtacagtttaaaattggagagcaagtccaatttctcaattaacgaaatggtcaaacactttggcttttcgggcgcattgtttcaattaaagggctaattttcgaaatccgttcccctcagcttggcaaccgaatcatcacgcgtcatgccaatcaaatgcgaacaacaatggcacagagcggtgacgaaacatgttcggttcccgatgacatcattttcgcgagggaggagcatggaaccggaaatgaaacgacgaccggaaatgaaacaacggacgatcagcagacaaacacgcagccacaacaacaggcagcgcaacaagaggaacaaaggcaaaaccaacaaccaactttgcgtcgttccgaacgaacgaggaaaagtgttcgttttcttagtccgacgcacactggacagagttacgatcactgataaatcaccacacacattaccccaaaacaaaatcaaatttttaaccttttcacttaaggggggaggtgttgtgtagtgaatttattatatatttaaattcacgccaaatgatgatcatttatttttattctgtatcacccaattattgtccatttaatgagtggacttcgttcactcatggtctttttccatattcattcactttatcaacaacacaccgcagcaatggcatttgctccttcattggttattgattaatttcctctgactcatcatttcgttctacacttttaccttttgaataaatatttgtctttactattttgttgtgccaaacgcacgacacaacaactattttgttgggttttatcaataaagaaaaagtgatttttaactttgctgagacggaattggctagacggagttcatccctacggcgataggcgccgccgcgttaggaaaaaagggaatttttatatttttcttcgtacgtcattgaaaaaatggctaatttcagattcgaatttttaaatcttaagggaatttgtgtgcggcggcgccgataggcgtcgccggaaattttttggggtttttaatgagttttgttaagaaaatttattaaaaatttcaataatttttcccttttctcccttggccggcaacccactccccgaaaaggtcattcttaacagtgtaaaaatttctcggtttccgagactaaaaacccgagaccgggaaccgagaaccgagattctcgcacatccctaaaaattatgggcatactttatttatttatttgcatataattaccaaacatagcaccgcctaaatgttcaaactaagcttcgtcggtaataagtttttaaatcgaatatttaattaataattatttccagtatccttattttcattttctaaaattttagtcattcaatattttctgcgtacaatagttactaaatactgaataaattgttttatgtttttaaaaaatgtattttttacgttagacgctttttttcgcccgatttctcgcgttctcgtaactaattcatgttttctcggcattccgaaatttataatgcttattatgcaatttggtttgaatatatataaaaattttaagaaagaattttcgtctttttgtttaa

SEQ ID NO: 21668 - DNA, 1864 bp, Heterodera glycines
cagagggcataaaaatgtggaaagacccacaaaaaaatggtgttgtggaaatcaaaacggcacaaatgaggtaaggatcatttgctggagcggtagggaggggtgggggtaattagttttaatgggcatcatctgattaaattatcattttatggggaaattaatccggcgtctggctaatttctgacctaaatacgcatcagctctatttttatagttaagaagcgaaatacacttttaaatgggttgaatgtttctcaaaaatgtcataattaggaaattttctgtgccctgaggcaatttgcgtgcgcattttgccccaggcgcacgccacatttggaaatgtctgtttctgttgtcctcggcggacggaaagtgatggatgaacgaatgaattggatgacgaacacattggtgaacaacaacaataaaacaataaactaataaattatggaaaatgcaaatggtacacaaaaattacgggccgttgttagcatttgggggacaaagaacgaagaaaaagagggggacaaaagagcgaagaaacggagaggaaaagaaatggaagcaagagaaagagtggaggaggggtgagggcaaagcaccgccagttgtagataaggtaattgggatttaaaaattcaaatgtaaagagaaaatgaccaatttaaaatattagattaattacgaattacattttttattttaaaaaaacaataaaaaaatttaaggcaaaaccaacataatattttttttattaatttcgattttatttccataaacagtggggaaaattcattgttttgtttatagcagccgaaaatggggcaggagcatcacaaaaataatttatgtatgtttccaaaaatatcctttttaaaaaggcattccatctcatgtgcaattaattgattattggggggggggggggaatattcctattattttaaaagtgtaaaatgtatattaaaaataaaaataatgtataatataatacatattacgtaaaagaaagagtgcattcgaaatttgaaaaagatttgttgggattacaaattaaaacacagctaaaaaccaaaaaaaaaaatgctaaatcgtaacggaaaaagtttgaaaagtgttcgaatttggactgtcggaacaaactttggcaaaaactattagcatttgtataattaggtagatatgaaaattgtcgcgggaaagtgcacttcgcaaagcgacagagacaaagggaggaaaagcatttggagaaaaagcatttctgggaaagtcacggggacttcattcacttgcggttcgtttggttggttgatggtctcggcacggaggtggacaaagaaagcgaaggagcagaagcaaatttttaatttttgtctaggcaaccgaaaagtaaatttaattggcactcatttgtttggcattttgtaacatacaataaagaaaaagtacccgtgggcgtcgttagtttaaaatttgttgcgctcttccttctaacataataaatgggcagcaaagaatgaatgactgatgaatgacacctttttgcgcatttgttggactgacccaattggcggttactgtaattggaaaaggagtggaagtgcgcgtgagtgcagcagagaaaaataacaatggcagacaatcgtttcgaaatttttttttttaaagaaaccgtcaaaaaccacaaagagcgaggcttcttgaaaaacaaaaaaagaaaataaatataaaaccttagcaaaataagcgtccgctaattgagaaattagaaaagggataaaataagctgcaataaaatttagctgaattatatttaaaaattatgaagaagaaatagtatcaaatattttaaaatgaaatg

SEQ ID NO: 21669 - DNA, 1075 bp, Heterodera glycines
  unsure (1)..(1075): unsure at all n locations
agaattacaacttttttgattgaccaaattttaaaattttgacattagtcaaaactatacatgtctagaaactaatgataagcttttattaagcgattaaaatatntataaaaagatgcaacacgaaaaccgcaaaaagggcagaattttgcatatttttaactttttacgtgtcggtggtatatatctgtgtattcttggaaagccgatagagcttgttaagagctttcgaatgttcctgtgatttggtcaacaaaattatcacgttcttctaaacttggctcattgtcagtttgacccgctttggttttttgataattttttttcttacacaaaatttgacgctttcacttttaattcgtttgttcagtgaacgcgaggccgccctgaaggaggagcagtcgccgaacaatcagcaggacacagcggtggtgtgggagcgggtggcacgaatgatcgaaggcgccgcagctggcacaattggagcgccgatcggtggcgcgaaaggggccaaaggaggcgcgcaaagcgtcgcttccgccggagggggaagcagcggcggaaaagacaccacgcggatgaagcaactgatcatcgcattcgcccggggagaccatcaacaaaatgagaaaagcccggacaaagagacgacggaggcgtgagaagggacacgacggaccaatggacggaccaaagggttgtggacaaacagagacaaatggaaatggtgtattgacccccccccctcattcgtgttctgacattgcgcttcggacaggatcaaatgtcagaacatttgtaccgaaaatgcccatccctgcttatcggttggctttctgtttttttaaaacgacaaaattctaaattaaacgtgaattaaaagttaaacaaaagacagattgctttccattctcacatcaatttatttccgcgcattttatcgtaccaaagcggtgagtcattcgtggcattcatttcgctgtgattttgtttttaacattttacatttgtcttacaattaggcacagaatttaatcactcggaacaaatcacagttcggcggataccatgactt

SEQ ID NO: 21670 - DNA, 997 bp, Heterodera glycines
ttttgttagcactgactcatttagcagcttctgaccccctctcccccccccaatttcctccgttttttattcgatgcctatcaaaacgtttaattcggttattccattttatattgactgctcacttttctctataatttcttttaatttggtcttttctttcctttttctaaatgtgcataatttctgtatgtatttgtgttctacttattggacggtggtaaaaacagataaatatattaagggtcattaatttaaaaaggaaacgaaaatgatttaacttaatttattatttattagtaaaaagatattatcaaacgaatgaattaattaaatcaactaattataagcgaaatggacaacacaaataataaattcattttgttgaagaatggggcaaaattattctatgcttctgaagaatgcgtacgtcaggaagcgaaaaactttgtgggtggaattgtcggtttgaatgggccttcggatttggaggagggcatttatgagggtgagcttttccgactgattgttggccatcaattagtgctaatgagtgcgcaggtggcctcaaaatttgggagtgtacggtcgacttgtgcaattttctactcagcaattatcagacaatgagcggaattgacattttggaggtgcccgaaatgaaagagtgccaactcttgcaactgattaattaacctaattaattaattagttggggttgcgacaaagggtctctcttcccactgaatgtttcctttgcttttcctttttcagttgggctgtggcgccgctttgccttcgattttggcgctgtcaatgggcgccgattcgatttgtgtcaggatttcgtgcgtactttgcccattgttttttgatggccaatcctttcgcttcttcttttgccttttcagaatgcttttgtcgtcgaatgtttcaccaaaaggaatttcgaattaatggccataaaattgacggtggaaatgcgctttataaacga

SEQ ID NO: 21671 - DNA, 864 bp, Heterodera glycines
attttctgatcggaagcgatcgggcggcgctttcgtctgaatgcttttcctgtgcttttcccttcttttttttgctattcagtcttttggctgccaaatcgcattatttcggcgtcggcggaagtgttttggcattcgttgaattcgtccgctcgcgaggaaaattcgcttacgttgaggaaatttggagcaccaaaaaatgtgccattccacgcaaaattctgcaaatatcgcggaaaaccgaataagaaatgccaaattgttttatggtcattgtataaactgctgttaaattttggtggaaaacgaattgaaaagggacaaaagaaaggggagagaatgcaaaaaaagcgaaagtgccggggacgtcgcgccgttccgactcggctgcgacccgtaatggatttggtggtgcatttcgtcgtcttccgtttgcttccgccggtcggcttttcccccatttccctcctcctcccattgctcccagccatcgaatgggtctgccgtcgttgtctttggcgttgttttggcgttgtgccgtgccatggcatttccccgccctccgttcgtctcggcttctcttctcccttccgcttgttctgctgctgtctctgcccatccgtttgttcgtcttccgccgttgtttgtccacattctctcttcttcctctttttgcccactctctcccgtttctttcactctcctgtcttttgtccctgctctctcctcttcctccgcgtctctgtcctcctcctccttttgtccactctctcccttttcttccatttcacttctctcttcgaattcgcattttggcatcaaagttcgcgttgtgtcttttaacactcggaaaatcacttgcca

SEQ ID NO: 21672 - DNA, 1197 bp, Heterodera glycines
ataaaactgcactcaccaggatcgatctcttgaacctttttttcaaaaggcttggaaaaaataacaaaaacttttgaaggttttggaccaaaaacaagtaaaaatttctttttaaatatttacctaactatgaaaaaaataattcgaaaaatcgaatttgctgtatgaaaaacgttttatccttacttagacctctatatttgaatttttaaccccaagaaaccctcgccctattcattatgcaaaaataatagactttccaaatgtctctcattattaaattaaattacctgcaaaggaatggacagttccgttcgagtccagtgtgtgccgccgattggtgttcaaattgttcgatctccacgcaatttgccaagtgcgtctcacaacgcgaattcatccagtccacctgaaaaagtcggccaacttgagcagcgccagcacattttcctctgaaatgcgacaaaatgggaaactttacaaaaaaagcaatttaaaatatattttttaaaattagggccttaaccatagcggtacggtggagggcggatttcccccgggtgcactccgttcaccccccccccccccccgtttcccgcgcatcgtttcccttacgaaaaaatgttaaaaactgaaaatttttagttttctatttttttataagttaaatagaatttttttttcagttttatcattaaggtttttccttgaaaaaattaaaaagttagaaaaaaaattttttaaattttttttcgggggaaaatgtgctttgggggtgggggacggacgctccattataaaaatgaaaataaggaatttttagcaagaaacaaatgggtgcattctgaaaaataccgccaattttcttaataattcggaaaatttccaaaaattttccacgcggcggctaccgccatcgctggatttaaaaaattcccataatttttgaaatttataaaaataaaaaagatattttgttaaaaaaaaccaataaagcggctctacaattttgaaaaattacactacaaaattttttagggaccaaaaagaaagaaataaaaagttttcttttaggctggctctcacactgctccatgtccacgcccaactcgttcaaagtgatcagtcgctgctgcttctcccgcatttccacactgagcatccgctggaccaacggcaaaacggacataagccaat

SEQ ID NO: 21673 - DNA, 1690 bp, Heterodera glycines
taggtaaaaatattaattttgatacaatgtttttctcctgatttaataatgtcaccattaattattattttttttataatacatattccgggcactatgccaatcttctatagcgttgttagttcgaccattttcgataattaaaaaattattaattttcaatgtatttttaattcatcaatttacaatttatttaataatgttcaaatgtttttcattttcacaaatttttgttttttattctttcttttttttgttaatatttttttttatgttgctcttttaatatttattaaaaaatatttttataaatgaaatttgtttttaaatattttgtatttgaatggtttgatgttctttcacagcattcctgctggtcagtagcgttgctcgggccaggtttggcccagatccatacagtatatttttcaagactcagacccaacttttaaaaatccaatattttcaatttttttgttagatatttttatttaacttttttgtgctataatttttaatctttttaaaaaatgaataaaattgaaaattaattttatagtttaaagcttttttataatccgaaaaaaatgaaacaaatactttttaatttttgttgcacgggtccggttatctgatctgggtcattgacccggataccggcttttccataaggcgaatgcagctcaaatattaaattaaaaaagggcttttttattactcctgtgaccttatcagttattctcgtaaattcattttcaattcgttcacagagcgacgaatgttatacatcaaaattttcaggactcggaagaacccggcccggtttttagcaaatacccaaaatcctttgtcattcgttttcagtgcctacaactttaaatgaaaattttggtacattaaaattattaattccgaatttgatttcttggcattttgctttaattgtttatcaattttaatccaaaatttattttttaatatgtattttaaaaaggtattgagttttttgctctttaatattggtatttgacatatattaatttttattgcaaattgattttaattataatttaatttcccatttaattacgcatttatttaaataaaattactagttccatgtacatatggtgtaacccctttattgcattatttgttcgaccattttcggtatttttaaaactatgattaatttgtttcgatgtattttttatttcagttaatttacactttcatttaataattatgaaaatattttttcattttcattcgtgttttttaattaaattattatttttgttcaaatgatgaaaattaaataagattaatgcgtttatttagctttattaattttaatgaaaattaaaatacttttttcagatttaacttgcttttgttccttctttttttttgttaatctttttattttatggttgctcttttgtattttattaaaatatttattattttaatgaaccaatgaatatttgttttttcaatatttttgcatttaaaggtatattttaggttataaaaaaaaacataattaaaaaacgactaaaacgataaaccccaaattttaataaaatttctttcgcagaatccctgttgagtcgaaattagttttttaaactatcttatcttctaaaaattttatacattatgtaaggacatgtatttctgaaaaatt

SEQ ID NO: 21674 - DNA, 1586 bp, Heterodera glycines
atttatttatttattcaaaaataaaaataaccaaaagaagggcattgctgccacttacacttgaggtggaaatacgacaggtcaaaagagtagtagtgatagaacacttaacattggtgatgaaaaataggtcaatgggcagttgtgatatgagttgaaatttaatttaaagaagcggaaaagtcgacctccagcaaagggaaaattggtttttataacaatttgagtaaaaaattttttgggggaaatttttaagaaatttgtagtagaaatattttattgaatttgctggaggtctgaaaaactatttatcgaagcactgggggaattgtttttgaaatgattgcagttggaggagaaaattgtcaatttttgggagtgaatttggaatttgattttgtgtgattgttttttcaacctgtgaagattttgaagtgtcttcactggcctccttcggttttggaccattttctttggcgggagccggaacatttgtctgtggtggctgcattgctggtgccacgggagcagtgttttgttgacgttttctgacacgcgcttcgtattcctccttgagttgttccttgctgagcgctgggcggacgaacagacgggccaaattttgttgcgaacggagtcgagcacgctcgcgcttccatcctccaagtgccatgtgttgatgtgcgggtgttggcatgaccaccttgagcgggcgaggtgttgttcgctgcgggtcgaaccggccgagtcgaaagacggcggttggttcggcctcaacttcaagatggtccaagattttggtggtggcttccctgtcttccttaacacgctccgatgggcgaacagcattgctttccgggatgccaatgaagaccaatgtgcgttgacgttcttgctctgcgagtgcgacagtgtttgggtccaggtccagtgggggtgccattgaacgttttggttgaggaggagtgtcttttgttgtgttgcttcgcttcattgtcgataatcgattttatagagaatgtgtttttatctcaaacttgggtaattaaaccagagtctcaaaaaggatttatgacgcgctgcgcggtgcattttttaccgatttaccccatgtgaaagtcgtcaatttcaaattattggacccttccgcgcccgacagcaaagaaatttgggccacaagctcctgggacaaaatcccgtaaattttaaattatatatttttttaaattataaataacattagggttgtgatcgagattcacccggagcagggtgacagcgaacaactggttgcgatgttggcacatgaaattgccacggagtgacaagcaaggaattgcgcgaaaatggcgcgcattcggcgaaagagaaagccgagcggttcgaacaatgggtgggaataaatgttacacaaacaaaacaaaaaattcttggttaacggtttttttgaaagtataagacaaaaatatttaaaattattctctaaagcgtgagggaagatttaggcgttttcggtctctcaatgcatattctggtctatttttttggcttaattgattcgtctaatgaattatttccttcttctt

SEQ ID NO: 21675 - DNA, 2453 bp, Heterodera glycines
tacttatatggttcgtacgccacaaatttaaaactttttttaaatcatcttagcttgcttagaaagtcagtaggtacatggttttcaggggcgctgattaaggggtagatttcacatacattttcaaatgcctataaatgtattcattttttaatgaaaataggttttaaggggtttttggggtcggtgatcacgaatccgggctcagatcagcgctaccgttcactacatgagctgtacagggacaaagaattgataggcttcctgtaccaataataccctcattggcaagatgcccatgagtataccatcaatacaattttcgaactttatgtttcctgtaccaagggtaccctcatgggtaagatgccaatgaggatatcatccatacaaattttttaatttatttttgttcgaattcgggtccgggatccgaaattggccgaaatggatgccggattcgtgatcaccgaccccaaaaaccccttaaaacctattttcattaaaaaatgaataatttataggcatttgaaaaatgtatgtgaaatatgtcaggtaaaccacacaaatgtttcccgagaacgtgtgagataaagagagagagagagagattgaggaggagagaagaggggaaatgagagagaagagaggaaaggatatagagagaggggagaaagtgatagaacgagagagagagaaaagagaggaagcgatagtgaggggggatagagagagagagggagaacaagtgagagagaaattggatagagagataaggagagagtgagaacgagtgatagagagaggaaagagagagagagattgaggagaagagaggaaacgagagagaaagaagagaggaagcgacagagagataggagaggagagagattgaggagaggagagaaggggggaaaggaaagaaagaaaaagattaagaggagattaaaatcgcaaaaactacttttcttatttttatttgcctgcattataaccgtttgtttaaaaaaaattttgaagtagaacggagcggttgggaaccaagcgctcgtaaataactattgaacaattctgcgcatttagctcaaatatattatttcatacttaaaaaattttatatttgttggcgattcatctcgaattcgagtttcattggttaaacattttgctgcaatacttttgcgccgccttaattgcctgaatttgtttctccaatttctttctaaaaagttaaataaatctgttcatttttgtatatttgttaggccactaaatggggattattttgacacaaaaaagtgaatttttttaaacatgcattttttaaggattaaatgttcgtaaaaatttttaaattgcgcaaaaaatcccatcggagaagctaaatagtagcaaaaggcagaataatgttgagattttgatagttctactgatgaatccaatcaacattataaaatatttgcatcatatttaataaaataataacaaattaaattaaataaaaaataaatttggtaattctactgatggaataatttcatcattatttaataaaataataacaaatgaaattaaataaaaaataaatttggtaattctaatgatgatcaatcaacattgtaaaataattgcatcatttagaataaaataataacaaattaaattaaataaaaaagaaatttgataattctactgatggaataatttcatcatttaataaaataaccaatattaaacataagaactgatgttgaattccttttttatttttttttatttttttcaatcagtttttaattccatttcaaaatgcaattctatttgggagttaattaattaattaagacataatgatgtttaattcctttattccttttttatcattattttccatcagtttataattccattttcaaatgcaattccatttgtgagttaataatcgagaaattaattttactaatccgttttaattaattagaatgaggacctaatgctaattgcggttatgaaaggccgtccgaaaattcaaatcagccaatattctgtgcaaaaatatgaggcacaccttggcattgtgtattttatgaaaaacaattggcaatgtgacaaaattgtggatgtatttgacgaatttgaacgggcagaatgccaaaaatatcgaaaatatttggacattttgtacgaatatttgttcagagagtacgtcggaattcctacagtgaaaccaaaatttgtatttaaaaacaaaattgaaattaatgggccaataatttatgtggtgaattgtctagcgaaaatttcgcgattttattttaaaccaaattatagtaaacatattgaatacaaattaaagaaacttttcatttattatttcgaacaaaaattgttgaatgagaagagatttgaataatgaaattaaattgaaaaatgagcaaaaattccaattaatg

SEQ ID NO: 21676 - DNA, 1527 bp, Heterodera glycines
agattcgaagacaaaaggacatttgcggcaaatggacggagggcgaaagtttgacaattccaacgaattattacaacgaatgatgacagtgccgccaaagtactcactttgtactcaatcactctcccaatttcgcgaaacttcccatcaaaacacttttattgccccattaatcagtccgcgtgctcttccgatgccaaccaattggtaaatatctttttttctcttaaaatggcttccatccgtctaattctgttaacaatttattagaagttaaaagaaatttataccaaaaataacagtacaaaaatttaattatgcgtaatgaatttgcaaattgatcaattctaaattaagtgaaaatatttaattcttaatttgagcttgctttatatctcccgagcaattaactttgaatattttttataatttttattatattatttatatatttacaaaataaattcatgataaaaattccaatggttcggtgagcaaatgtttgttttttgttacttcaattattcactgattgtcccattaacgccacaactaaaattgaatgccaagcggggcgatcactgcaaagtgccgacaaattgtgcatcctttcgcggcccattcttccgccggtcaaagtgccatttggccgtccgtcgtgccgttgccctctccgtttttcttcccaattgtgcccgtcttcagaaaagtgtcgtgccattttttgacttgttctcgcggcggcgggtccattccaaattcggtccgaaatctggatattttttgcattttatggtcattcattagcccttcaccttcgtgctgtttgggtgtacgaattggtctcttcaaaccaacagaccaatttggccctttccaaaatgctaaaaacgcgcgacgctttcgacgcagtggccatattggcaataaaagcgagtaattaattaaaataaataaatgggtaattagtgaaagcaaagaacttttttgtttcttggcactatcttattgattttttaagagaagctttacgaaaaatcagtaaataaaggggagggacaacgacccccggggggagggatgcttttgtttattatttgagggaattgaaaagaaaaaggaacggagggaaaagcaaacaaaataaggcgagaaaagacctcacatattgaaaaatttaaaggaaatgaaaaataaaataaaataaaatgtaaaatataaaattaaaatgaatgaatgaaaagaaaaatctttgagaaagaaaggccaatggcaaaagcaattaaattaataaatcacctacaattcgcactaacaacaaaaaagtccaaagttcgtccgtctgatcagccaatggcttattccccccccccctcccccgtgctttctctccgttcgcaaatgtcgtcgcccgccttggccaattgccaacacttttctgggggggggggggggggggttaatttcaaaattaaataattatgattaaaaaaccaatattttctgaatatattttattaaattctg

SEQ ID NO: 21677 - DNA, 2138 bp, Heterodera glycines
ttttaatttgaatccctcttatttatgcgtttatggaccctttcccaaattatcaattaattataatcattaatggagaaacataaaaaaataggcttaaagacaattgtcagtggtaaggttttgaagtaggttaaaataacatgtaaactccacgttttattcattatttacttataataaattaaaaatttatttataaattaattaattggctttttcactgggctcataatcacctgtcgcgcgtccaaacgcattccgcgcctcatgtcctgcaacgcaagctcaacagctttggatgtcaacgtgctaccgcctctgtacttgatgtcttcaattgccttacggacagtctaaatttttgaattttgtcaaattatcaattacaggttaattaatcacagtgaatcgatctggacatgatgagtccaggcctggattttttctagatccaggatacatttccaggctctttttggacaacctggactttgtcactgaacttggatttttgtgcagcaaatcctaggtccgggtcaaacacgaaacccagacccatgcttttttcatatttttaaaattatttttttccagaaccttacggtcccggcccaggccaaggttttgtcgtagcactggactgtttgtgaagctaatgatccccgtggaaatgtgcgcatcctctcggttgatcggaagccgttcaattaatgacagtgcaagctcacgctggtgctcgaaaacgttttcgcgcgaggttgacgcgtccaatataataatcttgatttattttattctaatttttaatatggaaaacaaattcactcaatatgaatgacaagtctttttcggaatatggttaaactaaataaaaattagcgcaatttttcttttgaaaaatcgattaatttttaaggataacaaaaattgaattcctaatatgtgaggatttgtccctttttcggtggctaggatttacattttcagcgcagttatttatttattattttaaaatatattaatattattcattttgaataaacttaccaaatccatgtttgaagctttgcactttgataacatttcagcaccgcgtgtttcatcaaataattcgtcttcacggcttgttctgattggatgctcaaaaaaaaaaaaattatttatgaaatttttaattaaatttgcacctgttttcttctcttaaccccagggttgccgacagagagagtggcgaatgtgggagagaaaagcataaaagcaaatggcaaaaaaaacataagtcacatcaatgctaacatataaataagtaataataataataatataattgtatatagccagggaaggatttaaagaaagtttcagaaaattttttttaattgattcattttgttgtaccaatttcataatcattaaaattttcaatgctttcgagtgtcgatttgaagcgaaactatgtatgtatttaaaattttttgaaaagagagaaaattatgaaaaataaaattgtattttttttacaaaaaagtttcagagtgccattaagggcatttcagtttcgtttaaatcattaacctcccatcgtttatgaattatttaaatatttaacaattataataataaataataataattattaatattatataaagcgcagagcacacaaaatgatagcaaaagcagaaataatatggcataaaagctttgaacggcaaccctggtcacagcgaacattggaatatttaatttagatccattaaaaatatttacacatttttaagcttagaatgtttttttagtatatttttttggcgttttgataatgataaaaattttaatactacaaatattcagcctcgaatctcaagtacagtccttgaaatcagtttaccttataaattaatagggttagtgcggttaattctttcaagttttaaatatacttttctaagattttcaagcacgaaataatttaaggacaccgctagtcattcaaggaataggaaaaatcatttttgtatcggttttagaaacttgaaaattctacaaaataatcagagtatttttgaaaatctacgaccattttaaaattaagagattttatatcgtcaacattatttttgaaacatttttta

SEQ ID NO: 21678 - DNA, 1736 bp, Heterodera glycines
attgaccatcaaccagagactgggccaaggtcagcaagcgtacttgcaaatgtgccgccaaatcgggctcggagaaaccggagagcacttctggattcctccgcagttcctcgttaagagcaaggaagagctgatagattatgtctatcctaacttccaacaactccttggcaatgacaaagagctgctcaatcgtttgattctcgctccgcacattgacacgtgtgatgaagtcaacgagatcatgatggcgaatgtgccaggtcaagtgcgggaatacttgtccacggataagccccttgacgaccgcccactggacatcgatgagatcgagtccgaagtggctgcgttgaaccggcgcacagactcgggcatgcccccgcacagtctccggcttaaagtcggatggtcgtcgtccttcttatcaataaaagtgataaggaaggactgatcaatggcacacgcatagttctggaagaacttggcgatgatcgcctcattggtcgtgttatcaatagcaatgctattggcggccaagtgagattctttcttgaaagaacacgaaatgtctatgaagacaaatcgcctggcggcataaaatatgagcgtttgcagttcccaataaagcctgcattcgctatgaccattcaaaaaggtcagggccaaacaatccgcactgtcggcattgatctggaaagggaagtattttcccacggtcaattgtatacggccttctctcgggcaaccgacggaaacaatgtccgtgttcatgctcccaaccgggaaattgatgcccaaggccgagccaaagtgctgaatattgtagctactaatatgctcaagttacaataaatagcttagtccagagcagttggtacatggtttttggagagatgccaaagcattccattcccatctgcactatgttgggtgcgaaaatggtgagaagcttggatccgggacatggaccggtcagccctctttagggcctacaggtgaattgccatttagcgctcaacccaataacgtgccaacgcctggactaagggagggaggagggccatgacgtgcaacgttagggcacttccggtttccattgcattatgcgatgtgtcaactccaattattggaggaaaccaagtgcatgtcggctgacgcaaagaccctaacagactaaaacgcgcctaggtagcgaagctcaagaagcgcgcagcgctttcccaagcgccaccctcgcatgcacacacccgctagttttggcattatatcgtattaccccgaaaaaagagatagtcgttttttgaaaaaaaattataacgagcaaaaccaatccaggtattcgttagggagtcagcaattattttttccaaggacgtccatttattttggcattatttcgtattaccccgaaaaaagagatagtcgttttttgaaaaaaattataacgagcaaaaccaatccaggtattcgttagggagtcagcaattattttttccaaggacgtccatttattttggcattatttcgtattaccccgaaaaaagagatagtcgttttttgaaaaaaaattataacgagcaaaaccaatccaggtattcgttagggagtcagcaattattttttccaaggacgtccatttattttggcattatttcgtattaccccgaaaaaagagatagtcgttttttgaaaaaaataataacgagcaaaaccaatccaggtattcgttagggagt

SEQ ID NO: 21679 - DNA, 1976 bp, Heterodera glycines
  unsure (1)..(1976): unsure at all n locations
aatcaaaagaaaacgtcaaccggtgtcgaactcataacaaaaagtattgttaatgttgttgcactaaccactaaaccacaaatattttaaaaatataaccaaatttactttatttcataaaattttgtataagatggttaaaaaaaatcaaaattgtataaatttttgcctttaattccacgaatatgccattcttaggggtgtgtttttcacccccgcgcccccgcgggggtgaaggtcgcgggggatgcgggggtcagagtcacgggggcggggacgggggtgagccccaaaaacctgtcccgcccccggggacgggggcggggctcgaaccttatttttattgctgacagccgtttttttgtaaaatcatggaataaaattcactggtaaaaaagggtcttctgagtaaaaaaaaaaactagaaaaaaaaaattcatttaagcaaaaaatatgaatgatgtcataaaattttttttattggcccatttgtgatattatttaaattagtgcgtaattatttggcgttttgacatttattgatatttcctttattttcttttcattcacttcttctcctctcttaaaaagttttgttatgtttcgccgttctccgtaatttggatttgttgattattttgttcccacctcgtcgtttgttttatttgtttgtgttcgattttaataaagtgaaagcctatttggttgtgtgttcttcgagtgcggtggatcaaaatattattgcgcatttaaccccattaaaaaatgcattttccccattgtttgtagtaacatagccttttatttgcatatgtgatcagtcgagcaaatttaaaagatatttctgtgaaattaatcgaacaaaatataatgttgaaaatcttcaagtcacaaaaaagttccagattaaattcaaagttgaagaaatgtttaataaaattcaagaaaaagaatttttgaataataattttaagcataataaaaaaaattcttcaaatttaaattcccaacaaatcaacactcttcttcttctgctcttttcttaaacatttcttctccaaacagtttcttccatcttataatgctattttggtggattttcaatatttttgcaatttcattatcactcattttcggattttcactttttatttcccaataaattttcattttttccattttttcttcctccgttattcttttcttgctaattccaaattgtttcttccattttctaagtgtttctctgttaactccaattttcttacaaatttcatcataattttgtttccattcttttcgtgaatatttacttttttgcttatattcatttgtcatttcaataaattcctgcacaatttctattttttctgcatcactttttgatttgtatttttgaagaccaaattccttgatccatttataaattttcattcgatttgtccccaatttcttcgctatttttatttctatttttccccattcttttgttgaatattttcttcctttttgctttattttctcttttattttataaaattttgcaattatttctctttttttgagttcatttcgtttttcttcttctttttcttcccatttttctccaaatatttcgccaaatgatttctgctgaagttttttcttttctgattcaattggaataattagggcaatcaaaaataaaaataataaaatacagaatttcattttcaagattttattttatttttcttaaattaaatggcaattcattttttgaggcatttaaatgatttttttctgattaaaaaactgaataaatcattattttacttaataaaataaggaaatcctgtttaatttcaaagaaataataataataattttatcttaaatgacaaataattgccanntggtaaattaatgattanataaaatttattactttctactgnagctcattcgaaataataaacatattttcataaaaataa

SEQ ID NO: 21680 - DNA, 3478 bp, Heterodera glycines
  unsure (1)..(3478): unsure at all n locations
atagtgcacaaaagggagggatggttagacgaaaagaggaatttttagaaaagagcgcaccccatctgatattcccatttttccgttccacaactggccaaaggcgactgtgctcattgacacgtagttgtccaataaggtacttggactttccacagtaaaatgtggtacaaaattttggaactgtcccgcctcacggcggggcttaaaagcattgtacagcgtaattaaaagctaaaataattttcgtatatttttcacaatttatttcaaaaagccaaaaagtccggaaccaattttaaaaactaaaatagtgcacaaaaggggagccgccgcacggcggggcttaaagcattgtacagcataattaaaaccgaaaataattttcgtatatttttcacatttatttcaaaaagccaaaaaaaatgattcaatttttgaaacgaaatagtgcacaaaagggagggaatgggtaaacgaaaaaaaggaatttttataaaaaaaacgcacccccatcctgatatttcccttttttccgtttccccaaatggcccaaagggggaatggggttctttgaccccaaatttgcccaaaaagggaacttggacttttcccccataaaaaaggggggaaaaaatttttgaaatgtgccccccccccccgcgggggtttaaaaaaaattttacacggcgaaaacaaaaaaaaaaaaaaaatttttttatttatttttccccatttttttttttaaaaaaacccaaaaaaaaaagaatttttctttttttaaaaaaaaaaaaaaggccccaaaaaagggggggggggggggttaaaaaaaaaaaaagagaaattttttttaaaaaaaagagccccccccctttttttttttctttttttttttttttttccccaattggcaaaaaagggaggggtggttttttttagaaaaattatttgtccaaaaaaagaggattgttgttttctccccccaaaaaaaaaagggggaaaaaaatatattttatgttccccgccccccccccccccggggggggggtaaaaaaaaatgtgtgtgctcgtattataaaaaaaaaaaaaaaaaaaaataatttttttttattttttttttttttttttttttttttttatttttttattttttttaataaaaaaagaaaaaaaaaaaaaaataaattttttttacaacccaaatatttgttttttttttttttgttttgttttttttttatttttttttaaaaaaaaaaaaaacaaaaaaaaaaaaaaacccgccccgcctctttttttttttttttttttttttaaaaaaaaaaacaattttaaaaaaaaaaaaagaaaaaaaacagggaaaccccccttcggggagggtttttttttttgtttttttttttttggttttttttttttaggggggggaaaaaaaaaaaaaatttttaagttttttaaaagggggggtttttaaaagggacaaaaacttttttgggggaaaaattttaatttttttggaaaaaaaaaaataaaaaaaaaaatttttttgttttttttccaaaatttttttttaaaaaaggggaacaactggaagggacagggaaaaggggtccaattttttttttttgaagctccggtcccattaaatttccccggagatttttgcaactggaaccccaggatttcgtttttgggaaaacagttctttgcgggcttccaattggctggattgcgtgattatgtgnccattccacagctattattttcncaaataaatcataattaatattaattttaataccancaaaacgattttcggggtctgaatgattcacgactttgtgcaagtagcaacaaaattcttcaatttaatttnnatctctctctcttctctctctctctgtgagaaaattttatcggataatttttgcacaaataaaaattataaaaaaaagataatttattctttcatcttttagatcattattttgccttaatttttgccctcccccactaatatttaaaagtgaacaattttgcatgagaaattctttcaaataacgaatcgctcaatgcaatttttaatgtttttcagtgggatctattagaaatcttttaaactatgccgagttcataacatttaaaaaaatgtatgttaaaagtacaaccaaacaagtatcaacaatttgaacaatgtcaattttgatttgatttgtggcaataattcctttttctgaattcttaattggaaatgaagccaactgaaaatttgaagtaattttttggaaatttgggtaaattgaacgagaatttcacgccggttgaaattccgaataatcaaaaaatcagaataggtataaattttttagagattaacttatagataggtttgtaaagaatatgggctaaaaagctccgaaatatggaataacagctcaaaaattgccaaatatggcctaaaaactgccagaaaatcgtaacactcaaaaatccaaaaatatgtatatattcacacaccgtttcaaaaaacgagacatgaaccaataaagagagagttcagagaaaaaaacatctctatttttggcgtactatttctttgtctctgttaatagagaaaacccgaattcacttcatcctgtttaacttttttttctacttgttaaatccacaataaattttgcaaatcgatagagaaaaatattataaacatttttaacgcacgaattttaaataaaaatattcatgttgcacaacggactcgaacccccgcctttgtcccttcactatcttacaaaaacaactgagccacacatgcaaatcttttttggaactgggaggcaaaaattgaaacggtgtgttcaatatttgcctaaacaaacttaaaaaatatcccaaaaattacaaaaactcaaaaaaactaaaaaaaccaaatttttattaaatcctagcttcacaatataaaatcagatacatcttaattttttttggtaataatctcattactgttgtcagcgaatttggtaaatgtcctgcgtatttttgggaaagcttggatggcattggtaataggcgtacgctatcatctatataaatgatgattaaaactgcttttattaaggtcaaaaatttaaaaaaaaattaataaaattaattttcgggattgattattttaaaataagcagttttaacagaaccggcaaaaacagacattaatttatgaattgtatcaattctcgaaaaaatgttttcaacaatcgtacttttattcaagtttttgagaaaaaatttatggaaaaatgggctgtactatagtctaccacccacaaacaaaatgaataaaattgataccatttgttctctcgtggcctgtaatgctcaggaaaaatactcctgaggttcggaaatggcaaaaaaccggtttttgaaccgngtttaataatggaaaaattgaggaaaaggggggctcctgaccctttaa

SEQ ID NO: 21681 - DNA, 1724 bp, Heterodera glycines
ttgatgatgtgaatgccttaacgcggggaagggggattgtttcttacatatttgtaagatttttgttttaggcatgattcgataggcatgataaaaaaggtttcaaaaatcacgataggcatgataaaaaaggtttcaaaaatcatgggtaaaaatgcaaaaatatccgaattttgaatataaaacatacggccggtattgcttttgcattatagttttaaggttaatgtgtgaaaagtgaaaagataaaccgtctgatcgacgcttccacacataatgctccatttggtagtccatctttttggtgccgatgtgcgattcgcacaccaaaaatttcattgcgtcatcgtccgtcagtttgaagacgtcaagacagcttgacatgttggaggcagaaaataagtcgtataatctgaaaaaatggttactgttaggaccaaacgtataaaattgagtgaatctgagtttatggggaaacgaattttcgagaaatggacaagagagggaagtaagtaactagtatttggttaggtcataataaaagttaagactaaaaattcgaaataaatacagtttatttgtattgttttaattccaaggcgtgttaatttaacttggtgcattttgtacggttaatcggcacaacgaatcaaaagaaaaacaaaacaagagatgaactaaaaggaaagaaagagagagtgagcagagaaaaaaaaaaatttttgatttcgctgtttttgcgctaaattcaaaaattgattgaagtgctttttgtgttgtctgcttttttatcgccacatacagtatgggacaaaagtataataatagtaatcaaacagtatcacagatttttttttaatcgagataaggttattttaggggttacagggtcggagaatacgattcagatatccatttcgacccaattccgaacccctgacgaacaaaaatcgaaaattcaaattttcatattcgcatttttggtctaaaactggtttaaattttttattgaaacatagatgaataatttagtttgtttcctcacatttaaaccatttcagaccaaaaatgcgaaactctaaaaatttgaaatttcgactttttgttcgaaatctggtccatggttaggatttgggtcgaaaggatatcagaatcggattcgccgatcctgaaaacccataaaatgactttaatctctagaaaacaatttctttttttcgaaaggggggggggggaaccattggcactattaccgggctctggctggttaaaagtatatacagtaatcaaattctgctagtctaattttggtcgaacacttctaaaatgaaaaatgtttttaaaatacctaaatgctaattgtaagcaatttgaacgcatatgaaaaaagggatacttacgtaaatttatttcagtggtataaaacaaagttggaaaatattgatcataggccccaaactcgaaaatgcttaaaaacggtcagaatcgatgtaaagaggttcgaaatgggttggaaaaatagaattatgggcgcgcttgccctttttcaggctgaataagggccggaattggagtgccaaactcttgtgagactcaagtgatcgcactatagaaagcacgctaaagacattttaaacctgttttgatggtaattttggagctgatcacgaacatgacctttattttggaaattgccaaccccgaaacgcaaattcaaacaaaaa

SEQ ID NO: 21682 - DNA, 1260 bp, Heterodera glycines
ctttaatttctaaaaatttagcttaagttttatcaatccataaaaataacattttttaaaattctaatgtaaagctgaatttttttattaaacttcctaaacctttcctaaagaaatgaaatacgatataaattctaaattggaaatattctaaaaaataaaaataaaatttggctttagatggcttgtaaagaaccactaaaaataaaataattttttattcagaaataatatcgcaatttaaaaatatgaaaataaaaagtcaaaattcagaaaacttgaatatatttagaaatttagacattattttagttaatattgttgtgtatttactacaacaataaaaatgtttggtttttaaccaaagcaaatgttgtccaataaataaataaataatttattaaacaaataaatatggaggacagcagggaataaataaataaaataatgaaatggtggaatgaatgggagaatgcccggagtgagggaaagggagacatatttatggggctggtcaaggggcgggacgagagacaataagagagggagtgaaagggaaaatataatcaataatcggtgtggtcccttatccaacacctcccttctttggaaaagtccctcctgcgcgagatgtcatggccggacgatgtcgtacttcggcttcgacgggtccatgtccaatcgctgaggtgccctcttggcgcgtgctgatgttcgcggcgcattttgacttcggccaattggagatttggctttttcaatctccttaatgggggtctgattcgtttggtccccagccaaatcatttccattttcttggccaagttgcggtgtctccatttctactgggaaacggcggcgaatttggttgacaaggcggtggactgcgcaacggagcgtcggaacgtcgactcgataagtcggagagttgccaactctctcgataatcgtcgccggcaaccaatttgccttattgcctttcaaattccaaatgaaaactggctctccattttggaaagtgatgggcttggcgccgtttttgtcgttgaattgccgtttcatcttttgacggtaattttgttgaaaattgccaaaatttttcaaatcaactttcggcattttctgattggtgggatggaccaatgaaattttggttcgcatccggcgtccaaggaataattggtcgggagagtgtccgtcgagcactgcacttggcgttgttctgtaggccaaaaagtgctttgggaatccaattctttg

SEQ ID NO: 21683 - DNA, 2582 bp, Heterodera glycines
  unsure (1)..(2582): unsure at all n locations
tttcagtcgtcgttttgatgaagcagtgccatgccgtgcgattnggttctggtcgatggatcttggtgtaccagtgtgatggtcaatggtgtccattgcgcggtgagtgcgggtgtgtcgggcagaatggtgagtnntctggnnccttcagttccccagagtgtgctgcgtgggtggaacacccaaaggacgtcgtgtcctcttctgtggtgatgggcttttgggccagcggatcaacttgattcctgggcgtggccgttgttgtggacgtgatctgtacgctgtagttgttcggtagtccattgtccgtggcattggcgtcgtcgtggttgtccaggcgttcggccatgtggtagctttggttgaccacgagcgtgttttggttgtggtcgccgttgtgcgtggtggacttgtcgtcgttgtcatttgtgtcgttgtccatggcggatttgttggtgccggtggagtcgttgtttggcttaggctccgatttagggcgagaactttgtcgatgtatcgctggacgtatggactgtgtttgttgccgttcttttgtcacgttccatgaagatgttgagaaagttgaaaaggtggccgccgtgccatgctttgatttccgcaattcgtttttgtcggattggttgtacttgtgccgaaccgatgaagagaaggcaaaggaggctgatcagcattagcgagctgatcacgtgttgacttgttgacggtccgggccgggctgaacttgtttatgttgacgtcccgggttcttgatccaactccattggttccggcatcgtttgtttgatccggttagcgattcgtcgtgcttcacagatttctcggttgaaaacaaagaagccggctttcagttcacgggtgacgtcgatcagatggtccgagctttggagaagatttccgccgtgcgattgttgagtcgttcaatccattctccgtagccgctttgttattcgctttctgttgtgattggccgaaacttcacttgcttgtgtgccggttgattgtatagttcgccaaatcggtcgcatgagttgcgccagacattgatgacctcggccaaatgctggtctcgtgcgatttgtcgtccgctgtccgcaacttgttgttggtagaacatttgcgcgacttcttccactgttgtgtcggcttgaatgtagccttcgtgcgccgcccaaatctcttccgctggcaagttcatgttgcgtgtcagccagttgaagagcagtgcctcgaagaaattgttggcacggaagttttggaattcttccatttgaaatcggttgcctgcggtggaaccgtaagtcgctgttttggcacaagttgtgtgcgtgttgtcacatggctgaaacaggttgaattggctgtgcgtgtttggtttggagtcggccatgcggtattcttcgagttttggcgattgtggtcgttgcggttttgttgggtgcttcgtttgttccgtatttgttgccggtgtcgttgtgtcgtcgattgttatgatctccggctgttcttcggttggtactgcttgaaggaagatcacatcttctggcaccatgtgtgagtagtatctgccttccacgaagcggaactcagcaaatggtcgttttcctccatacattcgcgagacgctgagttgtaggcgatcggatttgtgatgaatcatccatcgcccttgatcttccagttcatggagttctcggagaacacgtcctctttgccatgctgacgtccaattctccggcccgtaaatgcgttgaacgtagctgagcagcgtttcgttttcctctggccattcgtctcttgaccgttgccgtttttcttgcatgtcgattgtcttttttctgccgatgcgatgtcgttccagctctttgtcctctttgtcctttgttgattgctgctttgatttcgttggctgatctgtttcttccggttgtttctctgttggatccggctgatccataagatcgtagtcaaattgtcgtgccaattcttgccaagccttactgcgtgtttgttgattgatggcacgttgttcgtcgttttgttgtctttcgatttgttggcgtttggtttctcgttgttgctcttctgttgttgaatgtggcacttcttgaatttctttttgctgccgcttttcgggttgaagatgtcgatttgcttcttgttgacttttcttcaccattcgttgttcatgctcgatcttttcatgacgtggtgccttctgcacttttcggctttcctcgatggcctttgtggtggccttgctgcttccttgttggtccgagatggcttgaaataacttgcgtaagcctgagtcttgtagttgcttgcggcgtttgtgttgtccttgtaatggactttgctgctgaccgatgggtcgtaacagtgctgagcgtcgtttcggaattttgaacttcttctttgggcgtggttgttgactttcgtcgtcgctgccggcaagagaaactgagtcgtccatgaccgatgcgatgaagctgtgcactgcttgaattggttgctcatgaatctcagcgattggtggcttttccacttctttgaattcatct

SEQ ID NO: 21684 - DNA, 1748 bp, Heterodera glycines
agtgaaatttttaaataatatattaatgaacaaattaaagttgcaaatttacttaaaaaattattaccaatttttcgttagcttcaataataaatgggcacaactgggtgtcctagcccagaacgtccgtcctcgggaacagaggagggatccggaaaatggtacaccgcaggggtgtgacttgtctcagaaaagacgagagcgagagtttggcgagaggcgagagtccccaaaaagacgagagcgagagtttggcgagaggcgagagtaccaaaaatggcgagagttggcgagaggcgagagacgagaggcgagagttgtcccacccctggtacaccggcagaaaatttgacatcgaaacttagattttaaaaataatgaacactgattttgtttctacacagcgtcccgaaaatgagcatctgtacaaaaaaaaaaatgtgtgggtaagtggatttgtaagataataaagagaaaagcggtggatgttcgactccgttcctcaacaccaatattttaattatttcttccagaaaatgggaaattgactttttacaaataataattttgtaaggtttttgccaacaaattggacaatttggtagcatttaaaaactctttatgagaaaaagctttttctaagcaaaatattcattatttctaaaaatctaagtttgatctcatattttcccagtgtcacattttcttaaaatgaaaggctttctatcgatgtcgcattttcagggagccttttagtcaactcctcaaagaatgaaatgctttcatcattttgttaaacattatttttcaataaaaataggcaatatccatggctgctataataatttaatatacatatgcatgttataatgtcatagcaaatcctactggtgctgcaattataactatgatcattaattattattatttagtgagaatctacttttaaatgtaatttacaaagtagacaatgtccacggatgatagctaatataaaattataaattttatattagctatagttgctataatgcattatcaaattataaaagtaggaaaatatcaatataaaaggcaatcatttgttaaaaaattagaaccaatttttatttctttaagaattttttgactcattttaaagcaaatgtgaaggttctcaaaaaatctcactaatcttttttttaatgaattttaatttgttttgtctaaaaatttgaagaacaaaaatacaagtccaggttaggcatgaaaatcctggatttcctgtaaaatatttttagatgtttctaagtgaataattatttttttaaatttatttaaaattttagcaaaaacattctctaaaatggctaatttcttcaacattccccgtcgacaaacaattcaacttttactaattattattttatttaaaatgacgcttcaacaaggtgatctaattttttggtttttggcattataatctctttttatggtcgacattccgtaaattctttccaataaaatatcggaattttttcataaagttgttgaaaaaaatgttattaattttatcgaaaacaaaaaaatctcccaaaaaattgaagaaaaacataaatttctaacgaaattttctggattttttaaaaaatgattttttcccatttcaaaaatttatttgatttctattttagactcgctcattgaaactaaacaattgattgaccaagcaacgagtttgtttaaccaaataaaaaagggaaactttg

SEQ ID NO: 21685 - DNA, 1179 bp, Heterodera glycines
gaatgtcattgaaagttggtgggttgagtcccattgtttggaatgccggagattttagtcccagagattggaatgccggagaattgagtcccagtattggaatgctggtggcctgattttcagtgattggaatgtcattgaaagttgttgggctgagtcccaatgtttagaatgccgcagatttgagtcccagtgtttggaatgccggagatttgagtcccagtgtttggaatgccagagatttgagttccagtgattggaaagcctgagaattgagtcccagagattgaaatgctggtgggttgagtcccagtgtctggaatgccggagatttgagtcaccgagattgaaatgctggtgggttgagtcccagagattgaaatgctggtgggttgagtcccagagattggaatgccaatgaaagttggtgggttgagtcccaatgtttggaatgccggagatttgagtcccagaaattgaaatgttggtgggttgagtcccagcgattggaaagcctgagaattgagtctcagagcttgaaatgctggtgggttgagtcccagagatttgaatgacattgaaatgctggtgggttgagtcccagtgtctggaatgccggagatttgagtcccagagattgaaatgctggtgtgttgagtcccagagattgaaatgctggtgggttgagtctcagagattgaaatgctgctggtgggttgagtcccagagattggaatgccattgaaagttggtgggttgagtcccagtgtctggaatgccggagatttgagtcccagacattgaaatgctggtgtgttgagtcccagagattgaaatgctggtgggttgagtcccagagattggaatgccattgaaagttggtgggttaagtcccagtgtttggaatgccagagatttgagtcccagagattgaaatgctggtgggttgagtcccagcgattggaatgccggagaattgagtcccagtattggaatgctggtggcctgattttcagtgattggaatgtcattgaaagttggtgggctgagtcccaatgtttagaatgccgcagaattgagtcccagagattgaaatgctggtgggttgagtcccagtgtctggaatgccagagatttgagttcccagtgattggaaagcctgagaattgagtcccagag

SEQ ID NO: 21686 - DNA, 316 bp, Heterodera glycines
tcaaaatttataaattaaacgaaaacatattataaggggtcttgaggttgctgaacacgattatgacagccattttgaccaaatttgaacaccgaaccctaattatgaagcatgttggtcctcaaaatcgttaaaactatttctaaaccagcagtcagaaaatggtaaaagaacgtcaaatataaaagattgaatttagcttattgcgctaaaaaaccgccgcacactcgactccggcggccagtaggtggggcgagactacaggctacggaagaagtccgcgcgtgatccgcaggctggtgactgattggcgggg

SEQ ID NO: 21687 - DNA, 1065 bp, Heterodera glycines
agaacattttttataaataagagcagctcgcaatcctgggtaaaacgaagacaatgagcacgaaaagagatatttttgcttaattttgaaatgagatttcgcagacaggcaatgcttttcggtgttaatttatgaatttataatgacgcaattatcgtatttatttcaggattgcattttaccatattaggatttacggttctgccaccgttcccggctcaaaacttaggccatgtttcagggaagaccccgacccgaactcctaaatttgaacacatttcggggtataatacgaccccgacctcgtaaatttaagccatatatactgccaaaaaattaaattatagaaatgtaattcctcttttaagcaatgttgcactggacctaaattccaaaaatagttaggacaaatctgttaacaatttcaagatttttttttatcagtggcgcctttcggcaccacaggccaccctccttttactgtcaacccaaccgattttggccaaactgatgaacggaagaaacaaaaaaaggtgatcggatggtgaaccgaagagacattattttaaattctttctttttcacttaatgtttaaaattgttttattcgagttattattagggctaggatttttacgttttaaaatgtttttttgcggcttatttatggcgagaagtccaaaaatagcattttctccgaacaattttcggtttagaacgaattataaaaacacatattttggcatttttttggatttagcacatatttcagcatttttagcatatattttattacatatttcagtatttttagcacataaaatcccagccctagttattattagggaccggatttatatggacaaaaaaatccaaaatatggattataatatggacgaaaaaaccgcaaaatatggacaaaaaatacgaaaatatggacaaaaagtttctgaaaaattggtttgaatttttgaaaaaattcataaacccataattttttttgtcaaaaaaagaaaaaaaatctatttaatacatgaattatagaatttgataaatgaggcatcc

SEQ ID NO: 21688 - DNA, 1646 bp, Heterodera glycines
taatgcaaatgtattctttggtctctcggggttaaccacccgaacacctccccttttaaatgatctaacggggcgagtatcgcgcaggtggttgccgtcggcgataagggtagcgtcgttgtggcgtcggcgatcgaacggcaggcgtcggcgattgagcggcttgaatgacgtcctgctgctcttcttcgattggctgttcttccacttcgttttgagcattgatcgggtcaggcctattctctatgtcctgcccattttggtgtccatttaccattggtgccatttgaattggcaaattgaattctccattcaaaatgtttaaagggtcctcgacgatttgggtcgcctttcggaacctcagctgattcgcatgatagcgaccgctggatccgtcttcaaatttcacattgtaaatgacacccgtacatccgcagatcgttccggctttccaactttgtgaaagacgatgtcgggcccaaactgcgtcctttgatgcgaaaatttgtggacgcgtgccaaatcggcgattgaatttcttctccattgcctgatcacgttcgatcggctgaattggaggcggcttcagtaggtctaatgttgttcttggcttccgtcccaggagcatttcggctggacttttcaagtccggcaatgaatcgttgggggttgtccgatgtgtgaccaaaaatgtctcaattatttccttcactgatgacattccctcccctgttaattttctgaaggcacgcttaaacgtgtcaacaaatctctccgcttgtccattggacatgggatgatacggagccgagaacaaatggttaattcaattggccgctgtgaatttggcaaattccgtgcttttgaattgtgtgccgtgaagccaaatatcgtagtttttcaattgtaaccgccgttgaaattgttgacatttcgaaaacctcggggtatttcgagtaagagtcaacaacaatctggaaatgcttcccgaaaacggtccggcaaaatccatgtgcacgcgttgccaagggcctgatgtttttggccatgactgtaaatttgtcttaattggcgcttttgcagcagcctgacatggcacacattcacggacaaaatcttcaatgtcctgatcgatttttggccagaaaacgtattgacgtgccagctgcttcatccttttcatgccgggatgtcctttgtgcagcaatttcagaatctttgactggaagactttcgggattaccactctttctccaaacatgaggcatcccttttcaattgaaagttcttcctttcttcggcaaaaatcacggaccatttggttttccttgtccatggccttttcatttggccaaccatttttgaaaaagaaaaaagctttttatttttttttccttagaaaattgtaataaaaaaagagaaaaatgttgggatcggtactctattgtcagcccatattattttcattcctttatttctctccccttattctctcctctatttctcttcccttctgtcccccataaataccctgcgtcctctgacctccccgtcattcagttgtcaaccatttattttgcttatattgtttcaatcaatattcgccctttgtcctccgtccctcttctcttcatttatttatttgt

SEQ ID NO: 21689 - DNA, 1615 bp, Heterodera glycines
  unsure (1)..(1615): unsure at all n locations
cgcttncattgtaaataagggacggcagatcanttataaaanttanaaagagtaatggccctaagacacttccctggggcactcctgaaaatattttgaaactttctgacaattcttcgtcaattttaactttaaaactccgattttttaaaaagttagttaaaaattttgaatttttccttcaattccaatctttttggttttttgaagtaataaatcaattggaacagaatcaaacgccttgacaaaatcaatatagatgatgtcaatttgctgattcatttgtatcgaattatatatatcgtccatcgtttttaatatttgggttgtagtcgatctattttttaaaaacccaaattgttctttattaaaaaattctatactattcagaaattctaaaattttgctactcaaaattcgttcaaaaactctgcaaatagtgctggttaatgaaaccggcctataatttaatggatccgttttttcgccctttttgaaaattggtacaactaatgatgttcgccatatttccggaatttgaccggaatccaaaatcaatctaaatatatcagctaatattttggtaattggctctgcacaattttttaataaaatgtaaggaacattatccggtgaagtggaatttcgcctggggagctttcttaatatattccaaattattcccgcattcaattcaatgtcaaaaagtttaattttattctgtgctgattgagttaatggaccattaacaattgaattttctaaaaatgatttttgaaatgtttctgctaatactttgcatttttgctcattactggaatacatatttccagcactatcaattaaagtaggaatttcataattttttgataatttatttcgaataaatttgttaactgagttttgccattgggaaataatttttgactctttttcatttctaaattggttcaattgttttttcatttcccttgaaattattttgtaatttaaaataatctcacttttatcgggaaacttttttacaagcttatgcaaacgtaatttctctgaaaataagtctcttattttttgaggatacgattgttttattatcgattttagaggcctattgggtataaacgtatcatataatttcagaactttatttaaaaattctttatacttttgttcaacggtgtacactgagtttattgataaatcaattcgattttcaagtaccgctagatttaattttgcaaaattaatatttttaaaatctcttctataaactctgtgattattgttgtgtagtgaatttattatatatttaaattcacgccaaatgatgatcatttattgttatactgtatcacccaattattgtccatttaatgagtggacttcgttcactcataatcttttccttattcattcatttttgtcaacacacacagcaacaatggcaattgctccttcaccagttattgattaattcctctgactcatcacttcgttctccacttttactattttgaataaatattgtctttacaattttgttgtgccaatcgcacgacacaacaactggcgcagtgagcatttcttttcaatttcaaatcattttgagtatttg

SEQ ID NO: 21690 - DNA, 2760 bp, Heterodera glycines
ccactatgtccttgcaaatcggcatacccgtccttggaaacggagcatggacgatgggagccctgcgatataccaatgtgcacttttgaacaaatacaaaagtaaattgttttaaaaaataaaaggccggatttaaaagcaattaaagacaattatctgctttcttttaagcaatagcgatcttttagcacataaaaaatttctggcttttgattcataaaaaatgcttggagttttggcagttttttttgcagatatttgcttttttaaaaataattcttttttccaaaataatagctttttggcactaaattcatgacaaattagcataaatgatcaaatttctctcaggctcctttgagcattgtagcatattattattaaaaataaatgtgtatgtgagtcagtccttatacttaattattattcttactattttccgacaaaagaaaatagttttaaccaaaaagcagcaaagttatttttgttagcaaattgtgttagcaaatttatttgaataattgttaattggatattatgtaaatattaaacagcgtttttttcatttttgaaacataatttagcttataatcgtttatcaaatttttattaaaaaattttttttttcgtgtaaattgattttcaattaaaatattttttttgttacctgtttttttcctacattcttaaaaatatttataaaaatataaaaccgaaacattaaatctattaaaaaatcagattgcgcgaaaccaatggccgttgtgcaaaatgcggcgacccgcactcttatttttgcgtaatttgctgtggctttttttcattcaacaatgacgggtacatgtcaagaactgtctatttatattgttgcgatacccggtgccattactcttgctggtaaaatgctgacaaattcaatacatatttatatatatatataatttttataatagtttaaaaatattttattatacttaggtttacacctgaagcaatgggctcctgtccgtttaaatgtggaagtgaatggaatggtttcaaagttttgcttgataggtgagaaaataattctttttccttaattggatggtttgattttttgtaaaacttttcttatatattgaaaatattttaacaagaacaaaaagaaaaataaacccccaaaaagcgacatttggctatttataaaaatccacgttgaatttggttaaaattttctattttttagctttaaatctactttttggtagatttatcgatttttaagttattttttaagcaaattttgaatatatacacatttttaagaatttatgaggatttaaaagctttttttcatccatatttggccatttctgagctttttagtaaatgttttatgtctatattggaccattttttataagcataataataataataatgaagcataaataatttatttaattcataaaacagaaaagtttgttgcgttactgcaccattggaccctgtgtttattgatgaagagcgtaaaaaatgtaaactcaatggaaagcattttgaacctgtttttgcctcaatattaccggaaagcaataattttgataccttttcaggtaaaaatacgcaaataataaaacaaatatttaattacaattaaaaattatcctaaaatattgaaatatattttttaaaattagataataatactaatttctgattagagtaattaaatattattttcatttaaaataaacgcaaaaaattcttttataaatataataaagtattaatcgaatgcacccatttattaatttttgtaaaagtacatacatatttttcggcttaacaagcatttaataaaaaattgtaaaaagtataagcaatttaaatggaaagctttttcgttgttttggtacagtttttaaagtttatataattttttcttcaaaatttcaaaaaaatctcaactattcatttaattttattctaaattaattcttataggaatgttttttttaaatatattatttcataattattcttaaaaaatccgaatatttaagttgtattagtctgtcactctacaattcaaattccgaagagaattgtgatgccttgcgcgctctttatgtaaagactctgcgcgcaatgcttgaagatccggaaaaagccggcattaacatgacacatttcaaaacaaaggacaactttttgaaattttctacttggttttggttgtctacgatgacttttatgaagccttttgtttatatttcgagttttggttttaatgcctaggcacctatttttgtgcctatttcgccatttttggcacctatttttagggttttcgaaaaaatccatttcagagccgattatgctgtaacagaattagaagctcttctaacaattagattttgagcaaaatgaaagtcgagttgaacaatctcaattttgccatttttcatcaaatatttcgatttaaatatcttttaggaagaattttttaattatgcataaaattaaatccaaatttgaatggatgcgcgagtgggtcaaaagtgagcttcattgccgaaaatcttgacaaatttttgatttgcaattgcaaaaacaactgacaaaatttatgatgaataaaacttttaaattaatttgcacccctaattttcaagttttttttttgtgcgtatttagtgcatatttcactattttatttgcatatttatgcgtatattttggccacttttcgtgcatattttttgcagccctggc

SEQ ID NO: 21691 - DNA, 1855 bp, Heterodera glycines
caaagactaaattagggtatttcaaagggattaacatcctatttttgtaggtatttaaaaatggaatttcttccctttgaaatagccttctttctcaatttgcgagtgaaatttatttgtttgtatttttatgtgtaaactaatgctatcataaagtgctttttttgttgggtcagttttacattgcctatacagtctggccttctctttgatggaggccaataaatgcgttggatatttaggggtcaaatcttttttcttaatttttttcattggaatacactcgtttaaggtttctagcaatgtattattaaaggcgttgtatttttcgttcacactaaaatgctcgttagataaagcgctaattctagaagaaaccataatattaaaaagagaaacattcgacggaaaaaaccgtcgagtgtaaaagaagtttgttttttgtagtgtttttggaatagtcaatgtgaaaatttgcgctaaatgatccgatgaaaaaacaccaccttcaatagtacattgctttacaatttgatcatttgccggcaaaactaagtctaaccacgaatttcccctggtgggtccactcgtggcattgaaaaaagtaagcttactaaaaaagtggcaaaaaatttcaccaaatttactcatagaaatgggctgcccttccttccataccaggtctttattcggaaaattaaaatcacccaacacaacacaattatggctatagaatgtttctaaaaatttaaaaagttccttggtttgtctatatgttgtcttgggtggtcgataaacaagcacaaatctaattgattttagtttttgtaattgaaaaaccaaaatttcgcaattatattttgtttcagaaaatttaacaaaaaactcaatttctttcttaattaaaacaccgcaaccacccccacgtgttaatttttgagattttctatgacaaaaaataaagttataattttcgattatccatggactaaagaggattgggttttcctcctttgtccacgtttcagttaacagacaaatttctatgttattatttactaaatttaaagatatttcatcaattttgttgtaaattgatctaatattaactaaataggctttaacgtcccctttttctcttattggattattaggtttaacatgcttaagaccggaaaaatgcgaatttattaatgttttatgaatgtgatttggtaaaacagcaagtcaattggtgttatttttaaatgccgcaatgtctgacctcagcatcactttgtccgcgtacaccacccactcgccgccatcttcctttcttttcctgctacactcttcttgcagcacacgtcgggccttgagttcctcttggctgagtgaagggcgaattcggatgttgctcatccccaatttttgactgatttgcgcgcgcactttgttccactgtgccaaggtttgtttctgatgtttggagcacccgaaaattactttcatcaacctcgggcggttttgacctgtctttgcttggtctggggaacccattctgtaatcagtgatcgggctctagattccaagctcatcgagatctcgtgagatgtccgttcggtccgcagcgtctcgttcgtgtatgaacaactttctcatcttttatatggaaacaacaatattcatccacgctcattcgatcttgtgaccatctttcctttaatctggtggaagaacatcatacacttcaggcccagagaaatcaaatattagaccgtcaagcccacagacatagttttatatattttggccgtctccattccatattttcagaaaattttttaaattttgtcacgatattttttttattttt

SEQ ID NO: 21692 - DNA, 2201 bp, Heterodera glycines
  unsure (1)..(2201): unsure at all n locations
ttttaaaaaacgtaaaatttttcattttctaaattttgaccagaaggacctgaaaaacagnataattaccgtcactgtcccgacctacattaacttaaatattttttgaatattttaatgaggaattaatttccaaaatttcagctatattattctagttctttagccattttaaacatttataatcattcaattaaatatttttgttttacaattaaattttaaatttgtctaaaaactcactcaaggaatgataaaaatttaatttctcatttttattaccataatttagccgcaccgtgaggaattaatttgtaatttaattttaatttctcatttttattaccataatttagccgcaccgtgaggaattaatttgtaatttaattttaatttctcatttttattaccataatttagccgcaccgtttactcatttggcctggcgcttgtttgtctttcatttttttttatttcggcgctcagttggctcctcatttggcccgatcattgggccaaaattgtgataaaaatgattgatggtgatttgtgtggtgcattttccacctccccttggccatttttccccgaccaaattattcttcacgcgatttgcctccgctccgtctccggcggggcgttttggacaatcgattttacataatttttgttttatttttaatttgattgggtgcgactttctgtccagtttaattattttacattttaaaaataaaatgttacgagaaaaaaatattaattatttcattcaaattaattaaattccttcattgaataattcttgttaattaattttgataatttaaactgttaattaaatgtatattatttaattctgactaataattattcttaattatcacattaatcaaatataatctgcaattatggttattatttttaataatctagttttactgactatttttaatgtaaaacttatttcattagtttgggtaattgttgcaaataatttttctaataaaaaattgtaattaattaattaattatagatttattatgttcaaatgttttttaattataattgatgttcttgcccaaccaattaccaactcagcttaaaaatcaacaccaaaacagtgaaaaaggtcaaagaaaacggaacaaaatgcagagaataattgggaagaaaagtgagaaatttattaaaataaatttaataaaaaaatcatttagaaattttttaaaacgaaagtttttgggtttaatttacaaaaaaaaaaaacattatttaaattagacgaaatattttaattgcgaatttaaaataaaaaaccaaatatttttgaaaaacttattttcataattttgtcgttccatataaactaaaaatagtggaattatttatttaaaatttaaaaatattattaaaaaacagaaaaagcgtatgatcgtgccgatgaaatgttggcaccgccagcgtcgccaacatctgccagtccgatagaacggccattgaacagcaacaatgccaatctgatggtgcgcggatgggcacgaatttcgggacggaaacggcaccgtcggaaagtgccaaatttggagagcaataacaacagcagcaacaattttggcgtgacaagacgtgaatcaggcacaatgccgtacaacatacaggtggaataaaaaataattgttaatttactggcgccacttgcaaagtccttttgcattttgttatttgacaaatccaacctcttcagatagatgccaaattttgaatttaatattattaaatatcaattcaatcttattttaggctggcactatgtgtggtccaatccgatttagctttttatcttaatccatcagcccctatctgacaaataaataataaaataaatagtctactgtaaccgtacccccagatcaaaaacacattattttttatgtttttttttttaaattttaattttaaaagccaaaaaatctgtgtttaattatcttaaaaaatttttaattgggaaattaaaccaaggacgaattgaaaacaaattcagaatggacgtcgtgaaagtgggttctctgtcgaaagcacttggccaatgattagagccaattcgaatttgtcacgagtggcgcatttgtcggaaaacaccggcagaacggaggatgaaacagaaaggaaacggtaagaattaattgataccgtataatta

SEQ ID NO: 21693 - DNA, 1732 bp, Heterodera glycines
aggtgctaaaaactgccaaaataagtaggttttaggttctaaaaaacccccaaaataggtgctaaaaatgggaaaataggtgccaaaaagttccgaatttaggggtgtaaaatcgaaaattttcatcaaaaagcaaaaatattttgccaagtcattaaggatatacataattttcaaaatcaaaaattatcgtcaagaaaataaaataaataaattttggagataaatttttgagaaatttttcatttcttaggggcgcatttttgaaaattttctggtcgattcttagggatgtattttttgaaaaaatttttgggtcggttcttaggggtgtatttttcttttttattgcatttttgttaacaaattttgggcaaaacgccaaaataggtgaaaataagtttttttaaatttttttaggttttttaggtgctaaaaataaaaacctagaaaataggtgctaataactcgaaaagtagcttaacaacagcccaaaaaaacatgtttttcgtgcgtttcaggccacggggagctcaggaaaaaaatatgtaaaaacctaaaaatcgaagccctaaccatcacatccctagtaatcactttttcacgctcttttactctgtatgcattagtcattgacccaccatccaaagacaattcggattagaagagtgatcagaagcaactgtatttgtgtgaaaatcaaaaagaattttaaaatggctttttctgagtatttttcacaatgtatcgatgccagggctccccttattgaaatttaatttcagttttttttcaaaaccatttattttttcgttaaactgttcataaaattcaaattttgcacttcgtttaggccattgtctccaccagcggcgtgtcgaagcaaaaggtgccgaattgtgcggaagagaaatataattgagaatgatttgcttttttcgagatattattgatgctcatttttgctcgttaatttttttactttaaatttcaaaaaatacaaattaaaaatatttgtctctctacccataccccgcatttttttcggctggcggtgacattggtaaaaaataattcagagtaaaatatggacaattttaaaaatttgcacaaaaattaaaaggagagttgattcatcttattcatgcgaactcagtcaatattagaacagggagaggatttttagatgctaaaaattgcgaaataggtacctaaatagttgctaaacacaccgattcaaaaaacgagatatgtaccaatgatgtctctttggtgtactattttttatctctgttattagtagggcctgtaattatatggacataaaatcgcgaaatatggccataaaatatagacaacaaatcgtgaaatatggacataaaattgcacaaaattccttaacattttattggttgaaattacatatgagatacatttccaaattttgaggtgaaaaactcattcgattgtcaaaaaagcctcatttagcatacaaaaaagccttatttttggtcttaaggcctcatttttacaatttttttttcaaaacacgttcaaaatgttcgtatgaggattcagtcattttagctcgtttttaaggcacattttaatgcatatttgggcattttcaggttattagtgcattgggggatttttagagcatattttatgcgcatatttggatgtttgggcagaaatcgattggacgtaaacattgaaaaaaagactattg

SEQ ID NO: 21694 - DNA, 2197 bp, Heterodera glycines
tttgttcggccttccgtggattgaggaatttgagcccccccccgggaaattttgtatccacagagcaccaaaggaaagactaacgcgtcaatcaacgccaatgtcgtaaaggcaccaaacccggcgattggcatcacggacgaatcctcgctcaccgctgtgttgcaaaacgattttgaggaagtttttaagagcggacttggccactgcgcaatcaaggcgcatctgattctgaaaccggatgcccgacccattttctgtaaagctcgaccagtcccccatggtgctatcgaagcagtcgacaccgaactggaccgcctcttgcagatcggcgccatcaaaccggtagaattcagccattgggctgccccgattttggccgtcaaaaagaaaaatggaaagacccgggtgtgcatcaacttttcgaccggattaaacgattcgatcgaattgaatcgccatcctcttccgaggcccgacgtaatttatgcagctttgaatggagcagcatttttctcgaatctcgacctgagagatgcgtacctccaaatggaattggacgaaaaatcgaaaccgctctgcacaatcaacacccaccgcggcctatttcagtgccaacgtctcccatttggcgttaaatcggcaccgtccatttttcagcacctgatggaccaaatctgcgcaggaattccaggggtcttctcttatttggatgattgcctaatcgcctcaaagaccctggaagaccacttcaatgcgcttcacacgcttttccaacgcattaaggactttggcctacgaattcaactcgaaaaatgcaaattcctccaaaaataattactttttctcggccacatcgtatcttcaaatggcatacgccccgacccagcgcgctcagaggcaattcagaaaatgccagcgccgcacgacaaaacgaccctccgttcatttttgggagcgctcaattattacggacgttttgttaaaccaatgcgagaaaccagggcgccattggaccaactcctcagaaaggatgaatcctggagttgggagatgaccaacagtccgcgttcgagaaagcgaaggcaattatggtttcagaacttctgctgacccactacgaccccacacttccgatcgtcgtagcggcagacgcgtcaaaagatggcatcggcgccacaatcagccacattttccagacaaaaaggaaaaagtcatcgagcacgcctcaacagttctgaccaacgcgcagcagaactacagccaaattgagaaagaagctttggcgcttgtgttcgcagttcaaaaattccaccggatgcttttcgggcggaaatttacactgttcacggaccataagccattgctggccatcttcggctccaagaaaggcatccccatttatgccgccagccgactccaaagatgggccctaatcatggccaattacgattttgagatacggtacatcaacaccgcatcatttggccaggctgacgttctctcacgcctcatcgcaaattatccccgaccagaggaggatattttgatcgccaacatctgcaccgaaactgagtgctacataagcaccattctgcaaaccaaaacggaacaacttccagttacagcagacgaaatcgcagaggtgacaccgaaagatgagattttaaagaaaattttggcattcacccaatcgaattggccaaagaaatgcagcgacccggacatcgcaccgtattttccaaaaagggaaaacattttggaaatcgagggctgtttgctctaccaaaatcgcgttgttgttccccaatcgctccgcaaccgaatgctgaagtccctgcacatggcacaccccggaattgtgcgcatgaaggcactcgcccgccaacacgtctattggccgggcatggactcggaaattgaacggattgtccgtcaatgtgaagaatgccaaaaggctcaaaaagcaccgataaaggcaccgcttgccccttggactccaaccgacaaggtgttccaacgggtacacatcgattttgcgggaccatgccaagacggtcacgtctatttcattttggtggactcattctccaaatggccggaggtctaccaaatgaattcaatgacggccgcggcaaccgtcttcacactccgttcaatcatccaccgactcggcattcctgaagaaatttttcgg

SEQ ID NO: 21695 - DNA, 1150 bp, Heterodera glycines
ttaggcgaaacagtcttcagtcggcagaacttcggaaaactcggcccacatatggtttccactgcttctttgcgatgtcgtaccacaactttttgttgcacttcgcatatgtcaggccaagcggtgcattgtctttgttgaaggcaaagtacgctgtaagctgagtcacgcgctcttcgcctcttgccctccggtcttcttcggcttgtgctgcttcacaaactgcattcaagtcttcctcctcatctttaaggccaaattccacagcaatccggtgtccacttggaccatgcacgtccagctcatcgaccttatcataattaatattgcattttaattgttctaatatagctacttcgtgtgaacgtcgcacaagcttcgctccagttagcgagagataggcttccattgaagttatgtagcgagcaaggcgaatttgatggaactcatcgtaatccaccttctgttgcttttccggcccgcccttcacttcaataaaggccatgtccgctcccttcatcacgtatttgcacaaatacttagtgcaaccttctcctgccacaaactcggtgttgatgcttaatttgttaacttattgtgcaactattgaaatctcactaactgagatttgtatttggcagaaaggaatgcgttgaaggggacaacttgtcggttgtcgacgcggacaatcttcccacttttgtccttatactggatgaaccggccatagttgtctggattttttgacgcttccttttcggttaacgctggcggccgacgcttgtaccgagggtacgcagtttcggagtagacatcgtcataggaaaagggcttctttaattagtaaggttgaaaaatttaatgcacatttctatctaaccggaaaacgttttgtacatttcccgtcaacaatgcaacgccgaattgaacatgtgtggatattctttgttgtaattgtgttgtacaactgccgccgtaatatgacttctggcgatcgcccagacggattttccggaatttcggccgaaatgtactggaccatgtagtcttcgggcgtcatgatgattcctccactccgtactctgtcccaatcaaggatgagcgcaaaatggacatgtggcaggcctctttaattattgttgactaatcg

SEQ ID NO: 21696 - DNA, 1860 bp, Heterodera glycines
aattttttagaaaagttattttttgcctttcttatcgcggagagccttaagccaattgataatggagctcggcagaattagacgtcggcgttcttgatgctgcttcatgaattgaactttttgcgcttccattcgattgttgtagctgatggtgtacaactgggcaagtgtccgccaatcccaaagccaatgaccatctcgccagttgtagttgagccctcttatgtgcgccatgtagcgaaaccattgagatctcgacacttgatcacggcgatggaattgttgttcttgttcagccccaaggaactcttcctcctcgccaaggtcttcatcagcgtccaaaagcatattgtccttgtccctgatctgtctgtatgttgagtcaaaacgttcattcttcaacagcacaagtttaattccgtactctaaaaacatggaaatagaaaaactgaaaaggaaaccatttttcaccatagccaaattgcccgaacggaaatagaagagggaaaagagcaggatcgatgttcctattccaccacttcattgagcgcactttagtctcgtctcggcccatcaaaatgatgtcgtattcgctgactggaataacattcgcaccagtgtccaggtaaaactaaatatttatcaaaatttctaccttaagaataatttgattggcttttgattcctacttgtgcgacaagacggctcccagcggcagtttcagtgccaagtcgcccaggatgaatttgcttcacgtttgctctgtcgtctgcatgcaaatttgcaggtgcttgcgcgacatcactttcaaccgttcgttctgcacccgttttgtcggtgtctacgagaagcatccgtaattgcacacgttcttcagctggtagttgccgatatgtttcagcagcagactcgtagactacagcaagcaagtgatgctcacgcagaattctgtgaagcgcatccatgaccgagtcctcaaaaaaaaaactaaatttttgctaggaccttcctatgcttacatcgagagaattctctgtagaaatgtctgtaattcgagttcttgcttcagccggcggaattgtgaagagctggccgtgaaggtgcggcatattcccttcgggcggattgtagtcccacaacacatagcttatcatgttgttgcacttgataattcgatgaatgtcgatcttctcggtcgttctgttgatgttgacgtgtccaaaagctaactggctgttgtaggccagtgtgtgttgaaataacgaagccctccagcttttgtactgctcagctgggttccggaggatgttttcaagctctccaggccgctcttgcaattttttaaagcgttgtaggagattgacccgtcctttggcacaacatttagaataagcctttgggcctgtcgactcagatggcaagagaagtgcattgcagtagggacaaagcggtgtttccttgtaaaatcagttagaccctttcatgacattatattttttacttggctccttaaagaagtgtagtatgatggcagatggttggccttttttgagccgcatccaaaacccaaatgcgatgaatgcattgttgcgcactgatcagtaaccggagcaactggcttccttgaagacacaattgtctgcccgcttgttcttgatgcctgcgtgccaattcttgaactgcggcgaggaaccaaggaaggaggtggcatgagttgtgagtccaacaatgcttgatcaaccgaaccggaaacgattcttttcggaattttggcagaattctttggctcggaaacagcagatgctggcatgtcggctttctgaggtaggtcgtcaataactccccctcttcttgccaatg

SEQ ID NO: 21697 - DNA, 1890 bp, Heterodera glycines
  unsure (1)..(1890): unsure at all n locations
ataanttgaaaagcaaatgcatctcaaaattattntggtaataatctctttactgtcgtcagcgaaatttttttttgtagcgagcaaaatgcctaaaaaatttgctaaagtttcgaaaactttctttttttggggtgtatttttttataattttcaaaaagtcactttttagtggtttttttcgcttttttgcatttttgtcaaaatttccaaaaaatggtataaatatggattaaaaacgcaaaaaggcgaaatatggatttatatggacaaaagacctaaataaatcaaaaaattttaatgcgtgcaaaatgatacaatataaaaataaattagcttttataaaatttgtctcaaacagtgaagattcgtcaatgaatctgaattcctgaaaatcaaaagctagaatgctgatttgaaaaatgtttcaaaaacgaattgacgaatactccacgggtggcgtaccacgcggctgacgccaaccgtgcggtcgacgatcccaagaagtttgcgcggaagcggccagcgatggttgctgctttttggaattggtgatcggtgcctcggccgtaggctttacatgaaatttattgattagcctgtgtgtacgcatgctcatatgtaaaaattcttccaacttactaagtttcaagcgtagtgtaactatttgttacacatagggcaaaatcaattcacatgtaaggaatccttacataataggaaaacttgcgacatatcaatagaacactaatttagagcttgtaaagttgcttatataccttgtttgatgtaaggattgtcgaaggcttttgcaggaggccatttcaccatttcaaggcttttcaacttgaacgcgatgtccttcttttgcgcattccttttgaggcgtccacaagcttttaccagtgcagctacttctccttccagctgctgacgcctttgctcaacctcaagacgttgatcttgctttcccttgcaccaaatggccacatgtttgatgattgtgttgcgattttgattagagagaggcatgacgactaagggaaaaaagcttagcaaagtggtataaaaaattaagtaaaaatcatagttattttttaaaaaccttttgctaaaaacatgtaacctaatttacaggtaaatttattgctgacacaataaaaaaaataaatgatgaagtggggggtgagaagaagacccgccgggtaaaaaacctcaatgatttgagggaaaaaacggcaggggtctttagctgggagacagggtagtgtaagcattgcatctatatggtattatgtaatttttctcatctaacagcaatgcttacactagcatatcctccagctatggctatgtggagaacaaatatgatataaaattttgtggccggcgggcagactgtattccttcattttaattttcaaaacattcggccacccgccggccaccacccacccgcccgtcccaatggggacagccgcggggggtgacaaaacaaaaatatatgaataatcaatgaaaaaaattagtggggggtcttctccgcctcctcctcctcagccagctgcatcagccttctgacgatgctgctcttggcgtccagatggtcgacagaatgaccggttgccaacgtcagcagcgctgcgggcatccgctgtaaaaaatttcttaaaacattgcacatgtaagtacggctgacaaaactaaccccaagggaacgaaggtgctcccgctcctcttgctgacgcaatttgtcctccgcctcttgctgacgcaatttggcttcctccgcctcttgctgacgcaatttggcggcggtcttcgcttcttgctgacgtcggcgcacgatcttcccgtctaaaaagccgcaaaattaaattacaaaacaaa

SEQ ID NO: 21698 - DNA, 1392 bp, Heterodera glycines
gtttccgcgtatttaacccggtttggagcaaaaacccagtcggaaaattggggcgttacggtaaaagtgaaaaaatttttcacttttttttgttcaaaattttttttgtttgttttgatacagaatttgtttttttaacagatggtacgaatgacaaaaaaaacacaaaaaaaaaagtgagattttgaattttatcaaaaaaccaaatgcttaatgtgtccatcattctatatcaaaacaaacaaaaataaattttgaccaaaaaaaaaagtgaaaaaattttcaaaatagatcacttttacagtagcgccaaaatttgtatgttcgaacttttgttcgaattcgggttcggaaaatacaccccccaagaatcgacctaaaaattttcaaaaaatgcaccccacccttaaatcccgaaatgtacttcatttctaactacaatccgtgaataaaattatttgccttaattttaactaatttacatagagaaaatatcaattttaataaatttcacccctacattttaaactttttcgcccctatttttgcccctaatttgcgaattttttgcccttatttaggtccttaaattagaatttttccaacctaaaaatcccatccctagtgatcagcgaccccgaaaatccgtggaaacatattttcatgactttaaaaaacaaaaaaagtttttcgaaaaaatggggggtaccatctatagtattaccaaaataaattatttattaaatcatataaaagatttctagggtggttttcggagtcgctgatcacgaatctgacatcattttatggtgcgaaaataactcgaattcgggtccgggattcgaaattggccgaaatggatgccggattcgtgatcagcgacccccaaaacccctgcaaacgtttttagggcaaaaaaatttttgaaaatttttttccaaaaaagggggggggcaaactacagtattaccgaaaaaagttatagccaaaaacatgctgggacccaaacgtgagggcccaattgaccggttccggtacacactgtttcaaaaaacgagatgtgtaccaataaatagagagtgccagagaaaaacaatatctttttttctctaattttttgtctccttttggcgtactatctaatatttttattattaggaaaaacaacatttatttcgccacatatttttttctactcatacaatttagcatatcgatagagaaaaatattatgaatatttttaacgctcgagttttatttttttacgctccgatttaaaattatccaaaaaacaaaatttcaaacgcttatatcttttttcaaactaataaaaatgcttagcatttgcttaggaaaagcttctactcatcaagagctttcgaaaataccaa

SEQ ID NO: 21699 - DNA, 2055 bp, Heterodera glycines
  unsure (1)..(2055): unsure at all n locations
attcgcataacatttgtaattaagtttgtttacacattttccagaaaactaaagctcaatttgttaataagcgttttttttagttaattttttaattttaaattnaatattccttatttcttcaattatttttgaatacttgttcattttccatctgttttattcttggaatttgacttttttttaaatttgcaattgtcttttttcagagttgtgcttttacttttataatttttttaattaaaattttattcttaagaaattggcttttcattttatgccgagtttcggatcaattttccaaattcccggtatagttttactttaattttgacacccaaaatcaattacaaatttcattctcatttactcttcacaattttttattgttttataattttacacttttttcattgtttccgttttcttctattataaattgaggaatcttttgactaattacctaattgccttttttatctttttgttttttataaattttcgtaaggttaaaaaccatttattttttggcatgctacatttaaaaatgattaccttactttagttaaagtttttccgttttttattgtgtctgttttatttatagctctactgtgccgttgatgagtgtaaatatcacgattaattaatactctttggaaggcccaattaagcaattgctctgcttaaaattaacttgcttgaaaactgtgtaggcttttttatttgatcatttagcatatgcaaaacctaaaaaatcaaaattgttgaatcttattacttttctcttttgacctttcatcacattttcatgttaattacatttaaattatcatacgcattcatgcgcctgcagttctgatcagtgctagacttattaatctataacgattgggcaattctaagtacgttcgcgtttttgaataaattttaaaataaaggaaattttgggggttcgttggtgtctataggcatcgacgcgcaaatttgaaaatttctgcgtttttgtacagattcaacaaaaaaagatacattttttgggttttagcctaacttatttgcatttgttttttggacccaataacatggccaaatatactaattactattttctttcttgaatattgtttgtggcctattcttaattgtcaataacaatggcttttcacatgcaaaatagttatcccttaaatcaaatactttgtgattagttttctcttctactgaacattatataattataattttaagtgcgctcaaattgctcattatatcacttcaaggtcttatcgtcaaatcatacaatcaccgtaaagcataatattaagcattttcattctatttttgtcttatccgtagaaagtcgcaaaaacttaaatatagacaacgtcagccacaatcattatattcaattatccattttgatgaatcttgtaaattttttttattgtatctaggtcccggccggtaattaaaacctttttggtatctgcaatggtaccagttttcaaaataataagtaccagtaattcttggaaatttaggaacagggaaagaaatttcaaaagtgtagaacatcaatttataaacaattattttttattttgttatatcttttggttaaaagctattaagaaaaggacaaaatttgcataaattttaaaaattaattgggcattttggatccattttttggaaaaatatgttgacaaattgcaatgaaaaagatcgtcaattaattttaaaaaacaggaaaattctataaaaatttttacagcgagtctttggaattttaagacacttaaaatcgttgaattataaaattgtgcagaattttaaatttcacaaatttattaaacgggactttttggctgngaaaaccggaaacttttccagtcccggtcaaaaccgggacttcggtactcagttgtacgtgttttcagtaccgggtcccgtaaaactcagtttttatatctgtccatccatgattttatttttaatcattttaatatgtaattttctacttattataattcatcacggcattttctgttt

SEQ ID NO: 21700 - DNA, 3465 bp, Heterodera glycines
atttttatttatttaagcaattcatctacaaagggcagggcggcaacacaaacaatttcccatcaaagaagctttgtgatcaagtgtgcaaggtgaagttgcgcaccagaggggcgaccatggtagagtgagtgcttctcgaaagtcacggtattgagtcattactcttgacttgagaaaaaaaactcgtcaaaaagcctcaaatctcgagaaatttgggtctcgagcagcactagcgccagggacgtacccataccaatgggggaggggggagggtaacccaggggctcgtggatatggacaaggatgcagattgcagaacatttcagtgttcggtgatcaaattttacaaaaaaaaaaggatttaaaaaaacataaaaatcattttttatcataaaataaatattttttatcctaaaataattgaaattttgtaataatctcacaaattcttcattttcccggcggggtttattacagtgttttcctcacctatccattggtttttcctaaaaatcttaatttatatttctgtcgaaccttccgtccctaaaagttttggatgccctttcaaaatgcgaatgattttttaactttagccctaaatgaatgaatgatgaatgtgatgagtcggacggagaaagaatgtgctgcaacccaagaagagaattcaaagaaaaaaggagatggaaatgatttaaatttgtcaaaaaataaataaattcatagcggtagaaaatttttgataaataaatcatttttaaaaattcaaatttactttgaattaagtaagggaccggaacttttaattaataatttaaattctttaattaaaattcttaaaaaatattttatttcaaaaattcatttcttgtttcttttttaaaattcatttttctttttaatgtctgacaaatttgagtaagttgaaaattgctgagtttccattgaccaattgcttctattttaggaaactggcatttaatcttttctaatgggatggcatttgagtgccgagcattggcatttcaggcattttttgtccattttgttgagttcaagccattttttgctgtgctctttgccatatggttttatagttaaacacattcactatttaagactaatgactaataacaaatttgttaagtaggtttctctatttgagagtaattagtcaaccaaaaaaaaaagaagtatttaattacctttttatatgataaaaaagaaaaaaactcgtcataatatgttcgcccattttttcttgcatgctcattattctaaagttttatgttaatactaatttatttatatttattttactgcgggaataaattatgtttcatcattcgagactaattattcatcctaataaattaatctttttaaatttattttgtttttatatgaaaaaatgtctcgtccattcttttttgtttcaaattaacttaacatttattattttacttaaatttttgcatcagtaaatattcttcttttttttccttctctaattccccggcggtggaggaaattattttaataaaaactaaaaaagaattttcccttccgcggggggtctgtcattggcattcgtccgtggtggcattcatcaaatttacagccagcagcagcagtagaccaatttaatgtcgtcgtccatgttttatgcgcacgcaaaaataaaaaatgtgaaaagatcaaagattcgaaaaaaaagttaggattaaattggggaggacattctcaccggggaaatgctttgttttttgagtgtttcttcaaccgtggcactttcgtcccgaacattcccatgccatcgatgccaatgctcgcaaaatttaaatgataagatgccaattattaaaatttaattttgggaaaatcctaaaaaagctgcttccgtttcatttggatttcgtataagaaaatatttaattttttaaacatgaattaaaactggagtttttggattatgttttaaagcggcctatcattttctttacgctatttttacagaaattttttcattgtctccaattttttttttgtagctcacttttacatttttaatttttaaaattattaaaatatatgtgcatctttcaaaattttgcactttatgcctaaatgtacaaaaataaaaccaatcatttaccatcacatcataattattaatgcctactaaatgagtctaaatgccagacactaagcttatctttttatgatttggttgtaaaaatcggcttaaatcaaaatgcacaaaatggttgtgtcctactacaagtgatgagctgaatgcattttgttggtagtaaagattttatgccggaagcgaaggattaattctggcaaaaatgcatgcgaaaatttactcacatattaagcaaatatccgtaaattattaacagatcaaaaatatatgtgagataaccggcttaattacggttatacctataattattagtaattttacaaatgtttatttatttatttttgaattaagagaataaaattattcataatctctcctatacagtgggtagcaaaaatttcatgcgttttttatacaataaaaatactatttttttcaatcgaactgtgcctggccatagagttttgtaatattttgtaacagttttttatgggctttttcatgtgctacttactgtaaaacagttcattgccaaatttccaaaaaaaaaaaaaattgtttccccaatttatcagcatccaccccaatttttaggggtgcaaaaagtttttgatcagtcacccaaaatcatattaggaggaatgtttttcagattttttggaatttgagaaattatggctggtgctttccggcgcattaattttgcatcattaaaaactgggatggttgctgaaatttgaaaaaaaacaactttatttttttatttttggaaataattggacaataaactgattaacagttaacaaatttaattttggcgtttaatttttccccaatattttatttcatttttataaatttatattttatttaaaaaaaagagtgcaataaacttctttcattaatgtttccattctttcagctattctccccggtcccccgaggggttttctgtctgttctcaattaacgtttttgtccggtaaaattaaattaggaatggaattgcattccattcttattggtccttcataaattatatttgcatattaaagaaaattgtctaataattaaatttatataaaacaaaaatatgcttgattattaaaaattttatgtacttcaacataattatgtttccgttttttaaagcattgcgtttaaatccccaaaattgaaagccgtataattatttcacacactattataattgtctttccggcggatggatttgggttctgtgtacataagtatttaatagttcaacttttagaattatgcatttttttataatttgaaagttgaagcaaa

SEQ ID NO: 21701 - DNA, 1177 bp, Heterodera glycines
agcaacaacaacatgaagatgagcagcagaaagaccgtaccacaattttgattgcgccccgaatttggtggaaccgtcagcgttatgaagtgtttcctcaaatttctttggttgtgtatgatcgtcgccgggaaccaatgaacatgacaatcgatgaattgaaacacaaactcacccagttcctctatcgtccaatcaatcgtcttcaaaattgtaagtttgatgtagatacatatatggatggatggcagtgacggcagggaactccgattttcgaaaaattattgggccttggaaatccggtttccaaaaaaattttgagcattggattccgattcgaaaatttttgaacctcgaatttctcaaaaagtttgggcttcggaattccgaatgtttgggttctcggaatgccattcctgataattccaattcaattttttcagccgtgaatttcttctgcaagattttcgcaaatgaagtgatccatcaaaaagtgcttgcgtcactgcgaccaaaggatgttggacgaatggaatcagtcagcgtctccttgaaaaatattttgctctccggatcagtggacaatgctttttggaaagtgcattatgaacgactttttggcaagggtatatatttttttttgtttattgttgatttatgggtttttgaatgacaaaaaatactttttcgagggtttagtaggggtcaataaagaaatatttattggtttcgtttccattttagttcaagatgaccgacaaattccatatcgtgagcgttttggtgaaaaaatgagatggcaagcgaatgctgcacgcatgcttatggcgattcctcttcgagagccaaaaaccgttgatgttcctgacgagtaagtgaattgattgataatttagtaatttcatggacccgaaattcacaaatttttttgttttgtaggcctaagtcttcacctactgacccactttcaccatacgacccgtcccatccgcgtcctacacaaccggactatcccgacatgcgtgattatgatccgcgttcatttaaacctcctgaggcgaacgatgacccgcttcgactgcatccgatactgcccgctgcgccgtatgcaccaccgggcacgggcctccaccctcccagcctaatgcgcccactccaccgcccacctctttacccc

SEQ ID NO: 21702 - DNA, 990 bp, Heterodera glycines
  unsure (1)..(990): unsure at all n locations
cctcgaccttcacagcctaatgcgcccactcgaccgccacctacttaccccgacattggcagacgtatctgnnatcctcttccgcaccagccgacgaacccgtacagcgactggccctatggacctgcagcaccgactggatccggcggatatatgggcggttatgatggtggagtgtatgatcctgaccagcctgggaactcgaattatgacccatatggaagaggaggatcggacgacggcaaccacggacacgatggtccaggatcttctggtggcggtggcggcggattttttggtccttatctataagaagttcggatggaagtctatttgcttgttgctatgcaattgtttccattgtataatatgtaatgtggttaacgggtattcattcatttaacacatacattggcatatgtcaaccatactatttgtttcaataaaatatatcgcaatattggatgacatcattttgtaaaaatgttaatttacatgctttactttgtttgccttaatatttacaaaaattgcggttttggcgggctaaaaattattcttttattttcaaaaatatcctaaaaataaatgagttttagaaattgcccgaatattttttttaattaaaaattttaaatactatttgtgttcgcttgtatgccaaattctgcttcaacaccaatggaagagtttgaggaaatggtcgctgttcttcagcttgatggcgtccttgactttgacgcggtgcgaagagcagtcagttctggtgcaatccgagtgcgcgaatgtgacgcggaaacgcccatggttcaggtgtctgaattttgactccgatatacattccgaaccgagttcgaacaaaataaaagttttctgatactgagttaatgaaattttgtttgaatttttgtctggagctcgcaatttgtcgagccgatgccagattcatgctcagaaattccgagaaatgtgttttcttaacttataaaa

SEQ ID NO: 21703 - DNA, 462 bp, Heterodera glycines
tccctgtctgatcagttctcccctcccctctccgcttcatgtctgatcagttctcccctccccctcttcgctcactgtctgatcagttctcccctcccctctccgcttcatgtctgatcagttctcccctccccctctccgctccctgtctgataagttctcccctccccctctccgcttcctgtctgatcagttctcccctccccctctccgctccctgtctgataagttctcccctccccctctccgcttcctgtctgatcagttctcccctcccctctccgcttcatgtctgatcagttctcccctccccctctccgctccctgtctgataagttctcccctccccctctccgcttcatgtctgatcagttctcccctccccctctccgctccctgtctgataagttctcccctccccctctccgcttcctgtctgatcagttctcccctccccctctc

SEQ ID NO: 21704 - DNA, 2264 bp, Heterodera glycines
  unsure (1)..(2264): unsure at all n locations
acaaaaaaaatgaaatttcaaaaaagggtgctggctgcgcccatcgcggcggttggtgagacgggtgctttttgctttttggccccctttttgcgccctctccggcggcggcagcacacgcacaaaaagcgacggtgaagcggtgacgacgaagcaatcatcaatccatccttctcctaccgctcgtcccaattttttcttcctttgtgtccccccattttttgccatttcgtctcagtcactttttggcccctccgccgctcctttgtcgcgcaattgccgcctaacactgccgccccgcggatggatgagtcatcactgtttaagtgagcgaagtgacgacggtggcaccgccgccgccgcgtccaaaaaatttctgccgaccccaccggaaggggtgccgccgttacgcgttctgttggttgccgctcccctcacaatccccccccccctccctctctttctcttcccaccgttttcgacgacgacgaaacgaacgttgacaacgaagcagaagagaagtagaagattgatgttttttagcaggagtacaacaattttttggcgcagtctttgtcctttaccctccgcccgtccgttttttcattcgttttttttttgtgtgaggacacttataaaattgatgattacccaccaccaccacacaaaaacactccaaaaggggggcacactctcttcagccccccccccctgctctttttgtcccattttggtgatggaacgacgggcggtgacggggggccaaactctgacattttaattgcacaaatgtgtcattattttatttattattatttgttttttgggtgtccctcccactgttttttcaatgtgtgagatgcgatgatcaaacacacttattatgcatatgcccgcgtttagtctaacactttgtccgttttgtccttgttcccggcggaattggaatttttcgcgcctttccctcggctcatcgcaaatcgaacagcttaagccgacctccgtccgctctcgccaccaattgatgctacgattgttatcagcaaagatggcacgagaggggcaaaatggggggggggggtgagagggtgtttcacccacatgaaaggggtcccaaccnccacanccgaacacacacacaacactcatcatcataaccccatttctcgcgccttttatcggcgcgcgatatttgtgccccgaccagtcgagagtgacgagcgcaaaatgtgaggcaaaggtcgtcgaaagtgcgacgatcggcgcaaaacggattaagaaacggtgataatgaggaggaaagagaccatgtttggcggtgagtttaaaattaaaaaaataagcaaataaagaaattgaaaaattgagaaaaataaatgaagaaaaatttggaaatgatggattaatcgagagataaagaaaacccaaatgtcaaaatgaattttcctattttgaatttggatactgtcggtttggcctgtagcagcaatatgtcattattttccacctttgcggatatgccgacgggcaaagtttgtgctccgtttgtgggcgatttgattggtccgccggtgtcccctcgggctcaattcccctaccccccaaaatgccatcattcatcatccatcaaaacagtcacttccttactctctgtttattgtcttcctctcccttcatcaaccaattcccattatggccatcctttccatcttcttcatcagttacccctcccaattcccccaccgcgccatttatgtgctcttccccccctttttttcctaaaatctgtgccgccgtaggtcatcagaggcattctcatcccatcaatgtgctgctgctgttgtgttgcgtctttttcgaatattctccccggagggcccaaagatggcgtcactccaatgtgcccccgcccccccccccttattcttcggcccctttgccccggagggacgagttcattcatccgccgctccctcctcccccattatccctcccctttcattctctcggccaattgcgcacatgagcaacacacagaacacacaatgtgcgctcgtcgttcgcctcctcctcttcctccttggcattattattcattttacagtgccggcatgcacagcagctgttggaggacgacgaattgaaagaggagaacccaacggagcccaaaatctcagagagagagaccaccatttgaatgaatcagaatgtcccctaattaattataggccgantaataaatggtgatggtgatgggatgtcgg

SEQ ID NO: 21705 - DNA, 1167 bp, Heterodera glycines
gtcccccccaaccagatgcgcacagatttaggggagacagaatctctcgggaatagcttccatatagtgtgtactataattgtgcgttggatttgcgctccacataattgttagagtaccacaaacgcacacttgaaaatatctatttttttgttttcggcgcagtccccccgaaccgatgcgcacagatatatggggagaccgaatccttcgggaatagcttccatatagtctgtactttaattctgcgttggatttttgctccccataattgtttgagtacaccaaacggacacttgaaaaaatcgatttttttgttttcggggcagtccccccgaaccgatgcgcccagatttatggggagaccgaatccttcgggaatagcttccctatagtctgtactttaattctgcgttggatttttgctccccataattgtttgagtaccccaaacggacacttgaaaaaatcgatttttttgttttcggggcagtccccccgaaccgatgcgcccagatttatggggagaccgaatccttcgggaatagcttccctatagtctgtactttaattctgcgttggatttttgctccccataattgtttgagtaccccaaacggacacttgaaaaaatcgatttttttgttttcggggcagtccccccgaaccgatgcgcccagatttatggggagaccgaatccttcgggaatagcttccctatagcctgtactttaattctgcgttggatttttgctccccataattgtttgagtaccccaaacggacacttgaaaaaatcgatttttttgttttcggggcagtccccccgaaccgatgcgcccagatttatggggagaccgaatccttcgggaatagcttccctatagcctgtactttaattctgcgttggatttttgctccccataattgtttgagtaccccaaacggacacttgaaaaaatcgatttttttgttttcggggcagtccccccgaaccgatgcgcccagatttatggggagaccgaatccttccggaatagcttccctatagcctgtactttaattctgcgttggatttttgctccccatgacctgtttgagtaccccaaacggacacttgaaaaaatcgattcttttgttttcggcgcagtccccccgaaccgatgc

SEQ ID NO: 21706 - DNA, 1195 bp, Heterodera glycines
gacaaaggcccggacattggcacaaaatgccatccgccggcgtctacagcacccgcgccttcaccggacccctcctcctcctcctcctcctccagtcgctgtgccaacggcacgtccggcaccgtctcctgtacggaaggcaacggagggaagaagaaaagttgagcggcacaagcttgttggatgttacggcatgaagacgtcggaaaagcagccgaatcggaggcgaaaatcggaggattggacaaaagaaaaaggagaaggaagggacacagcggaagagaagggaaaaaatggggaagagaaggcaaacggaagagggaaacatccatcggacggagaaaaggcggcgtatcaaagggaattactaagagaaagaaaccggggaaatgagaaattaggtaattgtgtcgaataattcacctacatatattcctttttcaaatagtgattacgaatttgacataataatggtcttatgatgtcatctaatccatgattttatcaaatctatgactttcacgtcatggaaaggacccgaacttgacacgggggtcagtggcagttcgtacaatgaattctaagcctttgaatgcactttctattgtacgaactgccatgaaaccgacctgggtattaaaaaagaactccaattgtcaagaaaaaatttttgaaggcttttgccaataaaatcttaaagtccttggcatcattcggagactaacgaagaggagaagcttctaatcgcaattcccatattaaaaatggattatgagtgactcattttacagattgccggaaattaattgagttatctgtcgaagcaaaaaatggcaaaaaaaacagataaaaacaaatgagcagaaaaagtgatgcaagttttgcttttatttattgaaagaatgcgtcaaggtcagctgataagaagaatgggcacacagaacagaaggcgaagaaagcaaaaagaaaatatttattggtggaaaatgccaagtgaatccatcaattaggggggggggggggataaacaattgggatgatttttggggatttggaaagtattgggcaaattggtggggatgaaacaccctcaatgttatccaatacgatcaaagacccattgcttgttcgttgtttgcgtcccctgcatcataaaacacgccccagcgaagatgtatttacaccatatatcttt

SEQ ID NO: 21707 - DNA, 1856 bp, Heterodera glycines
ttcagctacattgaccatgccgtgatcacatttctcaatgccaacaagagaatctttgacagaattggcaccaatttggaattgtgtatttggggttgtcgctaaatactaaatttcattaatttgactaagtttatgctaagttatgattaattttagcaaattaaattaaaataattaaatttaattattacgaacattgatacttttgtcacttcggctcaccacgatttcgacagtaaaaatttttcaatcgtgagctgaacatttgaaaaaaaaaaaaatttcggcccgaagacaaaaaaaggaagatcttcggcgattctgccctccgccgaaacgtgatgattagagatcgacattttgaaaaatgcctggacctggacctggacctggattccatgttggacctggacctggatttcctggacaaaaatccaggaaaatccaggtccaggaaaaatccaggctcctcgagacctggatccaggcctggacctggattttttgaaatttattttaaaaaccaaaaaaatgtttgaaaaaattaattatttgcgtagaagcatctaaaaatatctaataaataataataatgtgtttttaaatttatttaatctgttttttaaaacttgaaaaaacatcggtctgcacgagcgtctggaagagcaattttgccctatagcggcgcccaaccgctcgttccataaatcccgatctctggcacttttatcgatcattttttgacattttgtttaatttaattcgaaaattatttttgtctaattagatagtttaatagttccaaacaaagggggggggatgagggcatctaatttattaccaaaaacaagttttataatttaaaaatgagcaacagtcatcagcagaaacgtgaagaatttcaaaaatattgcaaaaaaaaaaaaatttttttttttgattggttcaccatgtttctttttaatgagtggattttttctcattaattttgtccaccataccctaaaaaaacggtattgttaataggtttgtcgcaattaacagtgtgcacaatgtttttaacatttactgagttttttttgttcaaattgatcacatcatttgggccaagaatttgatttcaaaggaattttgcgctatatgttaaattttgaagcagtaaattcattttgatattcttactttaatgtggaaatgagttaaagaaataaatgctaattttattttacattttacaaaccttttttgtatgacgttcttcgaatatacataaaatattttgtttaaattttcttaatttaaccgattttcattttattttaagttcggaatcagcaatcaaagcctatgaaaatttccggaatcattgtaatcaatcaattatgagcatctttttattttcaaataaatcttaaatattgatcctatgaagggaaaaaattaatttaaaaaaacattaaaattaaatataattaaattaggcaaaataacaaaaatatgatcataaattaaaaattataaatttgggcacaacaattaatacatttaataattgcatatattttataatttcgaaaaacaggaacagcttaaaaaattgattaaaattcaaattaacttcaatcaaattgtttaattattaaaatcatttaatttttaattatattattattattttacatgttattttaaatttgatttgaatatttttttacatattaccacattttcatttaaatgttttatcagatttgtcaccaaaaaacacctgatttgtcatctcatggacaaaaatcacaaatttttgacattaaagccgaaaactttgagtgatatgaataagaaataataat

SEQ ID NO: 21708 - DNA, 1035 bp, Heterodera glycines
  unsure (1)..(1035): unsure at all n locations
tacctcttctaatcgctgttgtacctcttctaatcactgttgcacctcttctaatcactgttgtacctcttctaatcaatgttgtacctcttctaatcactgttgtacctcttctaatcactgttgtacctcttctaatcacttttgtacctcttttaatcactgttgtaccttttctaatcgcttttgtacttcttctaatcacttttgtacctcttttaatcactgttgtacctcttttaatcacttttgtacctcttctaatcactgttgtacctcttctaatcactgttgtacctcttctaatctctgtaaggccaacaaaatttgaataacgggcgcgaagcgcccgtatgaaccaacaaactttaaataacgggcgcgaagcgcccgtccaaggccaacaaatttaaaaacgggcgcgaagcgcccgtctgagtccatcaaaatttaataacgggcgcgaagcgcccgtccgactcaacacaatttaaaaaacggccgcgaagcggccgaaaagcacaacaaaaattagaaacgggcgcgaagcgcccgtctgagtccatcaaaatttaataacgggcgcgaagcgcccgtccgactcaacacaatttaaaaaacggccgcgaagcggccgaaaagcacaacaaaaattagaaacgggcgcgaagcgcccgtctgaggccgcgaagcagcctaaaaatcgctgataattttttaaaaattccaaatcttttcacaacccgatagctaatctaggtagcgaagctcaagaagcgcgaagcgctttttcccagctaaatagccgacggttcacgcacccgctagttatatatacgttagaatgataaggagtttcgtttcaaaaactaatttgagaagaacgggaatagctgnggggctgaaattttgcacacaggggtaactcgagacggcgcatccgggaaaatacggatttttttgtccngtggccaactgagtcccagcggctcgaaaactgactttgnccgcagtctcagtgttacgaaatttttt

SEQ ID NO: 21709 - DNA, 1271 bp, Heterodera glycines
gattccttcgttttttttttgaatttcgccttcatacacctttatcattggaaaaaacataggtgtaagaaaacgctcctcacccatcccattaatagttactagtccttatttataaggacggttgacattgattgtcctggtgtcaagcccatgttaaagcaggcgtgcgatctgtcccaattaggaggatccaaatccgacaaaatgaaaaagtcctgatttgtcatccaatttatccttggttttgaaaatgttcagatcgcacccctgcgttccaagcatccgcatcaaatgattttgcttaattgtccccaacattttatgtgagtacaacaaacacactgactgactgattgattaatgatgatcatcctttgacattttgtctctatgttccgtttttttgacaattttattaattattatatgtagaatttcttgtagaactttgacaaatgaataaacaaaacaaaaaaacagtctcaaaaatggcaaaattgtaaagcaatggcattggcacttaaaaaggcagtaaacacttacgactttgcattttcgggtcaaattcaacaaaaaaaaaatttattattaaaatatgtattatatattattttttggaaaagagcacgaaagtagattttaagcataaacttcaacaaaaatttcgaaatattttctaaaacaaattgcaaaacgaacatttttgcggcctcaccccttctctctcccactgataaggagtggagggggaggaggtgttaaacgttatgataatgataataatgatgactaaattaccaaaatcaaattcttggggggagggcacaaaaatttacgacggaatgggcacaaagggcggcgacaagtgattcgaaacaaaatcatttttccacgattcgatcggcaaacagaaaaaaaaaatgtgaatggcccacgtcaatgatcacactcaaaccgaaaaataaatttttgaaattttttgttttgttttttttcggtgttggccattaaaagggacagacgaataagaaaaataaaacatttggccaattccgtggaattgcttcgagaatgattctttctcataataataggcttgcttaagaatgatttttcgagaattttggtcatctctaagaactgagacgaaataaaaaaggatttataatatccatttccattgtcaatgtatttaaattcgtcctaagatctccggcttttggggatcttatagcgccatgtaaatcaagtagtgaaattattttata

SEQ ID NO: 21710 - DNA, 2189 bp, Heterodera glycines
tttttgaagagatttgtttttctccaatttcagattcatctttaagaaaataaatatttaagcctaaaattaatctattgtaaatttgccaaattcggcggcatttggtcagtttggagcagccgatgcccccccccccccggcgggcatggcattaatcatccgcgggtctgctgactgcttccttccgcccccggggcgatgctgggaaagtgagtagggaagaagtaaaagtgacggaggactttcaaaatgaattttggaaattgctaaaatgtttaattggattgatcgatcaatggcaaaagaaacaaaaacatttcaaccggcaaattggtacagagaaaattgttaaataatttatttgaattcagaaaagggaaccaaaatgtgatcaaattgcaatgagaaaagccgttcttctcggatatttttgaaattagtttgttaaggatctcaaatttgttaattaatgacgcattggtctttaaaaataaaatatgccttttgaataacatccggcacttgtataaaatttgtcattatgccacaggttaaaacttttttatcaaatgcccttgaattttgaagtaaaatggccgggcccccgagctttggcattggctgggcccatgcttccgttcaaaaaatccgtttgccggacctcagcacaaccaagcagcagctcacaatcagtttatcgagtggtctcaccactttgaccactcctttaaaaaagaaacaaatatactgtaattggattattgtaggtatcatctaacgcttgggtttcaaatcatcttactacagtatctcttttcaagaaattctgacgcgttttcaactgatctgttacgccaggaaatgcgttaaaataaatataaaaacgatttatgcatattttattatgttttattttgccaaaaatattaatgggtgttaattgctccgctgtggccaatgcccgtgccaattattgtcctaatcatcgcactaatcgctgtcatcatcccaatcagcgttagaagcattgtctgcttcttcgtgcccctttccccgttgcttttgctccgttgcaatgcttcggcggatggcccaacggatttttgtggttggcccgacgaggcggcggaggacggcactgcccggcggcggtgccattcggacattggcgtgaagcggacggaggacgaccggtcggagcccgcgtggcaatactttcggcgctaaaattcaattaaaaattttatttaaaatcaatttgtaaaaggcatacctcacaaatgcactcctgaatgtccaccttttcgtgcaatcttcaaaatgaaaatagaagaaatgttcacggtcttttaatatttggatacggtaagggacttggtaaggatgagactatttaaaagtttcccgtttctgccccattttggcataacgtcatatggttcctaaaattgctaaagccatgcaatacttctaccctttttttgttttttaggtcaaaaatgtcaaacagttgtgatcagaagaggcgaatttcaccgactgttcgttcatttttggcaccttttgcacacattgtctccacgccgtgccaacacttccgcgtccacggcgccgaagcgttcggcacagccgcgcattgtgaaagcggaacccgagccgtgatcagtgagaataagcgtcttggagggggggggggcatttcgactttcgaaataaaaataaattttttgatgccctcctctcccacctgacaatggctgaaccccctgcaaatttgccggggcaattcgtccaactcgcgcggctccacacaatctctgcgcacaatttgcgccgttgggaaatgcgcgcgtcgaatttccaacaaatttttcacctttttaaggcgaggggaaaataaatttattctttgtcaatttatccattttctgtaggtttttgctgcactgtttgaaatccttgggaaaattggaaatcctatgtttttttgagatcgacctgcgcctgggtctaggcctcgaggggcctggatttttctggttttttgtccaggaaatacaggtccaggcttttttcaaaatgccgatctctatcttttcgccccatggggtgtgtgtgccgtgtgtcgtgcccaccaaccactctttgcattggctctgagatggcattccatgggctggcacagt

SEQ ID NO: 21711 - DNA, 852 bp, Heterodera glycines
atttggatttttgacttttgttcgaattcgggatttcgaattggccgaaatggatgccggattcgtgatcagcgacctcgaaaagcccaggaaatttgttttatgacattaaaatttttgaaattttttttttcaaaaagggggggggataaactacactattacccagaaaagcactgaccgattggagatggccggacaaaatcgggtcgagaaatgaaagcgaaatggcacaaagcacaacgccaaataccatcaggccacagggacggaatcttcagcatgcccaacattcccagggggtcctcggaaaaatcatctaaacaaaaaggaaacatttgaaaaaacgaccgaaaaggctgaaatttctcacagacctttgacctcatcgatgagaaaataggcaagaatagtggcagccaacagcagcgagccgagcacaaagaaaggcacttggaaaccgccgaaattgtcgtacaaaacaccgccaatcagtgggccgacagtgaagccgaaacccgcgacggtttccataaagccataaaaaaggaattaatttgcttttaatgcctcaaatcactcaccacaataacggatattcggccgggaaatgacttggcacttattgccaacgacgcagtcagaaagcacgcctcgccaagcgcctcgatgaaacggtcccagaagaagtggaagccgtcatgtatccaattcagagtactgtgaaaacggaaggatataacggacgaaatgggaatggaaggaacaacacattcagcatgggcaaggcttatgaagctgaagcagttcagttttggaaacaatgatgactatgaggaaggaacccaaaat

SEQ ID NO: 21712 - DNA, 1815 bp, Heterodera glycines
ggaagtttgggcactacttattaatttaaaataagaaacttttaaaattcgtgtattacgctgagattcattcttaaaaacccaaaacagtcttaaaaatttatattgcttgaaaattaaaaagaaaaatctgtaactattatcagtcgataacttatagctatttaaaagtaggttagaagtgaatataacaattttcgcttgcgtttagacccgaatacctttttatgagactgaaaacatcgagaaacatttattaattgagtggacatttcattaaaagcttacattccaaatttgcttaaaatttactatgctataattagatttataacctttttacacatttaattatttttatttttttgaaagccttccctttggtgtttaaaaaacgatcattgtgagaaaagatcattatttaaaaacccatcaaaatgggcctaatttaaaaaatcatcattatagttaaaatcaacattttccgcaaaaccgttaccaaattaattagaataatttactttaataaatattaataaagatgaataaagttttataacaacataaaaatatcactgtataattgaaattattctaattaattttggaaagcttttgcagaaaatattagttttaactataatgacgcttttttaaattatgcccattttgattttttttttataaatgaggacatagcagcatatttttgactccaaaaggacacaaaattcttatttattttgccactgtcgatctgattttaaaccccgattcgaaactccgaatttttggttgcattttctcaatgacatttccccttcgtattagcgaaagcattttttgtgactttttttgacttttttacactttttgggattttatgacttttttgagtttttgcgacttttttagtgatttttttgactttttggggtaaatttgaattttagcgaagaaaatgccgaaaaatacaaagaaaattcagtaaaataaaatttggatcgataaaaagacaatgaaacctggatgaattttttcttaattgttggaagaatttcttttctattcatattttaggtacctatttataaaattaagcgcctaaaaataagatcaaaatgttattctataaattattaaaaatgtttatcaaaaatttaaatgaatgaattgaattatgaataaatttgctttccatggtaattaataatgttcggacatattactattaataattctgttgattataatttgatgaataagaatagattaaattttaacacaaaatattataaattaaatatgtgattccggaaataaaattaaatatgtacaacaaaggttctaaaattaaaatctactaaactatgaaataaaatcactaaaataacttttaaatggatcattcaattaattaactacgccgtgataatttgaaaattgaaattataaattaaaatacaataaaaataattacaatataaaatagtgctaaatacaaaacagtaataaataataaaaaatttacaaactaagattaaaaaaactggtaattttttttcttcacaaatttttatgaaaattttgcagacttattataaaccaaaaattaaatttaaataaatataatttgacaaaaccaagtcctgcaattgagtgacgagatcatgaaattttataaggcaaaataaatttacaataaagtaaagaacattaatatgcatgataataaataaagcaaattattaataaacatttaacaattttaatcaaaacaatcaaaaatattagatatcaatttaggtaaaagaa

SEQ ID NO: 21713 - DNA, 1427 bp, Heterodera glycines
ttttgagtatattatttttataaaatactttttcagaagggagttctgattttttttctgaaaaatcgaatttttccagaaattctggaataacttttttattttggaagatagaaattccaaataaatctcataaaattctcccaatttttctctatttttaaagctttattccactaaatttgaccaaaaacgaagagatttatgaattttcgaaatttcacaggattttccggggctcaaattttgacgatttttcaaaaaattttaaccaccttccaaaaagtctgaaacgcaaaataaagcgtatatacgtattcagcaccataaattaggccataaaaatgcattttggctaatttaggagcaaaaaaatttttcatgaaatgcaaaaccatggggtcccccctatggttttgagtttcaaaatcacaattaattttataactttttttaaactcatggtaaaaacatgagataaagtacattagatagagcttaaaattttctacaaaaatgctctaagacaaatttccgctaaaatcaacgcctgacgagttataagcctcaaactgaaatggggagctcaattccggaaaatttttctatttccggaaaattttgaaattttttcaaaaatgccaccaatcgatagagctcgaaaaacggttgcttgaaagtggtctccgttttcctgggaaaaatctgcaaaaaataataaaattcaaaaacgaaaaattttcgagggggcctagctcgaaaaattttgaaaattttcaaaatctgaaaacgccatcggatgcagctttaaaaactacacaaatgctcaagcggcgccaacccgctccgcttaacccccagcgagttattcccgaaaaacgtaaaaccggcattttgagcgccgttcagtcgccaatttctacaggctcggcatttgatctgatcaaaaagtgatcagtgacaaagttgtagccaacatgtctggggtgtgccctctcagcagactttttccgctcccggtttccaggaaaaagttacagcccgaaaaccgagctcgtttttcaaagtccgccgtttcagcgccgctggcgctcagttggcctccggaccggaatttccttatttttcccagatgcgccgtcaaaagttacccctgcctgcaaaatttcagccccctccgggcaaaccacggggacttataggacttcgttgctagtgcatgcgcggacgccaagggattttcggtctacaggcatcgcgaggaggcattcataattttgtggaggactttcggccgcttcgcggcctcaaagggtgctccgcgcccttttgtattctaaggtttaattcggccgcttcgcggcctcaaagggcgctccgcaccctttttatatttaaggtttaattcggccgcttcgcggcctcag

SEQ ID NO: 21714 - DNA, 1993 bp, Heterodera glycines
tgttgcttcctttcggggaaagcgaaaagcccctggctcccctagcttgggaaggccttaaaaaagtgtttaaactgtttctaaatatttaaattacaatagatcttggctcttttgtgccagccttcatcttggtgtcgctgagcaacttaagagcattcctgtagcacgtggccaacgacaacttttgttgatcagtcactgaaccgccaaccctcgggccaatcgcatgcgcaatgtctaaatttccaaaatttcatttttgtaaccaacatctattggctattacattggacatcatttgctaaggcgccaaaggttggtgtcattataacacatccatcggcaattggtcctccgttggaagcgagtatcacatccaaaagagccttcagtttgatgtgctcaggtgcgcatgcccggtgaatcgcatcatcaactccgcctccttttgtcaaggtgttgtttgctgcgttgacaatcatgaagactttctgcttcgtgatgtcgcctttcaccagtgttattttggcgagatgttgttttgtcacgctgctttccaacaaaacatcagaagtcgaagaagagaaggttcttgttcgtgatgttggtgtcttgaacattggctgtgcgggcgaagctcttagcagatcatcttcaggctcattgtcagatggtggatggtgtgggaactttgaaaaattttcaaaaaaattcaaaaaccgattatattactggatcgcttgggtcgtcgggaagcgacacatccattgagacatcatcttcttcgtcgagcaattcccgcatgacgacgtttttgacgcgccgatcattgcgggtggtgcagactcggatgctgttagcgtctcgcacccgcgacaatgccacataaagctgcccatgggagaaacactgggcggaatcgagcagcacaccaactcttgccaatgtttgtccttcaaattattttcaaccataaattttaaaaatcaatatattaaccctgcgatttgttgattgtcatcacgcttccaggacgcagaggaaattggatgcgctcgcacttgaatggaccttcatgaggtgccttcggatcaccaccaaaagtgaagcgtgccgcatgtagatcgtgttcattgccgacatgtgttcccgtgagaatacggcatctgatgatgttgtcgaaaagttcagtgacttgcacccgcgttccattgcagagcccttcttccaaggagatgttgcggatgatcatcatcactgcaccgacgcgaacgcgaagaatatgttccggaatccccggaggagtcatccggctcagattttcgtggtccgcatcggcggcaacattctccaattcgttctcccccgtctcatccaccaacggaagggtcactgcatggtagacacgctcggccgtgttgagtcgttcctttatcggaaaaagcttacaactaatctatcgactttttctaccattattatttcattcaatgtcagcgtgtcgcggttcagagggcacagaattgctcgttccgcaagctgtttccagttgttggttggatttgttagcaggtccgccggaaaaatctcgttgatgagctcatcccgggatggctgaaccatcaaagacggcaacttgacacggccttgactgtcgttgatggtaccagtgccaacgcgcttcaaaaatgctcgataatgatgttggccgggcagtaagcggtggttggcacgcagtcgcacagttgtaaagttgacgaacaatgacgaattcttgactgaagcctcgagttgatgccggtcggtccctccgggaatgacaggggtcaactgcttccagtcccctccaatgagtacgaccttaaattgttagctcaaaaactcaaaagcaaatgtcaactgtgataccttccaggcaaatggaatttccttgagcttatccggcgcacctaaagaggaaggcggtccacaaattcaagaacatccttgt

SEQ ID NO: 21715 - DNA, 1479 bp, Heterodera glycines
  unsure (1)..(1479): unsure at all n locations
acaacccatgaaccctcagatggtccatcctttgtggaaacgctggagtccgtcgcgtttggccctaatgaaattgcgtccgcccgtgtccactgggcactctttaccagcatatgattcaccgggggcggaggtccctttcctgtggaatcgctttaaagtgtctcagaagtgttgctttgcttgccaagtacatttgatggagcagagtgaagtcgaccacaggtacccttctccaactaaattgcacgaacatcaatgagtggtggggggggggggggggaaatgcaatttggtcccaccccctcccccctcacttccgaaatagaaaaatgaaaattttttattaaaaaataggaaaatacgaaataacatcaaaaatctcaaaattgtccccggcagagcctatcggcatagtcctccggacccaaaattcacttacaaattaaaatttaaaactggacccaaaaatagcaaatttctcggaaaatctgaaaaaataattttttgacaatttcaccgagaaattttccaattttcaaactgaaaaatttttaaattttaatttctccaaaatttcaaataccccctcccacacttatatgccttttggaaaaatttcaccagcctaaatgcacatttttaaggcatttgccagcgcgtcctctccagtcaattttatcattggcattgggcattcgcttccgataaatgagcatattgatctgatcaatgtgtgtacccgggagcgattagtgttgaaacattttgctggtgatgaacacaattcattgttgatccgttgtccaatttcacgcgatgagcacaaatgggcccagtgggagaaggaggcgattgagtggcacttttgtgacaaatggaacagaattatcatttcataattaattgatcagcagaggatgtaatgacgttgggtggatgatcaattttattttatttgaaatttaatgtgacggaaaaaaatatttggattgagagaagaaaaaatttcttgaaaaaaaaattaatcaatccagcggagccaaattttaaattaaaaaagggctcaagattgaaaatttggccatttaaggacaaaatctgttaatataaatagcacacaaattaaaaaaaaattcacgcctgccctctggcacaaaaaaaaataggaaaaataatgcggtaaaaaaggtaatatttgcagatcacaccttaattaaggaattgtaggaaaactttcgaattcaaaaataataataataattttagattttatcataaaagaaaaattgtgaaaaatttgatttcgaaaagtttggattaaccaaattttttgaataattcaaaaaaaaattttttagaatttctcacagtaaaaaaattttcgtgtttcgcatttcgtattttttaaagaaatattttattatttcttacccaaaatgcagggacggccnccaagggggggggggggggtacgcg

SEQ ID NO: 21716 - DNA, 1205 bp, Heterodera glycines
tcggtagtattacggaagaaattttaatggaggttttattcaaaagagcaaataaccaccttaaaataaatgggggctaattcgccaagttcttgtggaagcggaatacactcaaattgacatgtgtgtagttctcgaatatttatggcggtctgagtttttaatgcgtcattacgataggaattaatgatgccaaacccacctcaacaaatacacagtccatgccgtcctctcctttttcgtcccgccacatcgccaccaatcccttcatccacaatttcatctcttcatacacatcctcatccatctgcacaagactcgcacaatgtgccattggcgcaatgtaacaatgctcaggggaaagaccgtcccaattgaccacggagagatatgtctgaaaaggaaaaaacgccattcggttgttgttttaattagcatgatatagcttaaagaagtgtgaatttcgttgacctacagtaccgtacctttaggccataggcaacaatactgtgtttctcaaacagtttgctgttgatacattttgaacaggattcgagagtacgttcgaccaacttatgctctgaaattacaaatcagtttcatttaaagtctgtgaatgttagaacactgcctattgcagtttttacgtgacagattccgttttcaaaaaacgtaaaattaacgatgagtttgggattgaacttttcgattcctcgcaagatcaaatttgttccaaaacaaagaataaaaagtttataaaaaaccatcttctacaaaatgtaattaaataaatgaaacggcagcatgtttttttaaattattctctttcagttgaaggtcaattcccttaacacatttaatcagtttgaagacacatttggaacaaacagcgaagaaattaatgacgtaatcgtgtttctcaaataaacagttgaacgatggtttctctctctcttaatcactcacatttttttcttgtttgatttatcccctccccgttcgtcccattcttttaacaaattctcgcaattcttttttgtcgtatttaaaggcgctccaaatgatatccctttgacacattacactaaaggaatccgattattcgcattagacagctcaaagtcgccactgttaacaaagtgttgcttattagcctatgttgctacgttgtttcagcagtacgaatgtccaaaaggagcatttca

SEQ ID NO: 21717 - DNA, 930 bp, Heterodera glycines
ttaatattatgaaatctctgtccagctttgaatgaattttctgaatttttattggcgctaaaattactataggaattgctattaaaaatgattatacacttaaaaattcatttttatgttagcaatatttatatattttgctaaaaattgtaacggaaattgaggatggaatttcgtcctctgtgtgcatcaaacattcattgcgaaatgctcaaaaatttaaaaataatttcaaatgaattttgcctatctgtttacccgagtaaataataaaatttctttagcatattattcaaagcttttttgtaaggttttctttttgttctgcggttgtttggcttagaaaatgtaggaggtgaatagagagattaattaattaaattttcatcacagttatttgaagctgttggatatacgttaatattatgaaatctctgtccagctttgaatgaattttctgaatttttattggcgctaaaattactataggatttgctattaaaaatgattatacacttaaaaattcatttttatgttagcaatatttatatagtttgctaaaaattgtaacggaaattgaggatggaatttcgtcctctgtgtgcatcaaacattcattgcgaaatgctcaaaaatttaaaaataatttcaaatgaattttgcctatctgtttacccgagtaaataataaaaattttttagcatattattcaaagcttttttgtaaggttttctttttgttctgcggttgtttggcttagaaaatgtaggaggtgaatagagattaattaattaaattttaatcacagttatttgaagctgttggatatacgttaatattatgaaatctctgtccagctttgaatgaattttctgaatttttattggcgctaaaattactataggatttgctattaaaaatgattataca

SEQ ID NO: 21718 - DNA, 2018 bp, Heterodera glycines
aaattgaaattcccctacaatattttggcaagggcgcaatcatcccttggctttagagggggaggtgcgaaggcgccgcccgaaattttcactaattttttaacaaattttcactgaaattggcgattcttaagtcaaattttaaaagaaaaaggtaaaattgataagacaacatgcccaacattttgtttcattggtggtgccaactcgggaccgaaatgccgttgtcgctgttgtcgccgtcagcgacctgtcgccagaatcgccgccagtcgcggccacggcattgtttttaacaaaggcaacagtttgagtttatgtggtacatattttttcactcaatactgatgagtagccgatttgggaagtttttgctcatgaaatttgccccatttttgcgctaaacattcgccggttaggctttaatgatggtgctaattttggcaatttgcttcgtctcatttcgccacaaatctctccgatttcaacctgcgtttaatctctctcatctggtcttctgttgcagatgggatttgtgatttcgatgggccaatgtaacttctgctgctggccaagcgttgtccaaatggttgcttgcacactccgaggaaatgacaggctacggtcagcatgaattgttgtgccatggcatctattgtattctccgcgaatatgctcagagcttttcccttttatcattagccattttatcaacgattactcacaatgaatttcgtatacacataaatacaatgaattgaatggaaatggacgcatttgcgcgaaagcaatggtcaaataatacatacgaacaatcatactcaatacaatattgaaatggcatagtgccaacgtcttttcggtcacataatcacatcaaacaatcaattaatccattcatttctgtcacataatcgccattcgtttgctgctactgttgttgctgaccacccggcgcgggagaagctgtgttgagaagactgaaaaaaggaattgtattgcaaattataactcattggcattttattagtgcatttagtttatgagtccaatcaactgccttagtttttggcaccatagtccttctgtccattttaaaataaaccatacagttttggtatcagttgaaagcactaagtctaagcatttgttgattggattcataaacaaaatggatattttttttaaattgttcaccgttcgtcgaattcgccatctttgatcacaatgtcaattgggttcggtcgagcattgattagagcgctcacaatttgccaatttcgatgatcccatccaattggacaacgggtgagcacaaaatgacgcggaacgatttgtcgaagagtcagttcttctccggtgacttcattgttcaactcaaatggcacagcgatgtcaatttgcctctttggaaacccaagaaacacgcgaaaagaaacaggagaagaagcaatgcgaaatgcctaaaatgggacaaaaaatcattgaaacacaaaaatcagaaaaaccaattaaaaggaacactcacattttggagttcatccatcgccgcaaaccagttttctccaacagaattgacattacaatcaagcaattttggcacaccgtccggacgaggcgtcaacagccatttggtcagcgcttggtcatccgacgcattagcattgtcaccgagcggaaaaacgaacggcataacacggtctacagttgtgtagagaagtgccggagaatcgcagagaatggacggggccaactgacgcaagccgtgaagaacgattttgtttaatttcaggagacaaatcgaattgccgagcattggccaaattgtgaacagcacaaattccaaaattcgaagattttcagtgacaatgtccaaattgatcgaactgacggggaaaagacggcgaaaaccgccgagaaatgtgatgacattttggtcgatgtaactgaaaggcacaaaatgtgatggtcacaacaattcaaatccaatccatttttacgcgatcgtaatgcgtctg

SEQ ID NO: 21719 - DNA, 1494 bp, Heterodera glycines
aattccttcacaaattctttttgtttacgttggccatataaacttttgaattcatcaattctttcagtgaattcatattttttcttttcataaaaactattttccatctttttaattttatttaaattcatttcttttttccatttatatattttttcgcgatttgtgcctaataattttccaattttcgtctcaattttaattctgtcattgctttgtaattttcctttttctctcaaattttctttaatcgcttcatattttcgaattgtttctattttgtgttgatcatttgggtcatttccattttcttcatccaattgaccaacaaaaaaaatattttcattttgctccatttggtcttcaagttttatcgatttttcttcactcttatttttgtcccattcgttaccgaatatttcatcaaagtttggtcggattttgccggtttcaatttcaaaaataagaaaaacataaattattaaattgcataagaacatttttactattttgatatgtttatctcatataaaagctttaaatatgaatttatacaatctaatattacttagaaaattaagaaaaatccatattctcctgaattttatgatctctcctctgaaatttttattttcttaaaacaacaaaatttcgcgcgaaatgtatgttttttccattacaaaaatttcaaaaaatttttaaacatattctaattgttttgaacggtgggcggggttaacttccgaataatatataggatttgtcttcaataaacattttcttgatcgcccaaaccgacatttttttttgcctatttacgtgcaattgaatattgaatgctctaaactagagcccggcgggatcgggactcccgcgggattttacgggagtcccgctcccgactcccgcttttttcggtgaacgggatttttaacgggagcgggatttttacgggattcccgttcgggactcccgtcccggaaaattttgaactcccgatcccgctcccggaaatttttacccaaaaacgggagtaaaaatgcactggtaagaattgattttttttggtaaaaataatactttttcatgggatcgacccagttccctaccgccaattccctacggattactccgcagacaactatgcggtactcctacaatctcttacgaccgacaacatatagctaatgatccacttgagggaccggaacattcattaagctaataccaaaagaaaattttggcaccatttttgccgattgtgattttttgtcttttttctcacttgaaagagtccgtcaccactccatgaccggttcagactcttgcaattctcaggcaatgctgtcagatgtatttataaatggcatgcaatgtttgggataagaaatggaacctgttgtgctcccggacaaatagtgtgtataacgaggaaaggctaatgaactgtgaaagtgtaggaaatgcatgacaattttgtcaaaaaattgatca

SEQ ID NO: 21720 - DNA, 1568 bp, Heterodera glycines
cctccccctccgccccacccctcaaattcccaaaaagtttttttgaaaaacagccgcaaaaaatggttttaaaaagcaaaaaatctcgttgagggtattttgaaaaatgcgtaaattgcttaggagaaataataaatatttggataaaagtcgggacaaaacgccgtcatgtcaaaagcgccgaaaaatcccgtaaaatctattaacttatagatttttcaaagaaaaaattctagaaaatctttttataagaaaattctaagaaaaaaaaatttttttgagaaaatttcctcatcaattgcacgtcttttagctaaaccaatgttttaatttatttattttttgcttttcaatttaaattacatttgattgatgcactttgacaattctctggtgcactgattttcattttaccgtacatcaattgtttgcttgggcctggcttactgtcattcgaacaatatggtgaagtacggccccaaccagcaacaacaaaggttgactgatcattggtgcctgaaaatataagcaaaatatttttaattttaaaaaagtatttaaaattatttggcaaccatattccattaaacaaatgggacgagcacttgctgtgaatgcaattgggttcttcaactaaaaattttattgtattaaattacattttatattgtgtctatcaaaaagaataatgatctaaaaaactcaaaaaatttgcgatcctactttagtggagttaattaaatgtcaaaaaatcaaataaaaaatttcttttctccaaaatcacaaattgagtcttttaaagaggggttttcatgcttatctcatcgtattaaggtgcaaaccttaatattaaaatatttattattcaattagctcaatacatatgtacactccgattaattgggcatagattgtcaacgcaataaattgcgaagtgaaatgcgtaggatggtaaaaaacaacagcatatgatgacgaatatgaagacatgaataattaaaatcaaatttattaactctattatgcattcctatgataaatcttttaaaaaatatatattaaaaatcttttaatttttgaataaagaaagtgttttccactttacaaaatagtgaattttccaatcatttttttcattttggtttttaaattaaattttataatcaaaatcaaggtcgtggttattgcgttgcatttaatttgcatttcataagttttcgccatcatttaattaattttgaagtgtaaaagctcttgaaaaaaatgaaaaactgtaaaaaaaaattttctcgtattgtaccaaaaaaaaaagttttattcatttttattaaattagacgaataatttaaaacatttatttccctcaatcaattagccataatttaattggttgtgcttgttgatatgaatcaaatttgccatcattttattaattaactttgctgttgttctcgctatcggcaagctttttgtttttgttcgtccatttgttattaagttcatcttaattataaattctatttatttaagttatttttaatgtaatttgaagtaacgaaaataatttt

SEQ ID NO: 21721 - DNA, 815 bp, Heterodera glycines
gggagacgggggcgattcacgggatttcagattaagccttgctggggagacgggggcgattaacgtgattttcagattaagccctgctggggagacgggggcgattaacgtgattttcagattaagccctgctggggagacgggggcgattcacgggattttcagattaagctctgctggggagacgggggcgattcacgggattttcagattaagctctgctggggagacgggggcgattaacgtgattttcagattaagccctgctggggagacgggggcgattcacgggattttcagattaagctctgctggggagacgggggcgattcacgtgattttcagattaagccctgctggggagacgggggcgattcacgggattttcagattaagccctgctggggagacgggggcgattcacgggattttcagattaagccctgctggggagacgggggcgattaacgtgattttcagattaagccctgctggggagacgggggcgattcacgggattttcagattaagctctgctggggagacgggggcgattcacgggattttcagattaagccctgctggggagacgggggcgattcacgggattttcagattaagccctgctggggagacgggggcgattcacgggattttcagattaagctctgctggggagacgggggcgattaacgtgattttcagattaagccctgctggggagacgggggcgattcacgggattttcagattaagccctgctggggagacgggggcgattacgtgattttcagattaagccctgctggggagac

SEQ ID NO: 21722 - DNA, 1346 bp, Heterodera glycines
accttatccggcataatggcatgtgtctgtttggcggccgtcatttgcaacgcattgccttcatggccatcagcgcaggttctggaaagagaaaaattgagcaaaactgtcccatcagttacaattgtcctatagtctcctgcaattgaccattgtcattagtataatgatggaaattagtgacagaatttttgctaattacctgattttaatgatggtgtctgatatgaggtccatcagcagaaagcaatcttgggccacctgtttccaatcggtggggttaccattgccataaaaaggtagttgcagctgtgattccatgcaaacgatgaatggaaacggattttccatgtaacggatcgtacaagacggaaatgcaaaagtaaaaattcaaaagtaaaaatggagggggggggcaaagtgcaatttttcaaaaatataatttcctctagcaaaactcgtactgtacaatatcggaaaatccgtattgtataatatctttgttctggaattctaacatgaaaccgtaggagctagagattgagcccctcggcgggcaattccgatttcaattaaatgcccttctacgaaagggaccaataaatccgttcctatgcgctgttcggaatctctgtgctaaaatagcttgcttcgctctgctgctgatcggtaccaaacaactcactgatcaaagattggtatgctatgattagtaccaggaatttgttgatttggcactcgaatttgccgtgttggcagacgatggcaccgttctgctgaaaaagtcattcttcacaccttcaaatgattgctttccccttgtgcacttcgttaaccgttgctttgccaaacggcaccaattccaaccgaatgcgctgcccgaattcgtcgtgcgcgtccgacaacggcccgagaaggaagcgtaccgagtcaggacctttggcaatgtcaattagaagaccaattagggggaaatttcggacacacaaataaaacttacacaacgcctcaaaaaggacgcaaatttggacaaaatcactgcgacctttgagaacagaagaagccaaaacaacggaaaagacggaaagtgaggacaaacagaggacaaaaagtgaggggcagctcatctcaaaattggttaattttatcaatggactatcgggcgaagggaacggcggaaagcactcattggcatgggattagggagggttttgagaaaatcggaacggcattctgggccaccttaaaggtgtgtacagctattttccttagcaccttttccaggggcacctttaaagggaggggggggggggaaggcgtaagcagagggctaaaagcctcccccc

SEQ ID NO: 21723 - DNA, 861 bp, Heterodera glycines
  unsure (1)..(861): unsure at all n locations
cccccccgaaatcccaaaaagtaaaaagtttcaatgttttttttaattttaagcaattttcttcacaaaattgcattaaaattttcctggcggcgcctgtcggcaccgccggacccccattttaccaaatttatgaaaaatggagattaaaatggcaaaaaaatagtaattttttggaaaaaagggctaaaaaatttgtaaaatacaccataaaaagaaaaatacatccataaaaatcgaatttttgacttcagtcccccccnnccccccgaagccaagggtatggctacgcccttggggggggggggggggtatcaccgtacgtatatacatatgtacagtattttgaacgtaaaagatttctgttacaaagttcattcttccaattatttatttttgtgcaaatcagttcgaatggccgaccaataaaatttttctagtggctccaagccaccggactaaaattctaaaagttttgagggttgaaaaaacaacaacttttctaatgacttttttaattaattgctttacatacctaagataattcaatcttttaaatattttagcgaatggaaaagaaaatgtattcaatagaaaagatttgtacaaggaaagatttctttcctgtttttatttgacaactcacaaatttattattttggtgaatcatattttttgtcaaatgttaacaaatgaatacggtcaattttttccgagtggaaaattctcagaaaaaaactaatgcatttgaaaaatattatatattcagtcaattgtattgtcaatggctcatttaatgagaatcttttcgaagagcattattccgggcaatgaaaacaaaagttgaattcatttatttca

SEQ ID NO: 21724 - DNA, 1128 bp, Heterodera glycines
atttcccactcagaaatcatggtcacacccctttgcctctaaattacaaaatcacttttatttctataacttttttcaaaaatgtgataataagctaaattcaaatttataaaatagagcaaaaaattgcggattttttgagtatattatttttataaaatactttttcagaagggagttctgaaaaatatgaccaaaagcgaagtgagttatgaattttcgaaatttcactggatttttcggggctcaaattttgacgttttttcaaaaaattttaaacaccttccaaaaaatctgaaacgcaaaataaagcgtatatacgtattcagcacctcaaattatgccataaaaatgcattttggctaatttaggagtaaaaaaatttttcgtgaaatgcaaaaccatggggtcccccctatggttttgagttcgctacctagactgtgaagcgattcaaattgatcgatttggttggagagatttttttgaatttttaaaaaattattaggggtttttagtccacatcgaggctcacgacgggcgcttcgcgcccgtttttcaaattttgttggttcatacgggcgcttcgtaccagttattcaaaattttttggccttacagagattagaagaggtacaacagtgattaaaagaggtacaaaagcgattagaagaggttcaacagtgattaaaagaggtacaaaagcgattataagaggtacaaaagtgaattaaaaaaggtacaacagtgattagaagtggtacaaaaggattagaagaggttcaacagtgatcagaagaggtacaacagtgattagaagaggtacaacagtgattaaaagacgtcaaaagtgattaaaagaggtacaaaagtgaattaaaaaaggtacaacagtgatcagaagaggtacaacagtgattagaagaggtacaacagtgattaaaagacgtcaaaagtgattaaaagaggtacaaaagtgaattaagaaggtacaacagtgatcagaagaggtacaacagtgattacaagaggtacaacagtgattaaaagacgtcaaaagtgataaaagaggtacaaaagtgatgagaagaggtataaaagtgattaaaagaggtacaatagtgatta

SEQ ID NO: 21725 - DNA, 1253 bp, Heterodera glycines
  unsure (1)..(1253): unsure at all n locations
aagatcattgattagacgcggtccaaaagtgattagaagaggtacaacatggtttaaaattaaataaataatgaaaagtttttataaaaatcgattgcattttaatttaaaatttttttataataaaatactctttttattcattaaatataattttgaaaattaataattgaatatttattttgaaatgaaattcattttttataaattcaaaaaataaataatgaaattaaataaattaattaaataatttataaaaatcttgaaattaaataaacattaaaaataacccaaaaatacaaagaaaaataatgtacaccgcccggattcgaacttccccccccccctcaaaatgatgcctcagaatccccaatcacacagggattctgatgtctgaacgatgtcaaaagtaaaatctgatcacgtattcgtgatcagcgtcataaaatacccctaaagacatgtttttggaatattttcggtaaaaaaatttttcaactcaaaaatcctatgctcacccctttggtcccgaaaccaaaaatcacttttatttttataacaattcgcaaaaaagagataaaaatgtaaaataaaatttatattatagagaaaaaaattgcggatttttgtagtattttacttttacagaatgacttttcagaagggagttctgaatttttttctgaaaaatctaaaatttccagaatttctggaataactttttttctttagaagatagaaatcccaaataaatcccataaaattctcccgattttttgctatttttaaagctttaattcacttaaattgaccggtcctccattgagttatgaattttcaaattttagcccaaaatcctgagggtcaaaaaattgccaaatatttttgaatttttaaaaaattctaaaatttcctaaactgaaaattaacatcagattcgtgctcagcacatcaaaataccccagaaaaatatttttgacccccattttcaacccaaaaaaaattttcgaaaatttctagggggcctagctcgaaaatttttgaaaatttccggcaatatggcacaccatttgatagagcttaaaaaactctacaattttgccctaaggagttttttcgataaaaccaacccctaacgagttatggacccgggactcaaatgtcccgctcaggccaaaaattttttctatttccgggaaaaaatcgaaatttttccgaanaaataccagtcgatagagctcgaaaaactatgt

SEQ ID NO: 21726 - DNA, 1891 bp, Heterodera glycines
tttttttttttcttacattttttaatttaatttttgtccaggggcacccggttgaattagttttgcctgattttgtgcactcaacaacggggccatgtgctgcatcgggggggcgctttctaatagggtgaagaaacaaatcgctaaatgaaaaaaattcgtttattcagcaattttatggaaaattttttgcaaatcttggatttatttcatcataaaaattttgaatcgcaatttcttgaaattttcttatcaaaattttctcttggatttttttttgttaatttcgtttaaataattttttggaaaaacttcttacttaataaaattttgaaaaatcgctgagaattttttcaattttttctaagttttgaaaaaaaatttaggggggggggcgatctgctatttttttaatttaaaaataatattatttctcattattttttgctgcagttggcacacaaaaatgccgacgacgacgagcagcagcagaaggtcacgctgggcgttgaacgctttgcactgcccgaactgctgattcggcctggcgatgttgaagtccagcaaatgggcatcccagaagcattgtgtgctgtcattgaacggctgccaaagggtgcggcggggggcaggggtttaaccgaaggcttttacttaaaaaaagatgtgataccaccgtgtgtgtgctgtacccaatcccgcattttttgggaattgcgggatttgctggattaatcccgcgggaccccgtctcacgcaatgccgcagcgggatctgcaaatttaaaatttcaggctctaatattcactcgccgtagggggcggagcaggtcacccccgcctcgaaattttttaaaaattgttagaattttttttttgaaaaaaactgagtttttaaaaatttttagggctgggggaaatgaagtgcacctcgtagcggaggagaagaaggagtacttttgcttattgctttcagaaatgcagctgttgatagcgcggaacattgtgctgaccggagggaacgccctcttcccgggctatcgcaaaagaatgtaaaaattttgaaaaaaacaaagactcacattttaccaagaaatagtgtaatactgttgtttgtcccccctttttaaataaaaaattttcaataaaaacaaatttcctatggtttccgagggactaggtcgtttcggcgccgccatttcggcgctagcccatgttttttgtgtataccttttttctttgtaagcaaaatcaaacaatcttggtatcattcgaaagtccttcacatgctctactagccttacaaaaaaaaaccaacaaaattctagcctttaaaaaattattaagaaaaaacttcaaaaattttgacttttttgaaattttcatgtatatccgaggttcaccaattcaactgattccgatcaaattcattcaaattgttgaatttcgaaatttctttttttattgcagaattgttggttttcagtaaaccgatttagaactcaaaaactcgaaaattgaactttcgacttagtgttcgaattcggacccggagtttggaagcggtcaaaatggacgccggtttcgtgatcagcgacctctaaaaaccacaggaaacttgtttttatgaaattaaaatttttgaacgttttcaaaaaagggcggggacaaactcaataatcaaaaattgtttcttagccctttatttcaatttttattttttatcatatttattttttgctaattggcagtgagcaggaattgcgttccatgatgcccgaacagttcactcttggtgttcagcaaccgtccgacccgatttgccacgcgtgggaatgtgcacgcgacgcaatccaacaacaacagcacgatggtgcggaaatgcacaaaaa

SEQ ID NO: 21727 - DNA, 1213 bp, Heterodera glycines
acaaaaaaaaacgtttaggtagtattgtaatgtatatattattctttcttaatgaagtgattattaaaatttttgatttaagtgattttctcatttttttcaattgtcgtgactagaaaaattgtactgttgtttttgaattgcacaaatattctgctgtttgtttgtgacatcattcgaaatgaggcaaattgtgctaattgcctcaaaaaagaacaaaatgtaaagcaattataattttaattgttccaaattcatttaatttatttaccaaaaatagtttccacattttcagttggttttgtactgattttttgatggacattttccccttttttgaccatgccgaactcggcctcaaattggcactgatttcgccccatttcgatgttttagtggacaaacatttcgatggcaaatcagaattgacactttggagatcaatcacaattcgtaaggacattgtcgcaaaagtgccaaagttgtgtgtgtttcttagtgccaattctgttgaatttccattgcccgaccattcgctgcctaacaaaattcgctttaagaacctacggattgagtaattcaaatataaaaagaaagaaaatcacttcttttcaccattttcagatacattgatcattccgtcatcgcttttctccgttccaatcaccaaatttgggacaaaagaggcatcaatttgcgaaagttacggtactccctgcgggtgcatatcaaggctggccgtgatcacggatcacggaaatcacggggtttctgagatgccgtgatctcggatcacgggtcacggattttttcaatttttccgtgattttgatccgtgattggcattttatgtactgaatttttattgaaacgaaaataggaaattattgtgaaaagagaaattgtttgagaaaaataaataaataaattcatgtctgttagtgaagaacacatgtatatatagcctagtggttaagccctccgtcattcattgtttgccccttgggttcattccccattgggatagcagaatttacatatttttttttgataattttaattgaatttaattaataagaaaatttcttaacagtgaaaattattttctttagtttttaaatatccatataccaataaattaacccaatgattaaacatattttggacaaaatctgttaacaaattcactccaaatatcaaaattttttcccgg

SEQ ID NO: 21728 - DNA, 321 bp, Heterodera glycines
aaatcgggcattttccaagttttttgcttgtcctatgccaatggcacccgtcaaattttcatttttgtaccaccaccgtcactgacccaatggtactgaattgttccgcgcccattccttcccccaaaatttgccctccgtccgatgcccccccccacccacccaccacaacaaccgcccaattcctgatccactttcactttttcgcatgcggagcaaacgacaatgacagccgactacgcgcggacggggcggaagggggggagatgaccatccgacaaaatcagaaaaaatcggaggtgcccatcgcggtccccccgc

SEQ ID NO: 21729 - DNA, 1021 bp, Heterodera glycines
ttcaaaaatatttaaagaaatctacaatattatattagtattttttagtttttaaattttattctttaagaacatttattattgcataattcctgaagaaataacattttgtaattcttcatttgtttttcatcattttccaaaatggccaataattttttatttaaattccaaaatatttcaataaattaccaaaaattaaaaatatattttatttttcaatttttaataaatattaaatttaattatattttttttaattataaaattatactaatcaattgccattccaaaattttgtttgaatcttttttaaaattatttttaattttattttccaaaatgttccaattaccaaaaatacaattgcatttaataattgtttttcattttccaaattgttccacaaataccaaaaattttccctaaacacccccccccccctttcgtcgtcatcatcagcaacacataatgtgttctgcttctgcttctacttttgctgctggtaaccttgatccgattttgctttctcttctgttctcccaattttcgctgaccgttgcgcgccgccgcccgcgccattcgccccggggggacgctatttttggacgacgcattccgtcccctccccgcccccctcaaatgtccatcggcggtgtctctcgtcgtcatctccacttttcgccccgaaaattgagtgtccccgtcccctgggggtcagcagcccccgccccgggggcggtggattccccgtccgatcacttcgtccgtccgtttttgatgggtcccccccctccctccgtccgactgtcctcctctgatcactttccctttttcctttttgccccccctcggcggcggattttttttcatttatgtcggacaattgcgccccaaaatttctttcactctctttttatgggcacgcgacgcaatttgtggcgtgtctcgcctctcgtcgcccccgaaggcgacgaacaatttaaaaatgccagcagaattgaaagggaaaagccagacc

SEQ ID NO: 21730 - DNA, 960 bp, Heterodera glycines
tttaaatttaattaaagtttaatgtcgaatcataaaaactatttctttttaagagctttaaatatcgtacacgagctacataatttaactcgaaaaactaaaaaaaattttaaaaggcaaatgagattaaacggttttcctttttttacatttagttcacatttttccgatgagtcatccaccatcaatctctttcagcttctctcattcctctccttcctcctccttcttctcctcctgctcctcctcttcctccttctcctccgtcgccatttccaacctttcgattacgcacctcaattttttctgcgtttgctcactttcgcctctctcttttggcatttgtatttcaatttcggctaatattctcttcattcttccgatgtcctcctttcccagcaaactgagaatgtccgaactgaaaaggtcgaaaagccgcgaaagagccgccgaatgagtctcacaatcagaagaagtcagctaaaaaaggaaaagaaacagaaaaggaaagggaaaaagcgcaaaaaacgaaaagcgatgcgaaaaattgaaaggggtgcaaatttcggtcgctgttttcgggtggttcgcttttccgtcatcggtgcccacctctttgctaattgattcttctgacaaattgccgttgccgccccctccctttggcattctctgcttcgcattgtccccgctgctccgttggcttatgaatgggttcttcctctcctcctccgtcccccgtcctttccctttggcttttcccttttcacttttccttcctcccccacaaatcgctcttctcaacaacagttccacccttttaatatgtgccattttttgctcattttcttcagaaagcatttgacgaatgtgccatcggaggagcgaatgcattgcggacacaaaaaaaatgccacaaattggcaggccaaggcaaacctttggaaatgggcaggaaaa

SEQ ID NO: 21731 - DNA, 1942 bp, Heterodera glycines
tttccaatggcaccactttcaaagatgaacagataggcaaactttgaggggaaatgcgctcccccgccgccctcgcccctttcgccgctctctcccaaatgtttcccttccctttgctcttccgtttgaaatgccttaacttcgcaactttttcatttcaatttgaatgtcttcacctgattagccaatttgttcactttgtcaacgcattcctccacttctgctgggtttaatcccaaccgataagaaacgcgcattttgccaaggtcagaggagaaatcggtggaatggacgaagaattgggagatgagcaaacggacggggaaaagagtgtaatgactgaaggaaaagcattttgaaagaaaaaaaggcaaatgaagaacggacatggaactccaaatggcatcggcacaaagagaggcgaaaaagggacaatcagtggagagggcgcaaaaattgcgaagcaacgcgcaaccgaccaaagaaaggttctgagagggaaaacaaagagtgacaaccgaaagcaaagcttacgccccctttggaaacgcaatggacggacagccgaaggagaagccgaaggaggaagaagcgccaaagagaggggagaggggagggggagagcagaagaacaaccgaacgatgggcgaggagggagacgagcagaagcttaaggcaacggacgccggatgcactcagcggaagggccagcgaattgccaacatcggacgacagaacggcacaaaaacaaaaagaggcgaaaggagtgccttaaggagataaacagcgatcaaaaaagggaaaaggggggggggaacggacggaccgaacttagtcgaaagctccccaaggaaattgccaaaattaagcgttagccgcgactgattggtcacgttgaagctgtcatttctgttgttcagcatggccttcagcaattgctgcagaagattgaaggagtgcagggcaacaactttacaaggggaagtcggactgagatggcaaatgggcaaattggagggccaagtggagtctgaaagtgccgtcatttttctttcaatgattggtccatttgcttttggcccaccttcgcttttccgttgtccgcttccaaccttggcgccgccttcaccttcgtccaaccattttgacattatcggacatccctcggccattccctcccgctgatcactcaaaagcgttcgcaaatccgtcaactgattgacataaccatctgcatccgcttcctccgtatttctctgcccattagccattgttattttccgtttgtcctcccattttcggttgatcatttcaatgaaagccaaaggaagttcaattggagcagtaaataggaagtcgatcagaacacattcagaacgttccaaaagagagaccaattgctcaaaaattgatgaattgtcgtcaattgacaaagacagaaaaagggacaaagcgtcgacaaaaccagaaaatgcgatcagtagaacgaatggcttcgaaatagccaagaatttctcaaaaatgtccaaaatcagtgccaccaatggacaatttggactttcctttacatttcttcgtataagctgctgaaatagaacagcgaatcgtacaaaaaagctaagaattcattgcctgaattgtgccaaacaaagggtcccacgcggaacagatcatttcgctattttggcccacgaagctgagaaggacttgaccgacttgcagaaatgtttcggacacgcaaagtgagtccgaaccggcaatttgagagaaggcggagaaaagaaacgaattccatccgaagactgtcatacgcggctgatcacttggccattccaattgcaaaagtgctttgatcacttcgttcactccgtcaacggccctccgattcacttctcgtggaatcgaattggcagaagcacactgaaacataaaatgaagaaaa

SEQ ID NO: 21732 - DNA, 583 bp, Heterodera glycines
tgattttgaaacagggattacattatttattttaataaattcagtttaattgtctttttcaaataattgaagaagagaatggatgtggtaaaaaaagcagcaaaaatgaactccgaaaaccaaaatcaacgaattgttttttaattcattctccggcgccacctttcgttttcgcccttcggacatcgaacagttgcgggagattttgtctgccgaaggctaataactttttgaaaatgattttaaatatgcaattagtcatgcttaacgcttttgtgcacatttattgacactttacgctcattttctatgcacagaatgataatggagggactaaagcaaagggaaaatgaaaaggcaaggaattcaaaaggacaacgaaatgccattctgaacggtcgctggtcagaaataacttttccaataggtggacagacgcggagtgaaggagggcgggcggtaactgttgtaatgtctgacattgctggtttggccgtggaaataccaagggaccctaaaaaggcggtgaattgggaggggagagagggggggggggggggaagagatatggacgtaatatatg

SEQ ID NO: 21733 - DNA, 466 bp, Heterodera glycines
tgtcgatgaaaggtggggggtaaagtgagcttgactttagagtacgcggagaagggaatggcttttcggaattggcaggtggtctcccctccccccccccttcccctgtcagcccaaacactccgtccgacccgcaacagccaaacaatccgtcccaactcgtcggtcggtttggccaagtgatcgcttcgctttgcccgtccgtccgtgttcccttctccccaattgttggctcatcagacacatgctctccccccttcccgcccccccattctccgcccacggattctcccaattcctttcctccgattatccctttttgtttatgtgctttctctcttccgatcactttcgtcgcctttttctctcactgatcgctttactctccactgatcggcatcgattgtcctgataagtcagtcatttcggtgccgaatgtttgaagtctttgcgaattaagaattag

SEQ ID NO: 21734 - DNA, 1336 bp, Heterodera glycines
ccctaagtgttctctattagcgtacaaaatttggaaatttttgttaaggttcaaaaaagttatggtcagaagagttcaacaaaccaaattttccaactttttttatactgaacaaaattttttgaaattttgcaggctaatagcgcatctgaagggctttcgaatgataccaagaatgttggatttggttggcaaagaaaaaagttatagtccaaaaactccgccccacgcgaaaacggcctggcccgcatggggcaggctcccgtgtcggtccagttttgccggatcgaaaatgggcgcccgacaaaggcacaccacgcgccccctccgtcggtttacctgttgtcaaaagagctcacgtccgaaacggggatggcctgcacccgccaagtgttgttagaattgtcggcgaacaccaccaagcaaatgccgacattctccaggcccaattcattttccaattggaaaaaatgttccttccatggcggaaccacaccgcttttggggaacaaaattatccttccgcttggatgggcctaattaaatttatttttcagtttgtcccacccctttttttgcctcatttcgcctttcgatagcttctatgacaatgtttctggccgggatccacgcactgtggaggtaacgaatgcgctcctcgaattccgcgccgacaattgccatggcattgtgaaagcccttttccgggtccggcttttggtcattccatgccgggttgcaattccgcactcgcgagtccaaagtgctcgacatttggtacctgacaaattcaaaaccgtcgtttctacgatgggatttgaatgaaccattttcaattaaaaccccaaaaattgaatgttttgcccaagtgaatgtctccgctcttttacctcggcgttccgtcgtactgtttaattccgttgtcaattgcgtcgactccctcaacaaatttacgatacacgtgctcgtatagtctgtccatgtccgcgtcatcctccgccaaattcaaaatgttagcgatcaacgattttccgtaatgggcgtaaatgagaccagccgaactcagtttggtctataattgaaaatttgtgaaataaaattattctactgaaaaagaaacctgaaacggaaggcgggcaaccgaatgcattgactcagcaaaatcactgaaggaaaaattcaaaatagacaaaacattgttaaaagtatgcctaggagcgtgggcgttgtgaaaggttgggtgaactccaacggatcagtggcttctcaattcggtaatccttcggaattggtgtcccgacgggaaaaagagaaaaattttcttttaactttttct

SEQ ID NO: 21735 - DNA, 785 bp, Heterodera glycines
gaaaaatacactcttaagaatcgaacaaaaattgagcaaaaaaatttactatctgctaattgcagtgcacaaggagtaggactgggatttataaggccaaaaaaccaaaatagttacgtaataaatattttttaaaaattaaaaatttttgccaagaaagtgaatttttgagaaaattttttcatttcttatgagtgtatttttaaagatttgtggatcggtttttaggggtatatttttctcaaattttttcaattgattcttaggggatgtaattttcgtttttattgcacttttattgagaaattttccaaaaaatctcgaaatagtgaaaaaattagcgacaaaatgccaaaatagtgaattttcactattttagtggcgaagcgccaaaatagtgatttctagtgaccgataatgacatcagaatcgaaaatttctaatgcagaaatgcgttttttgagcttctttcttcaaatcgattgagcaaaaaaaagaagttaaatcacgataagtagcgaccctagtaatttgtctgccaaagaaaattggttttctatgccaattaattaatccccgacatgcaaaaaagacattctctaaagcataatattttcggctctagtgcactttatgagtccaatcaattgacaatacctggtttttatacaataactttattcatgtttgaacaacccctatctttttggcatcattcgaaagcacacagtctaacgaagctaaaacatataaaatctcaacggttaagtaattatgaaaaaaga

SEQ ID NO: 21736 - DNA, 2300 bp, Heterodera glycines
ccccccccccctcctcacatttcttaaaaccaaaatttttttacatataaaaatttgatgaccccataagaatgaatgatggtctgatttgtgtgaagttagggcgaggcatcagaagaagcaagcagcagatcattcatgtccatgccctcctcccaaaaacctgttttcaagtgctcaaccctccgccccccccccctccccttcccgtcttccttttaagcccatccaactgacacccgtccgcatttgctgctccgctcatccccccttcccattacttgctaattgactgattgatgctaatatgatactgaatatgtgattctgatcgtttttccccacgctgctttttgcttttgctctcccattgattcattcgttcatttgcttatccctccaatgtctgtcaattcgccgtttgtcactttcgcttctcccccctttcctccccttcctttctcggattatcatttttcagattcattttttctctgattcattcattcatttctctttttttgttattttctcctcccgtcagccagccaacagaacaaacaaaacaaaaaatgtgtggaaataatatttacataataatgtgtgacttttctttgctcttccaatttcgtcatttgcttttttctttttttcgtttttcttttcattaattatttaaaaaatttggttcattttttcgatccttcccaaattcgtcccctttcctccgtctgacatttccttgggattgacagttccattccgccgatgttatctcctcatttgtcagtcagtctttcgcttcttcccactgtttctttcgtttcagtcgcttcggtttggtcattttgcttcaatcaaaatttataatataattttaaaattcgctgtcattcatttttgaagaacttttccgagtctcgacaaatgttgaaacattcgaaagtgccgaaatgtaacaaccgataaacaactttgccaattgtcagctttgttgcatcaatgatgcctcaatgctcaatgatttttttttacctcagggaaataattgattaattggtgattaatcgccccttccctccgttcgcaatttttgcccctttgcccccccccccccccccatttgccattttcttcgttcatttgttcgtttttcattctttccttcgccgtgccttcgcttcgcttggcttccgctgcctcggaacaaagaacagaaaaagttgggaaagcagcagcagaacccgtcccatgtccacgtccaagaatcgttttgcttatgaatggcgtaacattcccattcaatcattcattttccatcgttcctttggttgcgtgtgaactgagaaccatccccatcagaaacggacgaaaaacaattacctcgttaattgattcgccctacccaattcacgagggtttcgtttaaagtggttaattatgtgctttgataatggttgatgggcactgtccggggttaattattccgtaatcaatcgttacatgaacagagagagagatggggcgaaggagagagagagagagagagggcagagagagcgagaaaaacatgggaggggtctgtaacttaaatgcctgtgctttcgaataccgtaaaactgtgaattggttttgcgtgactaccatggtccattcatgtctattcaaaattctgcttgtttggcgttatgtttattttattccatatgatttccccgaatcccctggggcgctttttcttttccgtgtttttatttggcctgactttttcatttctctttccccatttctcatcgcttttccctaataattttgttcaaatttctctcccccacagattttcatcttcacaaatctcagcttgtcaacaacaactcatttaaaccatggaccaccgctataaggccattattataggcaaatccgaccagcatctgtccgacatgtgtctgaaactgtggctcatcggcgagtggaaatgcgtggacatcaaattcggccgatatggcgggtacaatctgctggacccggtcgatgtcggcgactttgtcgagctgtacgacggtggtggaccaattcgaaggcttcctccgggaccggcactgcccaaaacgcgaatcctcgacggaagcaatggcactcgcagctgcttgaaggtgggggcacttgcatttgggtccttttttggcattttttttgaaaaataggtaaaaatgccatgggcagaaagtgccaattgcctttttttgcaggatttccatcaaaaatgttcgaaatgagattttagaaagtattttcat

SEQ ID NO: 21737 - DNA, 1514 bp, Heterodera glycines
  unsure (1)..(1514): unsure at all n locations
catttacgcaacaaaaccaattcaaatgcacgaaatattcacctgataacaaatggcaatcgagggcgctgatcacggatattacatcagatttatcatatgacatcattaaatctatgattttatttcatgtctatgatttttcatcaagttttttttcattttttaaaattatagttccaagaaatattttatggggttatcggagtcgttaatcacgaatatttcatccattccgactaattcctaaacccgaattcgaacaaaaaatcgaaagttcaaatttccgaaatttggatttatgtttcgaaaatgcttatatgatttttttttaattgcaggaatgatggtttttggtttgtttccatgcatttaaaccattttcgaaacataaatccaatttcgaaaatttgaactttctattttttgtcggaatccggcttcggggttcgaatagggtcgaaatggatgtcagaatcggattcaccgacccagaaaaccctagaaacgcctttttcgcgccaaaaaaaaatgaattttttttttcaaaaaggtgtgataccatctaaactattaccgaattaggatatctgttactttatgtcaacaaaaaattggcacaattttttaagaaatggatgagtcaatggggtgctgaccagggatgaacgaaatttcgtttcgtgtttcgtttttttttaaattttggtttttcgttttcgttttcgtcaggcgaaatttggactgaaatatttacaccattagaatgactttttccgtaaaaaataagacatctcactagaaatgttgtgctctagtgctgcaaactgcaatttggtgcattaaggttcgagaaaccataagcccgaactttatttacatttttattatttaatttacggtttaatcattatttttcttctcatactcgaacgtaccaaaaaagcaaaatcaggaacgggaaaaaatacgggaatccagtcccgctatttttcgttttcccattcccgtagattttttaattgaaataattaataataaaattctcaaacttaaaaattatttttctttattttttaaaacagccaaaaaaacccacaaattaacaaatgattggtaattttttatagaaaacccgcggcattttttttttctggtgcccaaaattttcggtcgtgcagcaagcgagccgcattgttttaaggctttatgtaattgtttgtttatgcacactttttcgaccagtatttccggcgtcaaaacggaacattgcttcgaacacgtcggaggccgaggccagaattgttttatgggcgggaattagctaaaaaatagacaagttattaaacaaattagaccatgttccttattttcaattaaaattcaaattagtattaaatgtttaaccactcgcttctttttcgtcgctttccccaaccaaaaaatgaatgtccgccccattgctgaacaaaagtctcatacgttccaccaatgnttttcgngtttgacctgca

SEQ ID NO: 21738 - DNA, 2205 bp, Heterodera glycines
  unsure (1)..(2205): unsure at all n locations
aggcacccctcagcgaatacttgctatagagcaatcattcaaaggccattttgtagagaattttgtgctctttctgttcgtcatattcatcttctatggaaaatttttcccaaccccctagaatttttttttaggaatttactcagattttcgtattttttcacccgcaaaaattttgtgtttaatgccttttttatggcataaaatgaatacaaaatgcttaaaggatgtctgtacgttatcttagtgctgattgctgttagtttgattcggttgggcaaatgttagaggcgatttaagccttttggcccttaatttctcctgaaaacttagaaaattcaacataactctccccaaaagacatatttctgtatgcaaaataaacagaaatgtgaaaaaagatttgttctttcttatttagcttgttttatcagtttctttttggtagttgttgagatttttcttagttttccaaagtgtctctattttaaattaacacgccaattttggaaaaaaattcgtaaaatttttttccgtcgtcatttcgtcttcttattgttagaatcttaatattttcagaattgctacgtacagttaaaaattcagctcgatcggttcatgggaagtggtcaaactcccaaaaaacagggtgtctttattttaaattaacacagagtattctttaaaacgtggtttctcctcaattttttgttcattaccttcgttatattttctgctatgtctccactattcttcaacatgtcctacgtctgttgttcattatggtgttattaagtatctgaaaacctaaatgttctctaatatctattatcttgccaaatttcaaaaaatttcgttaagttttaaataatttatgagtagggtttgtaattatatggaaatccatatttttttcctggactgtgggaggcctgaaatgcacgaaaaacatgtttttagcttggtttgaagcttctaggatggagttccatatccatatttccatatttttccatattttcgcatttttgtccatattttgagatttttccaaaaaaacctctattagaacggcccccatcagccaaattggccttttggaccccaaaaaccggaaattttccaaaaaatctttttttagcaaattttcacgagaatattgaataagtttcaattttctgaaaaattgataaatttgtatcaaaaataaactaaaaaaagcgaaaatttcgcttttcgggttgatttttcagtaaaaattagtaaattttagctttatcatgtttttttcttttagaatgatttttaatacaatattagcccttttatatgtattttagtaaaatttaattaatttgaagaaatttttggaaaatttacccttcaattcggaaaatttatgtccatatttttgcaattttattttcgcgatttttggtccatattttatggccatattttgcgattttatatccatatattccctgccctatttatgagcaataatgtccaaaaatcttgtttttaggttcttctggccataactctttttttaaagtcaaacagaaatttttgaaattttgaaggctaatagaaaataaatggccattgaatgatatcaataattaaaaattatgttactttttagctgaataattttttgtcaaaaattgtgaacgccagaacggccaaaatgtcaatttacttttgggccaaactttcttggtcccacccccaagagggtggttttagaacaaataaatatggcatatacgcatattgttcaaggatttgtccatattcacactgtacatttacatttgttctattcacctcactttcccatggcgcccatttcgccggtcgtttttccccttgtccccactatattttaccgttatttgttcgttccaccatcggtgatgatgagaacttggattagaatgaaattcaatttaaaaatggattcattccatcagccgcccacccattcgttcattctttcgttcgttcgtcattcgttttgcccaatcctttctttccttctcacaacagaattaatttgttcgctgctgcagcaaatactttcacaaataaaaaacacactttctttgatgaatccttgccgcccatctccgccgcctcaatttatatgcaattaaaggttagtagggcttccaanttatatggaaatccaatattttt

SEQ ID NO: 21739 - DNA, 2483 bp, Heterodera glycines
gaattggacgcgaggcaaaaaatcgtatagtatttttcatatgcttaaacaatcattgccatgtcttagtgttgtttgtcagatgcataagtgcaatcacatttttatacacacattggtgttggcataaatctcatttttatgcgaatttccccttattaggctgtcagcaataaattggcactctgccaaaagtgggcatgccaaaatgcttacaggcaaacaaagatttatgaccatgccaaaattgggcgcatagttccatagcgtgtatagtgggctataatagtcatagaagtatattattatgagaaaaacagaaatctatttctctatatgaatattggcactgtattttgccgatctctttcactggtgtatctcataattgcaggaacattttatttatgtatgactgactctctttctctgatgtagcccatatttggacgaacattttatgtatgtatgactgactctctttctctgatgtatcccatatttgcacagatattttatttctctgcccactctcttcattggcatgtgctatctgattttttgtttgaccgtcttccatgcgatattgcttcgcatttgcatgccgtgcagtcttttcgctgaaagtgccaatataaaagcggtgccaaactcagccaatgacacttcattttcaaactactctctctcactaattgttgcacattccccaattttatttcttccttagtaagtagtattggtgcacaatgcgcacttttctgttcatagccgtagtcgggttgatgttggccgtcatcttggagaatggtattaaaaatttaaaaaagattttaatttgtcataaatttatttatattattttagtaaatgcgactgggaaaaattcgccgtcaaagggtgatgacgataaattattatttactataattaatgtaaatttaaaagcaaattatatacaaaaatttttgcgaatcttaattcttagtgtcggtgggaggatgcaattttttgaaaaattgaatatctgaaacaataataatttttattattagatagtagtccgagaaaatcgcccttctaaattattatcattagggctgctaattttatttaaaaaatttgcgaattatgtaaataaaatatgtataaaaaatgctaaaatatgtatgaaatatgtacaaaaacccccaaattgtactaaaatatgtaaataaaaatttttaaatggtcatttttttggataaaattcttcgtaaaaagtgaactaatcacaaaatgccttgaattttcaaaaaacaataaaaattggttgttagatagtaaacatatttttcacgattttaggaaaacagtcgctagacagtccaaaccataaaaaagaccctaaaaatggacatcccaagtttgaagcagaacttatttttgggcaggggaaccttcaaaaccctggttaccggaaaccccttttttttcccaaaacccaaaattttttttttaaaattaaattgaaaaatttaaaaattttttaaaaaaaattttaaatattttttttttaacaaaatatttttttcaaaaaggggataacacaaaaaaatttttgtttatttttttttttttttccccccaaaaaggggccccaaaaaaaaaaagggggggggaaaaaaaggaaaaattaaaaaaaaaaaatttttacagggggtatatataatttttaaaaaaaaaaaaaaaaaaaggggtgtttaaaaaaaaaaaaaaaatattttttttctttttttaaaaaaaacaccccccccccaaacacacaaaaaaaatttttttccccccttttttttgtcccttttttttttggggcccgaaaaaaagggaaaaaaatttgtttttttttttttcctcctaaaaattattttttttttttattatattggaaaaaaaaaaaaaaaaaaaaaaaaatattaaataataaaaaaaaaaaacctcccttctttcttgctgctcgaaacaaaaaagaaaagagaaagagggggggttgtttttttttatttttttttttttttttttttttttttttttttatttaaaaaaaaaaaaagaagggaggggggggggggggggggggggggggggggggcccctttttttttttttttttttttaaaaaaaaaaaaaaaaaaaaaaaaaaaataaatatcttccccccccccccccccccccccccccccccgggggagggggggggggggggggaggttggtgttccccccccccccccccccccccccccaaaaaaacaaaaaaaaaaaaaaaatttttttttttttttttttttttttttttttttttgggggggggggcacaaacaccccccccccccccggtgttttttttttaaaaaaaacccccctttttttttttttttttttttttttttttgggggggggggaaaaaaaaaaaaaaaaaaaaaaatatttttttttttttt

SEQ ID NO: 21740 - DNA, 822 bp, Heterodera glycines
tggctgagtgcacctgggggaaaagaaattgtaaaattgccaatgaaagacgggggggggggagaaaggattaatggataattaattatttatgggtatttaattgataaaattgggactattttttaattttctactattttcgtagtgtctctttctctccaactttttgtgccatttacacgacaaaatgcgaccattctcgacatgtttagtaatctaatacacaatatcagccctgtttttcacggcattatccagattaatttttttttttggcgctgtgtcagtaaatccgcctattgggcactctttttttagtcttagtggcacggcggtgccaaaattagttttattgagtgaattaattaatgattgatggcatggcattcacaccgctaagcggaagataatgtcggagcagtgatcgtgttgagacggcagggaaaagacttttgatggcacccaaaacagcggcaaaaaatggccgatgggcaggcgaaagagacggagccggcggagaggcgccactcattagacactcattttactatttaattggaaaattggaaacaaaattaattttaaagcctaattattaatagttagatacaattttattaagaaaaatcgaaaaatgtaaattgaaaattttgggttgatgaaaaaagttttggccctaatagtaatttttatttctaacaaaaaattaaattgcgaaaagcgattaattctcaattagtgatacatccttcatttttatcatcagtgatatttccccatagtttaagcaaactcaaattccccttttttaaatccaag

SEQ ID NO: 21741 - DNA, 1241 bp, Heterodera glycines
aaaagttcgaagaataagtttttgagttccttctggtgtcaataatttttttttgaaaacttaacgaaaattttacaaattaataataaacatacagagttatcgaataacaccaagaatgcttaatttgatttacattgaacaaagttatggtccaaaaagtattccggcgacgttttggggtgcaccaaatacaaaacatttagggctatcaaatgacatcaagaattaaaaatatagttgctttttagcaaagttataaaaaaatttttttattttgattgttttttgagtgacgtcataacactgtatgaaactgacgggaaaagtatagaaaaaacagaaagggaaagccaaacaaaacaaatgattttaaagacacctccaggggaaaattcaaaaaagaaaggaattttaattaatgaaataattggagcaattgagccgagcctcctttataattgaaggaagattttgtcgatactgtgaataaaaaaatcaattgatgcaatgggcgcagtgtgtgcgaaatacggcgccgccggggaaacaaaaaaaatggcagaggagggaaaagaggagagaaatagagtgggattaaagaaggaaagagtttacgcgtccaatcaatgtccatcctcagtttcttaagccataactccgcacctcgggagcatttttgctgaacattacagaccacaagagaacaaatggtatccattttattcattttttgcggctcttagactataaaacagccctttttaattttatcaagctaatagagaacacttagagctatcgaataacaccaagaatgtttaatttggatacttctaaaaaagttataacacattaaactcgtcaaattatttttggtcttttttatggtcgggtaaactgaatagagcccaattaaatgtttaaaggattgttttaatgaaaatttttaattggacgtataaaagtcgatggatgcataaactgaactagagccgaatgcttttcatctattggcaagacattgatcattttttggatgcaattatgctttaaagtggcccttgccttgttgttcgattgcatttaaattgagatgttttaaaattattctattaaaaagttaagtatacacaggtgtctaattctttttctagtgtaccttcatgaggaaaagctttaatccagagaataatccgataataccgtgacagattagggtgtcacagaacacacaagcc

SEQ ID NO: 21742 - DNA, 1402 bp, Heterodera glycines
aattgggttcaaaaaaattttaagagaatttttgattacttctttgaagtcttgaatttatttgacaaatccaagacttcatactgggagaagcaaggggctgtggctgggggcctaaaatttgggccacattggagaattaattctgatttctgaaaaagtcccagaaataactattttttctttccataccttcttgtagagctcgagctgctctttccaatggtcttatcccggtctctatccgtgccgaactcacaaagttatggagtgaaatgtgaaatattgttttcaccacaaggcattttttctgaaaaccggattcaaaaatctggggtttggtataaccgttttagaaatagcgtagaaaacagcttcgatatcaagaaaccaagtcaagtccagaaaggaatattttaaaacgatttcgttttgttttggcattatgataccgaataactttcggaaattatggaaacaaaattggagaaattcgaataattttttgactgcaaatttttttccttttttgaattgggttcaaaaaaattttaagagaatttttgattattaatttgaagtcttgaatttatttgacaaatccaagacttaaaactgggagaagcaaggggctgtggctgggggcctaaaatttgggccacattggagaattaattctgatttctgaaaaagtcccagaaataactattttttctttccataccttcttgtagagctcgagctgctctttccaatggtcttatcccggtctcgatccgtgccgaactcacaaagttatggagtgaaatgtgaaatattgttttcaccacaaggcattttttctgaaaaccggattcaaaaatctggggtttggtacaaccgttttagaaatagcgtagaaaacagcttcgatatcaagaaaccaaatcaagtccagaaaggaatattttaaaacgatttcgttttgttttggcattatgataccgaataactttcggaaattatggaaacaaaattggagaaattcgaataattttttgactgcaaatttttttccttttttgaattgggttcaaaaaaattttaagagaatttttgattattattttgaagtcttgaatttatttgacaaatccaagacttaaaactgggagaagcaaggggctgtggctgggggcctaaaatttgggcccacattggagaattaattctgatttctgaaaaagtcccagaaataactattttttctttccataccttcttgtagagctcgagctgctctttccatggtcttatcccggtctcgatccgtgccgaactcacaaaggtatggagtgaatgtgaaatattgttttccccaccaggcattttttctgaaaaccggattcaaaaatctggggtt

SEQ ID NO: 21743 - DNA, 1434 bp, Heterodera glycines
tttattgtcacaattagcttgttagattaataggaaacaccttctaattttaaagcgagatttggcaggcacagatcacttcttttccacatacatttccgattttttgtggcgtaagcaatttggaggaccggatattttttataatttgtggtctcaaatcgctgaattgtacccaataaacacataaagcaccttttatttgtcatttaaagcatttctgacaataaaagagaaaaaaaaaattgaaaaatttgaaaaaaaaaaaagggggatacaaactgaattagtaccgaccaaaaaaggcccaccgcagatgatgttgtcgtgcgagtacatggccaactcctggtcagcgcggatgtcgaacagtcggcatgtggcgtcgtcggagccggtggcgaaggcgtgcccattggggaagaactgaacgaacgggaggaaaagtgccatcagaggaaacaagtcgagaaacgggattaaaaagatggcaaaagggtcgggaatgggatcttgccggaattgaaacctcccattttcatgtttcccaatcgactgcattttcattgctaattgtccgtaccgaaacggcgtttatgtccgactcgtgcccggggaatgtctgcttgcacatcccttcgcggatgtcccacagtttggcggatgcgtcgcacgcgccggagatgaacgtgcgcatgtcgggcgaaagcgacagagacatgacgtcaccggtgtggccggtgaacgcggtcacttgctgtcccgtttcaatgtcccaaagggcactaaaatgggacaaaggaaatggacgaattaattggtttttgagtgaattcaatgggaaatgccaaaatgatcgtttttcaatttggcaaatggcccgaggggactcaattggccgtctgctgactgactgaccaagtcatgtcgccggaggaggtgacgatttggttgtcgtccaagaagcggcagcaggacaaatacccggtgtgaccaggcaactcgcgcgacactcgcacatttccctcgcgcgtcttcagcgagtaaatgctgcaaatgttgtccaatccgccgcatgcgacgaacgatccgctgggggcgtacgcgcaagtcatcacccaggaagacagcagcggaatggcatgtacctgaagaaaattgacatatcagcatgtactgcttgaactcggctcactttgttcgtggtgtacgagtcccacacaattaatttgccgtcctgagaagccgaaactaaattccgcgagtcggacgcccaatgcatggcgtagattttggccatgtgtcccctgagaattcgtcggttccgcagctgaatgcgcccgttggactctaaattagcggctgccaatgccaatgtcgtatccttggcttgtttccgcgcttcctgaacccgattaagcattgatcagtgac

SEQ ID NO: 21744 - DNA, 1588 bp, Heterodera glycines
gggagagcggaccggaaaaggacggaagatcgtaagggtgggacggaccaccggcggaggccgagaccaagctgcttcttgccccccccccccctattgtccccttcgtccttgggacagttcaagcgtgacttttgcgcatttatttcccttgagcgcttgtgactgagaaggcataaaatgagaagcggatagcactgcaggaagaggaagaggaagaaggaggaggagaagggggaactgttgctggacgaatggacaaatggcgaattatttatttatttgttaagtcaacgaaagggaagaggttgacgacagatgaagaggaagagaagagaagatggaaaagtgaagatgaagaggaaagggaaaggggaagatatagaggaagagaaaagagaagaggagtggaaggaaggaaaggaaaggaagaaatagtaaaaaagagaatgatcagagaaaaagaaagtaaataattataattacggaagaagcttggtagaggaaaagcttaataaaattcttttttatttcttctccttcccacttcgccctccccaaatttccttctttggtcccttctctctcatttagtgccaatttgtgccctaaaatgacggccaaagaatggacgaatgaatgcgtagtgaccaagcaaaggcacaagaaagcatggcaagatcatgctgggaattgaggacagggcactcgacagacgaaatggcaatttgagggggacgggggggaggggacacccgaaacattaaataggcaatttgatgagagagaccattgggaacggagggaggggataatagaagaggaatggatgagcaaatgatgattttttggtattagactaattaatgggtccaaaaatgcgctcccgtctcctccgccctttctttgtccaaaaattgaaaatgacgggttactcttataatgattttaaacggattggccaactcagctaacatttgcatttcggcgatggtttacgattacataatggcggcgtacggacaaaaatgcgacaaaaaggcaaatcaagcttaagagaaaaaggaaagcaaagaatgaaagaacattaaaccattcgattcgaccataaaccatttctaattttgtttccaatgtttatccatttactataaatgaattgtgaaccaaatgcgcaagggatggtgttcaagaccgatgacggccggcagggacgaactcaggatttgggttaggggaggggacaacaaggaaaaaagaaaattttcaacaaaaatactattttcccataaaatttcggatgcggaagggtattttttggagggggacgaaaataggggttttgctgaaaattttcgattttgttcacttatattactcaaaatgattaaatttataccaacagactattgtttttgtgtttttagctattgtgaaacttgcatttttcgtctttcaaaaaaaacgtctgagggcgatggaaatttttttgttttttgaaatttgagtgtatttgtcaaaaagttttttatcgagacatcccttgcaaatgtatggaaacaaacgagcaaaggacgaaaagctttat

SEQ ID NO: 21745 - DNA, 921 bp, Heterodera glycines
  unsure (1)..(921): unsure at all n locations
tgcattcattaaaggccttaatntcgtttataaatattacatggagctcgaaaaattatttattacctgagtatgaatggttttcagatcactcgaaaaactgctatcatgtttttttaaagcttgaagctcaaacattttgttgcaatcatttcgcaacttgttggcaccgtttttcacggtatcagcaaaaaatctggcctcttgtaaggtttatggttctagttcttgctggaaattaaaaacactttaatttttcccaatatttatttattattgtttttgaaaatggaaatcgcatatcatatttcttaatagtcctttatataagtctgataaagtaccttttaatgatgggttgaataagccccaagggcccaatttaataaacagagtaaagtataaaaaaaacatcaaataacaaaaaatagtaaaggcaaaaatgaatttagctaaatccgctttcaatttattttaatgaacattactgaccgttataagagttaaagcatgttcatctacaccaatcattgtaaaatattcacacttttgatgagaatctacctgcgagtgtctgaaattttataaacttttattttttatataatcataaagcttgtgttattggagcttatataataattagatttaggaattttgaaatgaacgggacaagggcggactttcataattttctatttattttgggattcattagtaaatatcatgtattttaattccatattaatataacctagaaattttaactttaggcaattttatggatcagttttgatataacattaaggctttattttttaagtattaaatgttaaaattttgttgatttttttgctttccttttcgatcactttacagcgtaattaaaagaacttttttgcgaagcaggactcaattttt

SEQ ID NO: 21746 - DNA, 1465 bp, Heterodera glycines
cagcgtaataaaaagactttttttgcgagtcaggactcaattttttaaattaatgaaggttggacgccacccaggaaaattgtttaggttttaaattatattaaatatgaagcaggagtcgggaaaggtcagtaatttgaggcggtgacctgttgataggcgacgtgacgcacagcaatttactgaacagataagtgtgatggcctttctcggaaactcggctgtgaacactcaaattgataaaagggcaaaagtgaatgttttatagcttaaagtggcatgggattgaggggcatgaattaattaaagaaataaatttgaaaatgtggcaagaaggaaccaccagcaatcggaatatcacaatgttgttcgaattattgagagagggtggggagatgggcgtgagataatcggctgtcgagaccagggctaggcatatgtgtttttaattacgcaaatttatccctttattactgtgatttttcaattactgaaatcagtaatttttaaaaacaaaaataataaagtcagtttattaggcttatacgttattttttttgctttaaaaaaagcaccaacgaatcaatctatttttaattggaccctaaaaatttaaaaaatttacaattattcttaatcaatttttaaatttcaataatctgcttatcagtgctttttgtcgaccagtttttcgagctattgatgtaggttgtgtacggggtgagacgtgactggattttcaattatgaaaccagtaatctataattaggtgaacttttacttaagtaaatttataacacgtaattaaggggcttaaaaatactgtaatcagagaaatacgtaatccctaaatttaggaatttttcaattatggaactctgtaatatgaattacaaggagcgagcctaaaaaaccataattaccgaaatccataattacagaaattttttaatacggaaaagttaatatgaattacggggaaccaaaaaacgccgtaattacggaaacccataaactttaataattaaactatattagccatatatcctttttgctaagtcgatgctctatcatcattaataaataggtgcttttataatttttcccaaaattggaatgaaaaaacaaagaaaaccctgtgttaaggacgaagagaagaaagctcaactgacatgtggaatgcctcaattgacatgtggggtacaagttcatcaccgtggagtaagcaaatctaactttttgccggggctgccaactctaatgatttatcatcattttgctgagttcaatgggtcaatgatattcttttgagttgaagattttctgatttttgaaataaatcctcaaaaagggccatttttacgtaaaattgctaccaaaattccaaagttttcaagaaattccaaaaaattttctcagcgtgcctatcggcaccgccgaaccaaataacttattcttcttaaaa

SEQ ID NO: 21747 - DNA, 2118 bp, Heterodera glycines
tattcctacggcaccgtcggcccactcacgcccaaaatttaaaaaaaaaatggtcgccgaattacaggctttacagtaattatgcgtggctttgtatttgttttctaaaattcaaaatctggcattaaaatgcggaaaaccctaaaaaacatgtgttcccccttactttcatttaaaatttgaccttcatccatagaaattgactgattcgcaataaattctttggtcctcagtaggtcaagagttgtaagtgttgttctgtaaaatttgaaatgtaagccttttcaattaaaagataaatggaatatatcagggatgttgcgtctcatttctcgcctttctcgttctctcatttattttggtagcaacatccctggatattattccttaaaagtacaaatgattggaaggcgttccattgtcacatgttccattgctcacaaccaatccgttttccgcctgaacagtgatcggagcagcgcaatttccaatgaccgctggtacggctgacgaaacattggcattggtgacgttgttttcaattggtaatgatgaagaagccttctcataagcatggtccgcttcaactatttcgtttgatgccctaagaatttgacgtgacgaatgggcgacataatgcgcagaaaccaaaggcgaaggttttgttgagaggacactgaaaagcgtatgtaatattttttaagcacatggcacacctttcttttgaaccgtgaggtgtttgtggggcgtcatttaatttgcgtcgttcttcaaagtgatttttgcaccattttgaaacctcgtctaatgagaaacgagtttgactctttttttgatcatccaacacttaccacagtgtaagttctttccaaaattgttttcgtttttggccatgtgaatgggagtttggccacaatatttagtgttttggcggaaatgagaataacatttctgattgtgagaattttgaagatgcgaactgatttttagcctaaaccaagaaaacatgcagaaattcaaaaaaaaaaaaaaaaacgaaaaatggctaccttttgtcagtcccgcgtgtattcggctgaactgccctatgaaatggacgcacccgcgcacaaacaaaagtcgtctcgtcattctctcgcctccgtgtctcgtcacttttaagccctaaataatgtttaaatagatcacataaagaaggttctatatctcttgggtcattggtgaaaataaatttccgactttttgttcgggttttttttcgaaaaatagggggggggggagcaaaacaaagtaatagccgatatataagtcgaaagttctcattggattcttatggttaatactgctcgaaattgctacattttgccttttaattgtccgatatttttgttttaaatttcaaggccttgaaaaaaaaaaaaaaaaaagaccatgatcgaaattcgatgcttgttcttctttgataaagtcacatttcgcttcgttatttggcccaataggcaaattatgacagtgttgaagttgggaggaagaagtcgggtaatctgccgacgacaatggtaaggattttgaaaatgatttgtttgagtgataaatgggctgaatttagaaacttttttgattaaatttatgacaaaaattacatgtgacagtgaagagttgatcacgctttctgcctctttggttgaattgcttacattatgtttgtaaaatggtgtccgtttagctttttgttgagtgtccgacagacattttttggccgattcttcgctttccaatggctcctcctcttttttctttttttccaatgaaacttccttcttcctcttttcatcttccaccctctttctcttccgtggcctcccaacaccgttttttgtcggtttttgagttgtaacagtcacagtttctccatttttagttgaaattgtgtcttgatttgactcagaactgtgaagaaattttcgtaacctctcgggaacttaattcaatgcataaggaaataatacaatttcgtaaattttaatgacaaaaatatttctaaagtggtaaatcctaaccgtaaggctgttttggcaatgccatcaaatgagaaagcgcgtcattttgcgtttggca

SEQ ID NO: 21748 - DNA, 1390 bp, Heterodera glycines
ttttaacttaagataaatttaaatatttaatatctctttcaaaaaaacgcttgttcaaaagcaagctaattttttagtaattattacttcaaagaaatttcacattcgattcgaagcgtgtgatgatcgcaagtgtaaaagtgcaatattatttgttaagatattatgtaattattctacgcgttttcagtgaaggcttacgcaatattatgctcgtctggcaattacagtaaataagttaaatggatttactttttctaattgaaaataaattttaacacacctaaataacgttagcttctcagttctccgaagtggctatcacattgtacctagcatcccataaccaatgcctctaaataaatagctatgcatcatttcatattttcccatattaaaaaaaacacttcgtggcctcggtgcttcgcgcccgcttcaaaatatgttacatgttacatgaaaacggagggagttcatgaatttcctctcttagcatgtaacatgtaacatgtattaacataataaaagcaatgaatttttgaaaagttattaaggggttctaggcagctttacgccctaagatgggcgcttcgcgcccatttcttaatttgtggggctcataagaacacttcgcggcctcagtgcttcgcgcccgcttcaaaatatgttacatgttacatgaaaacggagggagttcatgaatttcctctcttagcatgtaacatgtaacatgtattaatataatgaaagcaatgaatttttgaaaagttattaaggggttgtaggcagctttacgccctaagatgggcgcttcgcgcccatttctaaatttgtggggctcgtaagaacacttcgtggcctcggtgcttcgcgcccgcttcaaaatatgttacatgttacatgaaaacggagggagttcatgaatttcctctcttagcatgtaacatgtaacatgtattaacataatgaaagcaatgaatttttgaaaagttattaaggggttgtaggcagctttacgccctaagatgggcgcttcgcgcccatttctaaatttgtggggctcgtaagaacacttcgtggcctcggtgcttcgcgcccgcttcaaaatatgttacatgttacatgaaaacggagggagttcatgaatttcctctcttagcatgtaacatgtaacatgtattaacataatgaaagcaatgaatttttgaaaagttattaaggggttctaggcagctttacgccctaagatgggcgcttcgcgcccatttcttaatttgtggggctcataagaacacttcgcggcctcagtgcttcgcgcccgcttcaaaatatgttacatgttacatgaaaacggagggagttcatgaatttcctctcttagcatgtaaca

SEQ ID NO: 21749 - DNA, 1470 bp, Heterodera glycines
gcccctctctggtagaatgccccctccaataaaatgcccccctaaaacacagtttttaatggaaaaacgatcaattttattaaaaaagaaaataaatttgatcaaaatattattcattagcaacgtcgacagagacatcgctttcgtcttgtcccaaatcatcttgctcaagtgctttcacaacattttcttcatttcgacgttgattcagaagatgaagcccatttggtatggctccgtccgccttaaaacacttgaaaaatacacaaaatactccaaataggcgaccttaaaaacattgatcatctcatcgtttcttccatcaatttcatccgtaattccacatgacaaaaaagatttggcaatcagttccttcgagagtaagttccaggcggtgacaatccattgcagatacgtctccattggcggagccttcatatttccggacgacgttgtttctttctctcctttcaccatccattcatcgtaaatttgcctgattttgttcttaaacggtgcgttccaacacacgtctggtggctaaaatgtttttttgggtttaaattgaattgtctactacttgaatgtatttgtaccaccgggaataacagcagattcgatggataaacgccggagtgtctgcttggtatcgtcactgatgtgacaacgaaagctgtcccaaacgagaagccgggtcccgaatgcaaaaccgccaagcaccttaattacataatttctttaaagacaaataagcattcgcacttcctctaaaaactttgtcgttagttcgttgtttatccatgtacggcaacaccagcacaacactaaatcgttcttaaaacgtttgataatgtctggcacaggtctcttcttaggcagtaaaacaaatggtcgcagcttcgtcccgtcagatcttgccgtcaacatcaccgtcacccttgccttttcatggcctgttgttagcaccgtaacggacttggcacccgtctcagaaacgcaatttccgccagttggatcaagccaaacagctgtctcatcgcacgcaaagacagcagtgtaactaaaattagaatatgcgtgaaaacttttccgctaatcattactttttttcatgccataatttttgaacatagacaataaaattgacaattgcttcggcgtaatcatcgggtggtttttgtgcaagtgttgttggtttgcgcaacgaaaagttgtggcggctcataaatttctccaaccatccatgactacttgcctaaaaactgacaatatgatttaaattacttaaattcttacagaaaaattttccaaatttttgtagttgtcgctgatttgttgtgcccttgaaaaaaccatggtgcgcgtcacgcgtaacttcttcctgtagaagttcgctcaaccaattcgctagagcatcatcgaaattggcgtctaacaatttccttccggcaccagagatgcgcatacgct

SEQ ID NO: 21750 - DNA, 1552 bp, Heterodera glycines
  unsure (1)..(1552): unsure at all n locations
tatatatatatttgctaaatttgagtgaatagcaacacgtacaataaaaaaaatacaaaagaaagcctaagcttagacccaagaaaacctagccaaacntaaagcttttagacctaccaccctaaattttacgcattaataaatattttggtgttttttcgtaatatttttaaaaatatttattatttttcaaatcccaatcctagataattaaaataaaaattttatatttgcatgattctttcccaataatttttagacttagactgcatttccgcgttctatgaggaggaagatgaatggacacaaagattctgggaaaaatgaagaaatccttcatttgaccgttggaaattttcattaaaatttggattttttaaaaatcttaaaaaattatgcacaaaaatatgaactgaaaatttttgaatatttttgtttaaacttttttttcaattttgggtaatgctctgaatttatttcattttcttttcccctggcggaattttaactaatttttattaagaagatttctagaattatcgaaaaaaaatttcatgtaaacatattagtagtatatggtgccaaaaccgagcgggtagcggtaggacccctccaaaatcccaagcctattgaaggggtgtttttcctttgaagttgccgcccgcgcaaaatcccgcgcctattgaaggggtgttttcctttgaagatgccgcccgctcacatcctgagcctatgggatgttctttgaactctgccgccttgcggattttaatttacccaaatccgtgcgggtgttttttcaccccgcgccgcgcagcgccgcgggaaggtcatcaatcatccacctgtcaccaaagtgacaggtgaaggaaattcaatttaacttttgcaaattttaatcttttgtttcaaaacctttagcgttttattttctcaatcctgaaaaaattttttatgatgatttttctgatcctgaaattaaaaattcttttttgaaaattagccaaaatcgtgaggggttttcatttcctctccgccccgccggtgcgccgcgatgccggcgccgcgcgaagtaatcgataacaaaataaatacccaacagaactataaattgggggaccgtcccaataaatgaaatttttttatcgtctccctaacttcttttgagccattttcaaataggggagaatatgatgatacatttcctcaatttcagaattgtttttagttcccgtaattacgactttaccggtccagaaaattaacgctgtaatgcttttaccccgcttgaaatttaaaccgcaaaatatttccggttcataaaatgcacgacgattttttcgaaactcgttcagttcaatttcacgtccgaatttaaaggtcgaaacaatattttcaaccgtgtgtccggtgtaagaagcccccggacaccccgagcccttaattatttctataaattttttaatagcattgtcacagtctatcagacttttcgtccccagacatatcaaagggccggattcccataataatgccgtggctttgatgggag

SEQ ID NO: 21751 - DNA, 1715 bp, Heterodera glycines
atttcaaatttacggatcccgctgcgggattgtggtattttggaaatttcgaaaattagaattaaattttgaaaatctccaaaaaactaaatatacctggcaattttaaaaaagaattttttagaggctggcggtatacgtgaaaaggggttaatgggttgataaagatttttaatggtcagagggttggagagagatatgcggacaaattgttaatgggatcattccgtaaatttaacgattttatttttaagtcgttttttgcggcgcgctttttgaaaaacttttcgggtatagaggatccggcggtgccgataggcgccgccagaaaattttgtcaatttcttaactgattttgtccaaaaaatgaccaaatatcacatctttggactcaatttctaccgagtgaataagtaaaagccggtccggcttgccgacaggcgccgccgagaaattttttgcaaattttagatgaaatttgagagaaaaatggctttaatttgattgaatttgttaaaaaattattcaaaatatttggcattttgtccttaaaatattcaaaaaaatcaataaaatcccgcagaatcccgcacaaaaaatcaaatttacaggtcacgttgcgggatttgaactcaaaatatccaccagcacggggattttgacgccatacagcaacacggttcaactcactgattagctgtactttccccttttataatcaaacgagcggagcaagattaatccgggggtggtaaggggtggggtgagccgagagaaaaataaatttagggcgcatgagtcggggagaaaaagcgggggtggataagataaatcctgggtgcgggttgagcagagagaaaaataaatttagggtggattagtcggggaggagaaaaagcgggggggggggtaagataaacccgggtgggaggtaattcggggaggaaataagccctggggtgattccgctgggagatgagtcctcccttctcagacaagacacccgattatacccacctctagcgtaattattgaacgctgcattcccagcgtctcaaacacgggccgataatcaatgtccacaaattcagtggagtcgaaccggcgcattttttgcgcaagacgacgttctttttcagatgcttcgtgtctttgcaccttagcaaaagattttttattatagattcttaaattttataatgaattaataatcagagaattcttccctgtaatggcccatcgctctgtttttgaacagctatcgcattcacaattacaagacaggcttccctttgactccccttccatcctaggaattgacgaaagaactgcagcagcgactgggaggaacaaaaggccttcaaaaatgcaaatcaacggaaaacggccagcagattttgaataggagaaccgaagacaaccatcgaacggccatttcgtgcattagttccacccatcccttctccccctcggatcagttccctccccctccccgggttaatttcccccaaccctctgcgttattaggtcacgttagcttaggtagacaaggggtgtaaatttcgtaaaaatgtactgtgctccgagcaattccgtaaaactctacgagaatcaaaacagcactggtaaagatgagaaacttgtgcgaaaatgtaaagaaaaagcaatattttatcgaaaaatagatttaatttttctttagtaaatgtaaacgg

SEQ ID NO: 21752 - DNA, 2185 bp, Heterodera glycines
aaaaaacaataaaatttatgaatttaaattaaaatatattcttttataaaaatacccaagttttctctttcgactcagttcttatatttcctgagacattaaaaaaatttattgcctgtttttattgcttgaaataagagtaaaggcaagaaaattaaatcaaaaatgagaattataatgcataatttttaattttttgttcgaatttatagttggcggtcgataccgacagcttttttttaaaccaaaaacagatgctcaaagtacacggaacttttcgagaaccggtcccggtgccaggatctgaaaagctttcaattatcataccggcaccagtctcgaatcccgaaaaatcaaatttttatttattcaacccgaataaattcagtttttcatttctggatggattttcaattgccatcagccaagatggatggagaggatttgttaggccggcctcgacattgaatccgaaatctcttccccaaccccacctgctgctgcttctgctgttcagagtcagtcagtccattcattttcactgatcctcccccccccctttctcctccctcttcttcgtcctctattctgtggcagcatttgcagcttttcaccaccaaatcatccccaccattgtcggcggatgagcagggggggggggaaggcttgttaaaagctcttgaatgggcccgttttctgctgtatggactaaaattacacatcatccgctgttgctgttgatgctgctgcttatttgctctatgtccaatctttttttctccgatcactctctaacaaatgctttgtctctgatcacactttttatccctgctgatcaaacccattcattcatactcattttttgtctgttttccccacaccctcttcttgttctcgggggcgggaaaagagcaaaaaaattgacaacggcacagagagcacagtgaaatttctctgctgatcaacacactctcgttgatcactctctttctctgtgttcacccggtctgatcagcagcgatcattactctctctccctctctttctctgtgtgctctcccgggtctaatcaacagcagaagcataggccaacttcttgtttccgggcccatttatcttttttgatttgctgtatgtgccgccacagcagaagactctgcccccacaacagtgaagcgtaggcggatattttcgcctctgttgccttcctttgtttctctgtgctgctctctcaatttgccatactcttttcacaaagcccatcatctgtctggccactctctcagtttgccacagacacttcgctgattattaatgcccatccacccatctcttgtcctcccccaccccccatattcccatcaggcaaaatgctgctgcttgcttgcggataagtaatgaatgactcgacggacgtgcctctcatcgccccgccaattggcagtggaaactctaaaaacagcagcccacagggcataagctcccaaatccatgcccgctgctcctttctccgtaaatttaggctatctcctgagggatttgttaattagacacagcgacgacagtaatggttcttccatacccaattaagatgatagtaaataaattttcacaaaaacattttttatccgatgcgtacaattcttagattcttatcgaagtataaaaattttagtcttaaatcataagaaaatccaggaaaatttggcaatatcccttaatcttcccagttctaatcctgctggagattgtgtcggggtcgtccttaattgactttcttggacattgcttatcacatttttgcgtaaaagctacctatttacttttatgacgggtgtccgaatgccattcccttgtttcttatattttgacttcttaaaaaatatatttaaaactttaattgaatttaaattttaaaacaaaaatattttcgcatttttacccatggcactgtttttttccaattgtttattctttccttttcttccaaaatgtgaaaattgagatgccgagacggtggggcaactcgacgaaattgccttgtcctagcccattttcatcccttttgctttttgtgttcgttaattttaaatgaacacatttctctcacattgtgttcgttttgttggccccccccctccccccactctcagtagggccaatgtgtcatggccaatttttatgg

SEQ ID NO: 21753 - DNA, 1310 bp, Heterodera glycines
ggatttttaattttttaactattttttctgcggccttattttagacgagaaatgcacgaaaaacacaattttcgctcggaaatttttcgttttaacgccactattcatcactaggaatcactatttgtagcttcgccactaaaaaaaaacaattttgaaagttgtctactaaaataattttttgccactattttggcgtttcgtcattatttttgccactattttggcattttttggaaaatttcctaaaaaatgcaataaaaacgaaaaatacacccctaagaatcgacttaaaagattcaaaaaatacacccctaagaatcgaccaaaaaattttaaaaatacacccctaagaattggaaaattttctcaaaaattctttcccaaaattttttttcttgctcaatatttgctaagaaaatattggaaaggacatttgtaactgcaatcagtgaacaaaattgtttgccttaattttaaattaggtattttcaaattttaaaaaattacaccccctaaatttggaactttttcgccacttttttgtcactattttgccatttttttgtcactatttattaattattttggggttttttgccactaaaaatcccagccctactgatcatcaatttaaattttcggccaatttgtgatttttttttcaaaaattcggccgcgcagcgtccgaaaagcacatcaaaaattagaaacgggcgcgaagcgcccgtctgaggccgcgaagcagcctaaaaatcaccgaatttaaaaaacgggtgcgtagcgcccgtctgaggccgcgaagcggcctaaaaatcgctgataattttttaaaaattccaaatcttttcacaacccgatagctaatctaggtagcgaagctcccaaagcgcgaagcgctttatcccagctaaatagccgacggttcacgcacccgctagttttgatatacgttatattgacaaggagtttcgtttcaaaaactaatttgagcttaacggctaatgggacgggtctgaaagtagtggaagggtcttacaactttttgaggagaattcgggaaaactataggtttttttctccgagggccaactgagtaccggggactgatttgtcacttttgtttgcatttgaaggcccctaactttttttgtaaaactcgaatcaaaaagtgcccgctgtgagggcactccgccaaagtgtcctctaaatgctggtattttttaaatttttttttgagcaaacccctggcctgcaaaaaatggcaactgaagcgtgcacaaaaagtacacttcagtaccaggcgaata

SEQ ID NO: 21754 - DNA, 2010 bp, Heterodera glycines
aattaaagaacgggcgcgaagcgcccgtcctgaggcccttaaacggacgaatgttctcaaaaaattaaaagacgggcgcgaagcgcccgtcctgaggccgcgaagcggccgaatatcccccacaaaatttaaaaagagcgcgaagcgcccgtcctgaggccgcgaagcggccgaatatcccccaaaaaaattacaaaacgggcgcgaagcgcccgtctgaggccgcgaagcggccgaatgcacttgctcatcacttatcaaacgcgcatgcactagcaacgaagtcctttgcgcgaagcgctcatgtcagcgcccgcccatatataccaaaagtatactgcccacaacatcccccattgtgcaacacgctagttactatatacgttatattgacaaggagtttcgttgctaaaaccattttctcccggccgaaggccgggagcgccctgaaagtagtggaagggtcttacaactttttgaggagcatccgggaaaactatagagaaaaattcagcgcggccaactgagtcccagcggctgatttctcattttttcgagcatttgagggcccctaactttttttctaaaaccctgaccaaaaaattcccgctgtgagggcactccgcagaagtgtcctctataatccagtattttttattttttgatcagaccaaatcccggacctgtacagacacggagactcagttaatttttttttcccacttcagtaccaggcgaataactcattaggctttgagctgagcgcagggtggccagcagacttattgtagagctttaaaagcccgatttttccaaattttaaaatttcgaaaattttcaaaatttttcgagctaggcctaaaaaacggttttcgggtttttgaattttaggattttttaacgaattttcccagaaaaacgaagaccacttccaaaacatagtttttcgagctctatcgattggtaatttttttggaaaattttcgattttttcccggaaattgaaaaaaattttggcctgagcgggacatttgagtcccgggcctataactcgtcaggggttgattttagcgaaaaattgacttaggacatttttgtagagcattttaaatgctatcgaatggtgtactacatgtttggaaaatttcaaaaattttcgagctaggccccctagaaattttcaaaaattttttttgggttgaaaaagggtgtgaaaaatatttttctggggtaaaataaggtgctgagtacgaatatgatgtctattttaagtttcagaattttgggaattttttaaaaattctttattttttggcaattttttggccctcgggattttggcctaatatttgaaaattcataactaacctcagggtaagtcaattttcatacaacaaagctttaaaaatagagaaaaatcaggagaattttatgggatttatttaggttttctaacatcaatatgaaaaaagttattccagaaattctggaaattttagatttttcagaaaaaaattcgtaactgccttctgaaaagaaatttgagaaaagtaaaatactacaaaaatccacaatttttttctctataatataaattttattttaaatttttatcacatttttgcgaattgttataaaaataaaagtgattttgggattcgggtccaaaggggggagcacatgatttttgagttgagaaattttttcaccaaaaatcttccaaaaatatgtctttaggggttattagggccgctgatcacgaatacgtgatcagattttacttctgacatcgttaagccctcagaatccccgtgtgattggggattctgaggcatcattttgaggggggggaagttcgaatccgggcggtgtaacattatttttctgtgcatttttacgttatttttaatgattttaattaatttaaaatattttgttgagttaataaataaaaaattatatttaaattaatgtttttttgatgaataaattttataagtttaaattaat

SEQ ID NO: 21755 - DNA, 1905 bp, Heterodera glycines
  unsure (1)..(1905): unsure at all n locations
ccccccccccccctctcttggcatcccatcgctttccgttcaaaccttttgcgacagtgtcactttgccgccgattccgttgtccgtccgtttagccgcgttcgcttcgtcccttttgagaagaacgcgccaagtctttttctgctgttctgagtcatcccctgtttggtcgtcgtcactttttcccctcatgcgcgactcgccagaaaaataaattacgcccggtaaagtgacacttgtgacgatggccatgccttcggtaaattttggaaaacgcattctgtatctaaaacgaagtcagcaaatctcgaatattttttcaaaaaagcccgttttaccaggcgacccggtccaaaattttagccgggcgcccgccggacagcggactttttgaaatttatggaacgaaattaaaaatcgcgaaataagggcaaaaataagtacgaaacgccaaaatatgttcaaaaacttattttaaggacgaacatgtaaaatatggatttttaagggagaaggtccaaaataagtacatacctatttctaaggtcgactaagtgcgataaaaagcaaaaatttcgaatgtgtttttcgtgcatttttcggagttaaagccgcagaaaaatgatgtttcattccttcgctattctccgttgtccttttctctccctctccctcgctgttcagtcattttcctctgtcttctttcgcctccactctttcccttcctccgtttgcctttcctttttctcttttctgttgacacaatcctttgccttctttcctttgctgccgcctgttttctttgttgctgttgccaacggcaaattctttctcccctttccctttctctccactcttttcccctcctctcttcctctcccctttcatcattcacggggttattatcattctctttcccttcctcttttccactcgtttttattaattttttgggccattttgattttatctattgctcaatttccaatgcatttgttttatatcgtacaatacaaacagcagaaaaggcgtcactgctcactatcattgccatcgacaaccgcactttgccagcacataacagccatcaaaaaattccattgccaattgaatgtattgacaaaattgaactgcattacacgcttatcattgtggttgaaggatcataataaattcataagctttcctaaatatcattattatttatacagttgtgggtttttgggtaggaaaagcagtttttcattttttacgagatttgttaaattaatgtgtaacacccccaaagtgtatgatgaccaagacgtacgttggagttcagtgagaatgagtgtgtggtggtgtctctgttcgttatggtctccgtccccatttatgtgcatcaaagaactcgcaagtttttgttcaaaaaaataccgaaatacaacaacgggaaaggaatcaaaatttcaaatttttctcacctaccgcgcgttatttgcgcaaaatacgaaattttcagccccaaatgaatggtcaacaccaaaaatggtcatggtatctctcatatggtagtgttcttctgtttggtgctcaccattggttgttggccttcaaatggtggatggacaccatttggatttgtacatttgggtggtcttgggctcaaaaatgcggacctgctggtaagggtcgtttcggacggaattggtggctattccgccgagaaacaccaattttcattgattgaaaagaagcactcgtctgctggtttctcttaattntcattcgcttttctcgtgtcatctccttagataatttaccatgaatggttttcattttcaatttctcgaattctctcccactctttctaaacgattttctctttaccaatgnncatttccctaaatttttagatttgatctg

SEQ ID NO: 21756 - DNA, 1497 bp, Heterodera glycines
tgagtccgtccttggttctcgatttgtagtcctttctgcggttgcgtggtgactccttttgttttcgtcgtcgttctcgtggttaccgtcgtttcgggagttcgtagagtagtcattactgtactggcactggtactcgtacgtactgtcgtcgttgctgccgaagtttgagtcgtaccacttgtttgcatccgcgcctttttgtaccattcccggatatgcgcaatggacatatccgccgctgttgtcggcaaagtgggcgtgatttgccccctcttgtcgaggctcatccgaggtaccgttggctccgtaattccaacgagttcctccattcgtagaggtcttccgaaaggatttacaggaatccatctatcgtttcgttccggccgaatgacttgtccgttgatcaccgttggttgcaacagtgtgatcaataacatgatcagcattatcatccctgttgaaaataattttgatattccaattggccgggaacatcttttcacgcaacggtttgtcaccaaaatggacgaaccagctcgagccttcttccacaaattccttggccaccagctcagcggcttcttggttactcacaaccaataccctcttgctttggagatgacagtccttccagtactccttggctctcagtttggtcaaggtctggccgaatctctccgtgagattcctgagccaattctcaaattgctcctctgcacttatcacattcgttttcattggcacatcctctagaccaactggtccatagatttttcctttccactcttgtccaaaaacttggcacgaattgtcccatgccgtcagcacacactcgagttgcttctgtggtatcgttttctcattgttttggagcactttcgtccaccaattcttcaatgaatcctcaatctcgcttccgcttcccagcaaggcgcaccaattttcattgaatttcttggcgtgcatacgtcctagccaatcaaatgcgaaggcttgggccaggcagaccgcctttgattcggcttgcgggattttggttagccggccgtgggacagacttcccatggtgcaattcctttgacaaccttcatgtctttttacaccaggctcacatcgcgtaaacagcgaataattgatggtacgtcggtagccgggacttgctggtgccagctttattctgccagggttctcttcagcttgttgcccttttttccttcttttcaactgttcgtccaacggatctctggctttgagtcgtcgctgggaccgcacgggctcctttgactgactctcgtcccgtgctcgcttgtcattccgaatttgcccttccatctccgaacttggggccagcaattcggttgtggcgccatttggttgccgtagcggagaaatgtcatgggcacgtggatgtcgatacttccgcccagtttggatctcattaaggtgccgtccacggtgccatttccgccttttgttgatcccttggtgcggggc

SEQ ID NO: 21757 - DNA, 2420 bp, Heterodera glycines
tttggaaaattttccggtttttgaggtcaaaaaggccctttaactgttgggggacgttctattagaggttttttggaactatgtcaaaatatgcacatataatatgcacgaaatgccaaaatatgcacaaatatgcaaatatgcatatggaaagtcatcctagaagcttcaaaacaagctaaaaacatgtttttcgtgcgtttcaggcctcccagagtccaggaaaaaaatatgcatgtgcatataattggactccctagtcatctgttaataaatcttagtaaaatttttaaaatttctcccccaaatttcacaattttttctctttacacaaaaataaggtggctggatatttcgacaatgaccgtttcgccaatgaccatttacgactatatcatatcgccaaaatttaaaatatcaaattaaatataataaaatgaatataaaaaataataaataaatttaaaaaaatttcaatgaaatttaaagagaaaaaggtagttatattttttaaatttaatgaatgcattatctatcgcctattgtgtatgattattaatagtgaagaaagaagacaaaatgagacggacctataatataaatccaaaatgaaaccatttatttaaattattgtagtgtcctctttttacccaggcggcaatcctgaagaatggttgtccctaatttttaatttttttttaaattttgtgctcaaaaccagtttttaggcgtttttgagggtgttgataacggatcttaactcgggtttgcccaattccgaactccggacccgaattcgaacaaaaaaaaattgagtttttttaatcaagaataattttttcagggtaaaagcttctaattcattatcaactatttaggtgtaaaacaatgtttcaatttttaattaaataaaaaataagcaatttgcgccgaaaattgacaaactaaagccattctcataatgctattttgaaaaaaacgaaaaaaaaacttttttatattgatcccaaatccgcaccgtccatataattttgcagaaatttgaattttatttaaaaaaatatatttaattttattgtcgaaacggcattgtcgaaaaggtattgtcgaaaaggtattgtcgaaaaggtattgtcgaaacggtcattgtcgaaatgtccgggagccaaaataaataaaacattttctttgttagattggcagggcgaggaatgaaaaaattgatttcacaattgctgagcatcagagaatttcgcgttatgcttgtcgaattgtggcggagcgcaatgcgccggccaatgtgtacatttatgcagctggatttgatcaggaaaacaatgtataatagaatatatgaaaaaaaattatataaaaaaagaaaaatttaaacaaaaaaaaatagaaaaactctataaaaatttaagtaaaaaaattcgagtgttaggtagagaccggaaatttcaaatttgcggatcctgttgcaggattggaattcaaaattttttacaggacaggatccggcaggattaatcctgcaaatcctgcaatcctgcaaatcctgcatttaaaatctgcaggatcctgcgcaggattgcggattttaggaaatttcaaaaaattctgtattaataaaaaatctttcaaagtataaaaaagtattcaaatatatttttaaaccaaaaaatgatgaagatgaaaaattaataacgtttttttgcttacactccaagcaatcgactgaatcttctttaatgcgtttaaaaagaccgatttgccaaattgggtggctcataataatagcttaaattaaagtaaaataatttttatttaaatttctttgcaaaaaagccataatccattatgtatagggatgggatttttaggcacaaaaaatcgcgaaataggcacttaaaaaggcagaaaaatcctaaaataggcaagaaaatagtaaaaaaaattttattaacgctttttaggtagcaaaacacataaaaaattcaattgtataaacttttttcgaataaggataagtttttaaacgaaaaatttttattaagaaaaaaatttttgaaaaaagaaagtttctgaatatttggcattctatttttaaaaattttcaaaaaatcaatgcaggatcctgctgaatcctgcataaaaatcagatttgcgggtcctgttgcaggattggaattcaaaattttttacaggaaaggatccggcaggattaatcctgcaaatcctgtaaatcctgtattttccaaaatatgcaggattgcggactgggatcatgcaaaatcctgcgcaggatcctgtcctgcgccggtctatagtgttaggtatttgagaaaatgacggcaaaaaatttttccataaaacagcaaaatttggacaaatgaaacatgaattgaaaatcattaaaa

SEQ ID NO: 21758 - DNA, 1923 bp, Heterodera glycines
tttcagctgacatcgggggggggggggggacttttggcgggaggaggggagaggcaatatttttggccataattacctgtagccagtttttaaagaccaaaattggacacgtaaatttaggattgtggggggggggggtcttttgcgccgtgaggtaattatgggggggggatgtgcaaagtgaggtcaattgttaagtacaaggaacgtgcaaaaaaataaagattttgggattttgggaggtgtgttttttgccgtgaggtaattatgggggggggcaaatgtgcaaagttaagtaaaatgaacatataaataaataaagatgattgaatgcctatagaaatgggagggagggcggctggatttaacaatgtggacatgataatggcacaattgtcgaggctgtcattgggtaatttgccttgccgtatgcatttatgccaaaaactggatacacggcaaggatattgccgtatataaggcgccccaaaaatctattcacacatcactccatccaagacaatcccaccctttccggtgcccctgctgaacattcgcatggcctacccctctctctctctttcccgtcataagccattaatttgtcctcatttaaatgttgaaataattatttcaaattttgattcattattaaaaaaataaattaaatttaaaatgtaggactcccctaacataaaatttttcaaatttccaccctaaactcaaacccccccccgtccaaccttcctctgttgcttctctctttctctctctatcctctctctctctcctctctctcccgtcgtaggcctattaccagacagcacaaaaaaggcattttttacttacagtaaaaaactttttttttttgaacgaaagccctaaccttccacttcaaaatgattattaatttcgtttctaggatattttttaaaatttgtaggcttattattagggcttgtaattatatggacataaaatcgcaaaatatggccataaaatatggacaacaaatcgcgaaatatggacataaaatagcaaaaatctcaaaatatggacataaatttttccaaattgatggtataatttgtcaatatttcttcaaatttgttaaatatatatgtagtaaaatcttcaaaatggttaaatatggtattaaaatcattttagatgaaaaaaacatgataaagctaaaaattaatcatttttagcgaaaaatcaacccaaaaagcgaaatttagttttttctgcttatttttgagaccaaaaataacaatttttaagaaaatttaaatttttccaatattctctggaaaaattttgtaaaactgattttttgaaaaattttccgttttttgaggtcaaaaaggcaaatttatctgttgggggccgttctgttagaggttttttggaaaaatgccaaaatatgggcataaaatatggacataaatgccaaaatatggaaaaatatggaaatatggacataaattgccaaatatggagaaatatggaaaatatggatatagaaatacgtcctagaggcttcaaactaagctaaaaacatgtttttcgtgcgtttcaggcctcccatagtccaggaaaaaaatatggatttccatataattacaggccctacttattatgataaggttgagaaaatttaactacccctttacaccaatggccataatgaattaatgtttagtgaaataacattaaacttggccagtttgtcaaattcaatatgttctttaagattaagcaaaaagagaaatttttaaaccaaaatcgtgagatttcagggcagacccttatggctaaatttcaggtgtccttggccaaacttaaattcacggaaaatttcaaaataaatctccttcctatttgtatggtctttagaccctaaaatttaataataatgca

SEQ ID NO: 21759 - DNA, 1974 bp, Heterodera glycines
  unsure (1)..(1974): unsure at all n locations
caatttttgttcatttgtcgntcgtcccttgntcagttgcgctgcttccgctcgccatgttcgctctgttccatgccattgccttcctgcaaaggatggactccgagttgggctggcattcatccctgattctcaagttggcacagttcaaagcgcagcacaccgccaacattctgtccaccgttgcgtgtgccgaaatatttctgttccctcttctcgtcgccatgattttcacgtgcgttttaagtctcgaaaacttaatgattttttttaatttctaagtttaaaattaaaaaaaaacaatttcgggtggaaattaagtgctccaccccattggcacaccatcgggtccctaggtcgctgaaaaaacccacgaaaagcaacaacaaaaaaaccatttctttcaacttcatttatttttcatgttttttagtctccaatttcacgtcccataatctcttccttgaattattattggattttgcaggggaaaagccaacatcttcgctccgattgtttactatcaatttctggtattccgttggctgtccgtgcgcaacccgtacactcggtaaatcatccaataaaatggcgttttttgcgaaaaataattccattttttaaataatttaattattgctaattcccgcccccattttgctcatcagggcgatgttctctcagctgcgcctcgccgtgctgtctgttgctgaccacgcgcgttgtcccggcccaattcgtgcgctcgtccacaaggcggtcgcactggtcgaacgcctcggacaggcccatgtgcagcgtgtccagcagtgacatttgtgatgctgacgacacacattcattttcagtcgattgtccgctccgccgatgttctcacaaaaccccagcagttgtgacccctccaattttgatttgtctcccccaaaaaatccaaccattacttttttgatgctgctggaattgttacaaaaagtgtaatcatcagggagcggattttaggggcgaaaaattccaatttgggagccctaaatatgcgaaagattccaaaataatggcataatttttctatagtgtattctttttgaaaataaattaaaatagaatgcaaatattttgttcattgtttgccatttggggcggaaattcaaaatatggatttctagggtcaaataggggcattaaaacgagaaaattttgcgttaaaaatggtttttttttgtgattttctcattgaattaaagccgcagaaaatatttagaacccctaaaaatccgctccttaccccccccccccccctcagtgtttcccccacctttcttttcccttccctattttttcgattcgccagccaagcgaaatattgctgacctttctgttattgtgttttttacacattgttttgtttcattttattttgatacaatagctttagtgtgttgtttttcacaaatcatagaaaatggcagaccaatttgattcaatttttgattggggataattgtgccgtgtttttggtgttgtgcaacactggcacttttttaaacttcctctccaattctaaacttgccaagccctacagtttcgaaatgtgccgtccaattggtcacacatttcaatgggcagggtacgccgtttgaatgtgatgtcctgcaggaatgccctcctccatattagctgactgtctgtgtccctcccgtccatccccatccctcccttttggttagcatgggatggtcacttccattcaattcccaattccgttgcattatcaattctcccctccccccccccccctccaaaattcgtcagccaatgtttgtgtaaaatgagaggggagagagtgtgtggggtggtggcgctggggtctgttgagtcatctcctcgtcctcctccccgtcgtcggtcggtcggcgcttcgtccgtggccctctctccgctacgccttcggtgtgtttgctttaccgggggaggggg

SEQ ID NO: 21760 - DNA, 2377 bp, Heterodera glycines
tgacaataatatataatacgttgaattaaatgttttttaccaccctggaaaaaaagtgtgtacatgaaaataattttcatttcttattatttttccgataactaacaaaggaagtggcgttaaaatatttgaggtcattttgtgtttaaatatttaatatatagcaattttccatgataaatggaataattagataaataattaaaaaatgtgttaaatttttaaaatttaactaaatttatctattaaaaaaactttatatacagaagatgataatgatgtatatataattcagtctacatttaaatattaaataacataaatccgaagaaattaaaactccacacacatgtcgtaaagcaatgatgaatcttcctggtgtccgtcttgtcgtgatttaataataaaaaaaggccaaaaactaaatcaaattaatcattaattattattatgaaaaaagtctaatatacgggtatttgtggcgctgatcacgaatatgacctttattttccgaaattccgaacccgaattcgaacaaaaaaccgagattcacaaattacaaggaaaacatgtttttaggggttttcaaggtcgctgaaaagtgaagaaaaataatttctaattattaaattgctaatttgaattaaaaaaataaaaaatgtttaatggataaaattatctttaaaaatattgaaatatttttaaggtatgtataattcagcattgttttaattcagtttttagagagcaatttacaaataaataaatccaaaaattcgtgattgcaaaaaaacaggcaacctaaatcaaacacgcatattctatgaaaagaacaaataaaaataatttttaatatttaaaataattctaataatatttttctccacttcctgaagtagcaacaaagaaatataatagctatgatatctaaaaatttaagctaaggtctcaatagaagattagtataaatatacaatgtaaaatttaaattaatttgtcaataaaaaataaaacaataatcagtgaaaattatccgagtatgtatagatctgacttttcgttatttacccggtatactcactttataaatccgttgttttcattatgtaaatatattgtgtttaaattgtcatatattccgatactctaccaaattttccgcgaacaactctttaagtaaattattaaactaaaatagaaaaatatactaatataattattaataaataaaaaaaattttcacgacaaaaatcaaagaaaaaaaatattgtaagtttatcaaaaacaatgaaaaattctgcaaaatatttgtatcgtttatataattattatattattaataattaagtaaaagctcaaataaatcgtaaataaattttaattaaatctaaaattttgacggatcgggattccgcccgatcctccttcggataggggcactttttatcgccccttcggtggccttccctcccgcagtcggagcaggtaggcggcttttgtgccacctccttcgcttcggagtctatcagaatccgaagatccttcccctttctccgggtgctattgcttaccgcccgtaccgcgtccaccagatccagcggatttcctttgactcccctttgacaaaggagaatcttgtcatttgcgaaaatgatgcgtcggacaattctccctcagtggaggaagaggacgacttagtaattttattgaatacgcgggaagtgatttctcccttctccttttttgaatgagtaaacggacattccaaactgtccgcaattgccattacattttgcacgagaaatattgaaaaaataatgtaaatagtcggaatgctgctcaggcttcccgatccttcgttttgactcagaccaaaatccgagttttgactatttggtgtttcccgttgttcggtccaattctggtcagtggttaactgagtctgtcctcgagccactggtggctctgagaattcccggaggttccggtcccctccaggatccgtatcgtcctgtcgtaatggacggtttatttgttggggaatttcagtctccccctcaaaataacataaatccaccacttctgtggggaaataatccatgtgaatttcgccacggcggggactaaaccccccacattcttgtaccaatggtacaagaagattgatagttattccctgttcctcataatgtctgaggacggtgaatccagataaatgttcgttctttctgcgccactacgtgataatccatcgaagattatttcacggttagtggcgaggtggttggtggttaaaaatgcgctattcattaggaagtcccgaggagggcttcagcagatcgtctttctcttttgtgcccaatgatttccccatgac

SEQ ID NO: 21761 - DNA, 2091 bp, Heterodera glycines
attattgctcttttctaacatagcatccgaatgattattatttttctattttttattaatcttttccatcttttgtccgctgtcgatgagttggagcgtgtgttccgcgtgtccgagtcagtaccagaaggctacagtatcggcttcatccatggccaaccctcggaggacccaacaaaacagaattttttcatcgtatttcctccaagcattgatggcaaagacaatagagcggcagaaaaggtgggattaattgatcaaaaataatgaaaacaaattttagttggcaaattattttagatttcctcaattttcatagaaatttttttttataacggaaagtgaggtccattaagtgatataattaactggtaaccaaaatccgagattttgaactaaaaaaacattgagttttcttagttcgagactctcgaccagaggcccgtgccaggagagggctggaaattccctccttaatgaaaaatgaaaaccttttaagaatttgtatcaatttcctcaacatagaattttttaaattttcaaatattgaattagtcatttttgggtaaaattgcgcctatatttttgagaaattacaaaattacatcggacaaaaaatttgtttggggcgctgaagagaaaaaaaaagtaagttttcgaatttgaatgcggcggcgaattaaatgtttttttttgtgagaaacaaaaagttttcccatcaatcaatttggacaaggtctttttgtgacagcaacagccagcaagcagttcgttccttgttctgctccgacgttttttgttttatgcagaaaataataataatttgtacgctacaaaatgaccttgataatgggcaaagatggaaaattatccataaaattgggagaaggaatattgctatattaaatcgtagagctcatcgagctgtacaaaatgctggtacaggcacgcttagcttgggttggccatcgacagggtcgggggcgaggctgagggtcctccggcagatgtgcccgagccatgacgggctccaagtgaatggatcaagaaccggacccggcctgggagatagctcttgaaaaactgaacaaaaaattgttcttaaccgggccggtccggattccggatcaggcacttttggtgccccgaaagtggtgcgataggcttccggaaaatgaccaatcaatcactgagttttttttcgcatcgtctcagcacggttgtaatatattatatgtgccgtaacagattgaatttgtttgggtcaaaataattagaactgacgaatcggtcaactcattcattgatagaaaattgaaaaaagctgagctattccatggttctgtaaaatcgggattttcttagcaagaaaccgatttaaaactaggaaatccgattttgattatcttcacacttaacaatttgcgaaaatatgtaaaatgtgatttggataaaagagttatttaatttatattaatttaattttattaaaaatttttttattgttttttcagttactccatgttgacgaacgtactggggaaattgcacttgggcatggccaaaccctggattatgaacgtgaacatcagctttatgtgttggctgttcccgtggacgggtcgacccccgtttcactgatcattgaagtccaagacgaaaatgacaacatgccacaattccctgatcaaaattttcgggtaacaataatgtttgtcaatgccctcaaaaatttcggaaatcggcaattgaaatctcgaaggcccagaaatttcggcaatcggaattccaattccagaaattcggaaatcctcactctgaaatcggaattccgagcccaaaaatgttggaaagccccaatcgtaaaattgatattccgacacatccctgctggtgggaaaatgtaaattcttgccatgctgaacttgatggcgtggaaaggtccttttttcaaggacgctcatattaatagttctttgttcaagaaacttttttccaagcactaacaaatgaaataattgatataatggaatttattttttaattgattttgcatcaatttttcatggacatttcaaaaatttgatgtaa

SEQ ID NO: 21762 - DNA, 1704 bp, Heterodera glycines
  unsure (1)..(1704): unsure at all n locations
gtaatgaacgcggaggagcccaaatgcaacgagacaaaattcgaccatttccatttggaaaatgaaaaaggagcaaataaaaaataaggcaacgtaaaagggaacaattaaaatatntaattaataatgaatgattaaggctgggatttttatgtttttacatcagtgatggcgagagaagcccaaaaatagcattttctccgaacaatttttgatttaaagcaacttttaaaacataaaaacgcatagttcggggtttgtcatgtattttacacatattttggcatttttgagcaaaatttgtaagaagaaaaaacaagaaaattgaaaaatataaccctaaaatcagctttcttgtcatttcttacagcatttctaaaatttatttgtttattctgaatgctgaaagtagccaaattgaattcttaattcatcattggattttgaagttccctgctgggaacttttaattataaaacaattttattagaaaaaacgaccaattttaaccccgaacacttcgaaaggtatttgatttgcaattgtgcggacgaaaatataaagaataagattttttggatttttatacataaatacactatattttaccaattttgagcacatattttggatttttagcacatattttattatatatttcaggggtttagcacataaaaatctcagccttaacgatgattgactatctttagaaattaatgtcaattgacacgcaaagtaagacgaaaaaaggagtcgaaattcctaacaatggaacgtatcacttcaatttcgaaaacccagcactgaacaaatgggaaattagcaatttagaagaaaaagtagcaaagaatgaatacaataaatttattaaattacttaaaaaaaataaaataataattattatttaaaaaaagtaggaaaaacagtcaagtaaagaaaatcaatttaaaaaagagataataataaaacaaaggcaatatgcgtgtactgtcatagtcaaaagtgtacggaaagtcatttaaataaattaatatcaatgtatcgcaggactgaaaatctgaaaaattcttaagagatgaaaattttttgagtgggcctatatgataagagcacaaaattcgctatgggttacgacttatacccggtgagataggggctgatcaataggatttgatcagtcctattttttagtattttgtagacgaaatggaagtacccacagatatggaaaagtcggacagactttcgtttatattgcaaattgtagaaaaatttgtgctctttcttataggcctattcattttttgtagaagtttacaactccctgttttttttgaccaaccaaaaataatttctttgtattcgtcaaaagtactaaacagccttattaacctgcaaaatttaaaaattttttgtcatgtgcaaaacaacaaaccatgtttttgaattcttttgggcataattttgaaattcgatattaatttggattagaacgaaaaaaaaatcttccggcggccttttgtcctgcgacctttttaaaatgaagcaaatggccgaacacttttgaccattaattaccgtattcaattttttctgtaggaaaagcaacaaaaaatgcatcggcaaaatgtgatacttcaaaacaaaggagcacaaacagaagcgaacaaagaaaaagtgcataattaaatgaaaaaacaa

SEQ ID NO: 21763 - DNA, 1934 bp, Heterodera glycines
tatttgatttattttctctatcgaagactttcgaccccatccgaacaggacaacattggccgaactgcttgaacggcaccagcaccccaatgcgggcaatgacactgcacatgagcaccactcggtgtgggtaacggaagatgtgctgggagctgtgccgacattataactggacagtggcggattggcgagaagcggacgacaagcttggcatcggtttcaccattgtgctcaaaaaagacatgattgggcaaacatttggcaaaatgaatgaacaattacagtagttctgggcgttgattaggcattggatactgtacattttctgcatacgtgcaataaggaatattataaacaaattttctcattattgttcttatgataaaattctttacgtgattaatttttcaagaaataattgctaaattttttaaaaatttaataatttttacaaatttttcctggtggcgtttgtcggcaccgccggaccccattttcaatattttaagaaaattccaccccaaaatagtcaaaaattgtaatttttgcgaaaaacagataccaattcaatgatgttcggtaataataatattattatttttagtgtatcgatttttatgactattaagctaccaatttttcgagttattatgtcatcaattttaattggtattgtctgccgttgaaatttttatgaatgaaaaatttcaaaaaaaacaaatgcattaaattaatccctgagccgttaataaatgacaaaatgtgattttccctgaggcatattcagaaatgatcattgatcaaccacaaaatatgtaccacccaataattttgctcatttgatccttcttcattcattgtctccgctccgttctttagtgaacaccagcgacggcgataacaggggcggcaacaatgggctgcgcgacattttcacgcagttgttgcggagtgttgatctgctgatgatgttgagtgttaaaaattttgttaaaatttacaattcttcacacgacgtctaccggctgttcaagcagttgttgctgctgacgttgctgtgcttgttgctcgtctttctgcaactcctctgatgcatctgcgaatccgccgccgtggccaagacgtgcgcgacgctcggcctggcgcaccttggcctccaggattgcttggttggcacgcgcttctgcctccagtttggcttggcggacacggttctccacgttgcgcactcgcatctccgcttctaactttgcctggcgctcgcgtgcctgtgaattttttgttttggataggacagttaatctgatcagtgatcagcgatcagcatccaggctttacggagtaaaaattctttttaattcccttttaaattttccaaatttaaaaattcccttacctggatttcgactaaacgcgcttgtctctccgcctcgagtttggcaacacgtgcacgctccttaatgcgcagctcttcaagacgagcacgctccagcgcaaggctgggctcctgttgcttgttttcctgctgctcaaactgttggatttcgtgttgctccttctgctggtgttgttgctctccttggaaagtcctcatgctgtcctgctccattttttgttgttgctctccttggaaagtcctcatgctgtcttgctccagtttttgttgttgctctccttggaaagtcctgctgttgccctgctccaacttctgtttctgctgctgttgttgctctccttggaaagtcctcatgctgtcttgctccagtttttgttgttgctctccttggaaagtcctgctgttgccctgctccaacttctgtttctgctgctgttgttgctctccttggaaagtcctcgcattgtcctgctccaccttctgttgttgcaaatccctcaaagtgactcggctgtcctgcccccaacttcttttgttg

SEQ ID NO: 21764 - DNA, 1794 bp, Heterodera glycines
  unsure (1)..(1794): unsure at all n locations
attttaggattaatcggggagggcgttgagctccccacgggattctggacatgaataagattaaagaacaggataaaccccttattgttaatacttgacgatttaatgcttaatatgcagaatactttcctcgatctactctttaccaggggctcccataattggaacgtaagcgtaatttttgtaacccagagtctctatggtcgggacatcaaaacggcaagagcgaacgcccattatctggttttaatgcgtaacccttccggacaattacaagtgaggacactggggtcacaactgttcccaaaaagactgaattatttcatggatgcatatcatgatgcgaccaataatcaatttagttatctcatgattaacatgcacccaaattctgaggaggaattcagattatgtagcaaaatttttccagatgagactctggaaatttatttaccaattgaatagtatataagaatatgaatttaaattaaattaaaaatgtataaatttagctccgaagtgaaggagaatacagcgttcctaaagaagcttgcctccaccagatcagaacaaaagaagaacgaattaatcgaaaacgctacagctgaccaaattttggcaatcgttgaaatttgtgcaaatatattgagttttagttttaaactcacgaccaaacaaaaaagaagattggcacaatacgctgatttctatagagaaattgctaaatctcgttcagaaaaaacggcaagaaaaaggatacagcaggggagtggtatagccctgggagctgtcttggtcccggtactaagtgttttagctcaacatttattagaaaaaataacatcatgaaatttgcaaagaaaatgttaataattcccgaggccgaatatttggctctgcggagtgcgatgaatagtggtgattatctccaaaatgaaaaagcgagtttagacgcaaaaatttctcagaatttacaagatcctggcataagcgaggacctcaaggcgaagagacacgattggctctataaagaaagacgtacggtaaaggggatacttgaaaatagaccacagaaggtagtgattgagaatcatgtacctggtccgaacgttgcaccatatctgggcctcaataaccaatccaaaccacaggagaccgatgaaccccggaaaataattattcctaggaaaagacttaaagagcaaactcctgatcttgaatcagataatgatacacttgaggagttaagtccggaaccccaaacaacatccacattaaaaacacccattccgatcaaaactattatacacccgacccttttaaacggtctttttaggtatgtaaaagaaaacaaagatttatttaaaattacggcggctggaaaggtacagtcgaacatgaatttgccgattgaaaacagtaattatagagatgttttgttgtatctcgcggggaagaaagatgaaacaccccggggtgcaaaatttcttaaagatcggttactgaaggatccaacagtaaaagacatggttgataaatcaaaggtaatgtggggacgtggaaggaaaaaggcaataaaatctataaaaacacccggcatagcacgagagaagaaacccttcaaaccactaatatgggcaagactgtagagaaaattttatcaaaaatttattttaatttaaaatctccggcaagttttgcggggattcaaaaaattttaaatgaggccaaaaagattgacccggaaattacgaccgatgnacgttaataattttctcgaaaaacagagaacat

SEQ ID NO: 21765 - DNA, 2208 bp, Heterodera glycines
tctattaatcccgcagtctccaattatcccccagtctaagaggtgttttgaaaaataatccctctatcataatcccccagtctctaattatccccccttttctgaggaggttgaaaaataatcccccatgggctataattagagcatatacggtatttttcaattttttgtcttatttatgtaaataaaacaaacgtttaaaatactgattttcttatcaatgcgaagaaaaaacattacaattagcttaagagcttgcaaattttaaaagatttgtctcgtacaatttttaaaaaatatatatgtattttttgtaaaaaataaaaatacatataaaaatttattcgagtcaccttaaaaatttatttttcaaaatggtacatagtaatgaagtaaagtttaaaattgcctctcacatacataggatatcaaatgcttatcgacagacagtctcttctgtcttattaagccgttctcttgtgcaaaactgaagtttcgctctcatcccccttcacaatggcaatcgcatggctcagaatcggctcaatcacttcaaatccctctctcactgcttttgggcttcccggcaaattgataatcagacaattggcagcaattccttcatgaaaatgatatttctatggcaatatttcctacaatttgagtccacccgcggtgagacgggtgagagcagcgaatggcgtaatgtcaagccctttcttcagaagtgccacagcgattctacatgcataaactttggttgcccccggcattgcttttaacactttaccctgggcattccctctcaatgacttctttggtcgcttcgggcgtcacatccctttttgagaaccttaattaattgttgctaaatttaatccggctaaaactaatccaattagtccattcaattaattaattagttattgtaccctgttccaccgctggtcaaaatgcagtcaactttggtggaatattcacgtagatattcaacgattttgcttttctcgtccggcactattgtgtaatttgcaacggtcactttttgccctcttctgattaaaagcgaattctgcagaagttcgaccaacaaaggaccacttttgtccattttgtggtccttgtcagacgaatcactcacaacgagaacagcaaaatccattgatatttaaataaaaatatgaaaaacgatgattgataatgtgataaattcaataaaaaaacgaaagataaaaagacaaataaataaataatggttttgttattatttacaaaatttaaatttcattttaagcactccatccgtttatttccttctcacccatttaatctcaaaaactgaattaatccaattttgtcatggatccgtccgccgtttcttcttcgtccagcaccgatcagcaacaaaatgcggaagaggcgcaaaagggcgatttgacattggcacagcaaattgcggaggacaaacagaaaatgtttgaacgctcccagcagtaccaacaggaaattgaggacgaagtaaaaaattgggaggagaaaaacgaattgggaagcttttatgggttttttctggacagaaagaaacttagtcagcaaatttaaatcactttccttttcctttcagattcgcaagactcagccgttggtttcgtccaagcaaaacgtcagttttatccttaaaatttcactcgtttgtttaggggtgtattttatacgaatatttcgatttcaccactaaatggcaatgtttgttgtcctttcattttctttgctttttctccctccgccctttcccgtggcttctccaattaactgttttcattaatattcagattgtccatttggttggcgaatttgatgagaagacgagctctcagtacttcaaaaaggcgacggtatcacaaaaaagccaacatttttcttattattctctgttttcttttaggagcttgccggcgtttactcggacattcggcgaatccgtggcgatggcaattgcttttaccgcgctgtactcaccgcccaactcgagcgctgttttgaggacgccgaggagctgaaaaggttggaaatggcagacaacagcagcagaacatcactggttctgttcaaaaagcacttattctgatagaaaatcttaggcattgggccggagaatggcgaaaaagccattttttgatagttttttaaaagtaaatgattaaatta

SEQ ID NO: 21766 - DNA, 2010 bp, Heterodera glycines
  unsure (1)..(2010): unsure at all n locations
ggacatatggagggttttaaaataacacaaaaagatttttctgcaattaaactttttgagatttttacacttcattatcgaaaagttatgttactcagtaaatattttttttcagttttgcttaattttaataatgtaatacttagtcgatcatttaatccccctaaataatttgaataagtaattctaaaaatttttcaatgaaaacaataaaaaaaaatacaaaaaataaataccatagcggcatctgcacgaaatgccgaagcaccagcgacaccctctaaaataaaaaaatttcaaaaataaaaaaaacatttaattaccctgaagccatcgcatcatttcgtccaaaaaatagtcactgttcgcatcacatcgtacataagagcctgctgtgcttggacaagcctgtaaaatttttttaaaaaataacaaaaattaaatggttttgcctgatttgccggttgtccaaagaaagcggattgcataattgtgccatccgcgttcaaatttgtgccaacaccacggccaaacaaactttggcgcatcatcagacgaaagaaaacgccggcacgaaggccaggaattgcgtcctgagtgatctgaacgggggccaaaaaaggatacaatttagataccagcactcgattttttggttttattcaaattttaatcgacaaaaaacgatcgagaaaattcaagtttttcggttttttgatttattttgtcaaccgaaccactttttgctttctaaaaaattcaatagtgttttaatgttgcttgactcatcattaagggaagcctcttgattggtgcctaattaccctgataatggctctaatttaaagcattaggttcaatacttaattaattattgccctaatttgtgacctgctgtttgcataaatatggagcaatcattgctgggtcttgtacccgtggccaatccgtgctgtccgggccaacattgatggttgggccttggtccaacacagtggcaaagcccaaatatccattcacagaaatctgagcattatttatatctttatattttaataattttaaaaaattaaaaaatatattttacactaaaataatttaaatttttactgatttttttcttataaataaatatttatttaaataaagaaaataaaattataatatctttgcttaaaatataaaaattagaaaaaattatttatttgaattacgaactaaaataaaaatttacgattatgttaaaagaaatttttataaataaacatatttgaacttttgaaaaataaatttcaaaattaaatgtttagagcattaatataaaaaaatgcaaaaaataaaattaatatttgcttaaaaataaacatgaaattaggtaattacaaaaataaattatataataataatcttattcttactgttgtgtagttgtaaaggcccccgtaaaatgggaagaacagatgaaggtcaatggtctgaccggacgtcaggaaccctggtgacacttcaaggtcgccattttcgggtccaaaaggcaccaaatttactacaaaatgtatttttcaaattaattattgtcaatgaaaccattatattttaatttttggtatcattcaaaagcctaatattttctatttgtctacaaaattaaaaaaaattttcagaaaacttatgtcaataatatttctatctaatagaaaatacttagagctacgaaagatatcaagtattaaaaatttggttattcttaagaaaaatagaataatttttcgtcaaaaatttcctttttggtgttttttcagtaacgactaggcaccaataatcagccattttcagaataaattcancaaattaactaagannaannttgatatgataanntacagtaaattntttacttttattttagatatttcctgaatatttttttcacagtcaatttttcatttattattgaaaaataaatgataaataccatagtccnatcattggncaaaaacactgacagta

SEQ ID NO: 21767 - DNA, 1742 bp, Heterodera glycines
  unsure (1)..(1742): unsure at all n locations
agaccgagagtgattagacaaggtgtggtcaatgcttatgctgctggatcacatgangaatgcacaagaaaanccaaacttgnnccctagagtgttagatgtgaattttgtgatgccttgcattttgtagaagagaaagtcaatggtcgcggcaattcttttaaggattgttgccactatggcaaagtttttgttcctgagattcctgagcaggattttcctgaggaattaagggatttgtttatgaaatttgatgcgagacatttgaatttttttaagaacattcgacatttgaatagttctgtatcatttgtttctatgaacccgcttaggtatagatatccgtgtaatcgagggccgtattgcttccgcatttacggtcagatttatcatcgaatgaatttggctttgaaccctgaaaatggcgatgaacctgcttacgggcagattttcatcgttgatgctgaacaagcgatgagatcaatgaggcaaggcaatgtcgatgttgaccctcaattgctgataacagtgtatgaagtgatcagaaatatgaatgtttttgctgaagcatatatgatgatgaaagatgaggaagaagaagaagctgagagagcaagaaatgagatgcgagagccgaccgagatcaaacttttgtttgataccggaagacaattggacagacgtttggggtacaatgtacccagagcgaatgaagttgcagctgtttatgttcctggggcagatggtgaagtacctaatgccaagattgtgattagggaacgtggaaaggaattgaagattttgaagagtacagattcaatggtgactccaatgacttacccgttgttttatccgcgtggtacgcttggttggaaccctgaaatgaagcatagaaatagtaacagaagagtaacgaggttgcagtatgtatgctatacattagcaattagagaaagagagtttaacccgattttatacggtggaaagctctttcaacagtattgtgttgacgaatatgttaagattgaaggagatcgaatgaattggataaagtgtaatcagaaaaagattttggctgatgcatataagaatgttgataatatgttaatgagaagagcacaagaaagaggtttgccactgggaaggaaggtcattcttcctccaagtatgacaaatagtccgagatatgttgagaagcattttcaagatgcgatggccgttgttagacggtttggtaaaccagatatgtttttgactatgacatgtaatccgcaatgggaagagatttcagagaatttgtttcatgaacaaaagtcaagtgatagaccagatttggttgtaagagtttttaacttaaaagttaaagctattatgaatgagatagtcaagaaaaaggtttttggcgaagtgattgcatggatgtatccggtagagaaccaaggacggggactaccgcacatccatttgcttttgacattggcggagcaagacaaattgattaatggtgaagatgttgaaaagaagggaattagtgcgagaataccggataaagaacatgaatatggtttgtttgatttggtgaaaaggtttatgatccatggcccatgtggtaatttgaacccaaattgcccatgcatggaagagtttgttgacaagaatggtattaaaggaaggaaatgctctaagggatatcctaaagcatttcaagaagagacagttgttctgaaaatggttggctttgt

SEQ ID NO: 21768 - DNA, 1663 bp, Heterodera glycines
aaaaaaatagttttcgaaaatgaaaacgaaccttaaatttttatttttcacgaaaacgaaacacgaaacgaaaattaaaattttaaaactcgaaaacgaaacgaaaattttttcttggacgaaaacgaaacacgaaaacgaaaaaataaccgttttcgtacgaaacgaaacgaaaaacacgaaaattttttgtatttatttaatccataataaaaacatttaaatttttaaattgtgtcttcaaactaagggaatgaagatcctagtagttggaaaggctgatatggctctaataagttaatttctaattcagaaacccgaattcgaacaaaaaaaaattttaaaatttgaattttgccacagaaaattattattatttggttttttaaaattttattttgaaagtttttagagggttggtgtccggctgtgcacataggagaggccggaaaaaattgaaattaattaaatacagggctcccaacagaaaaatttgaaaaatgagcatttagctaacaaaaaacttgcatttaaaaaatgattttgagcctattttttgacaaaaataaggaaaattttaatttttgacctttttacatttttcactgaaaattggcaattttaatggcagacttagaaaattttgaaattttcaatgaattttaaagaaaaatgtggcatgtaacatacgagatgacttattttttccaaaaaaagtcattcttaagggtgtaaatattttcgtctttttcgtccaaattccgtttgacgaaaacgaaaacgaaacgaaaatttaaaatttttaaatacgaaaacgaaacgaaacgaaaattttttgacggacgaaaacgaaaacacgaaaacgaaactcaaaaagtgacgaaaaaagggaacgacacgaaaacgacacgaaatttcgcacacccctgctccccctccgtttccgcgctgccagggaagggcggaggaggagatgctttttgtacacactttttgctgattaagatacgatggaaaaatgggcggagcgcggggggatggagagcggagacagagtttgggagaagcaacggtcgagagtaaaattaagaaaatccaatatgtgaaagcaaagtaaggaaccgatgaaattaatgaagcaatgaagaaaaaaaaaggatccgaaaagtgctttttgatgatgaaatttatttaaatctcaaagagaagcgaatgctgtatgaaaatgttaagcaaaaaaccgatgaatcaatttcacctattaaaagcggaaataagccgcagaaattgacatcatttggagaggtggcgacgaacttcctcctgaaggaagaagattaaattacgggtggaaaaatgaagaaacggaataatgaataagaaaaaagaaaagaatttaaaacaataataaaaagctaaggcctattacataacaaccgcctgctgaccccaaccaatttattgatttttttcaaatataaaacaaaaagttaaaattagttggataaaatcattaattgtttttatttcaaagctctccattgttggagtggagcaatgaacaacagtggcctagaaaaaccagcagcagcatttgccatcaaagagtgcaaaacaactgacaaaatttgtacatttggaaaatgtgcggctggtactaaat

SEQ ID NO: 21769 - DNA, 1525 bp, Heterodera glycines
  unsure (1)..(1525): unsure at all n locations
aaaatgaatttttattnttaaaacctacttttaaaaattatgataaaatataaaattaaaataccggctgttaatgcaaaaaanttgcggcttttttcttgtgttttaatttgtgaaaacacaatttcagaacggagttctgatttttttgaaaatcgaaagtttccagaattctggaaaatttttcatctttaatttataaaaactagagtccggtaaaaaattttttccgggaacgggaaaacgaaaaacaacggggcgggattcccgtgttttcccgcgggaatctcgttcccgccggactctaataaaaaccaaataaaaaattttattcttcctgtaccaagggtacccgcattagcaagatgccaataaggatattatccatgcaaattttctaattttatttttgttcgagttcgggtcagcggttcgaaattgggaaaaatgggtgctgtattcgtgatcagcgaccctaaaaaccccttaaaacttattttataaaacacatttataggcatttaaaaatgttcttcagacgcttcttccgactcgataaatacgcgaatggccgaccattcgttggtttatccatgcaaataacttttcttatttctcttttcgtgcatttagtatttgattggggcaataaatgcaagttttgatgaacaatgatattttcgactttttgttcgaatttggagttcggggttcggaattggcgagaaagggtgtcatattcgtgatcaatagggagtccaattatatggaaatccgtatttttttcctggactgtgggaggcctgaaacatacaaaaaacatgtttttagcttggtttgaagcttctaggaaggatttataaatccatatttttccgtatttcgcgatttatgtcaatatttccatatttgtcctttccaaaaaacctctaataaaacggtctccatcagctaaatttggattttgacccttaaagacagggaaattttccaaaaagtcattttttaacgaaattttgtcgagaatattgattaaatttatttattttttaattggtaagtttatgtcaaaaataagcaaaaaagccaaaatttcgctttttgggttgatttttcgctaaaaaagagtaaattttagttgtatcatgttttttttcttctaaaatggttttaataccacatttagccattttttgtaagttttacaatattttagcaaattttgaaaaatttatttccatattttgcgattttggtccatattttatggccatatttcgcgattttatatccatatttttggactccctaattgatgacatggaaaatgtactcattcatataaatgtatttattccgcaatgataataaatgaccataaaacatgcataaacagggcaaacatattacaattataaaaaatacacatatatatggcatatttaaatagaacaacaaccatttgtgggagaattacattcagcaaaacaatgccacagggatatggacatacatatatacatac

SEQ ID NO: 21770 - DNA, 1476 bp, Heterodera glycines
aaaaatcacaaatttttaatgaaaatctgctaaaaatggctcaaaatcacaaaatttggtcattttttggacaaaatctgttaacaaaccgcatttaaaaccgcaaaaaatttcccggcggcgcctatcggcaccgccggaccccctgtcccccaaaaattttttttggaaaaaccgcgccacataaaaaacgggtgtgaaaagcaaaaaaaaaaaaaaaggtcgtcgcccgggggaggtgccccccccaagccaaaatcctgggaccgtccctggggaaaagtcaccgggggggagggtttctctgacaaggggccaacttagtccaaaatatcgcccgctgttttcagttgcgtgtgacccgggcggagccactcgttttggaagcggagatcgaacttggctctaaacaccttaacgaaggcggcacaatgcatggcggattcgtcgccacactcgtggacatcggtaaacaaaaattaactttgttttaaaaaattacataaacggttctaatgaactcagtgtcatgctgtgccgttgaattgactgcgccgaacagttcgttgacgtcactgttcgtctcgataaggtgaatgttttcgtgttcgcccgtttaaacggattttgttaaaaatcgtcgattgtaaattaattaatttccaccgcccaattttgcaattgggacattaactaatgattccgtcccgatttaagttatttgctgcccgcaaaaattggagagagaatcgtcatcaaatcggagtgtctgaaggtcggacgaagcatcacattcacagagacaacgatcagtcggaagagagacggcgccgttcttgccaagggcaagcataacatttccatggcacgaaattcggacggaacccatcaaagggggaaagaggggaacaattaatcaatccgtcatcaaatgtgtgaaaattcaccttttgtattgtatattggaagatgccgcaaaacagactaccatttcattatattgtaccatttgagcgagaaaagacacacaaacaaacaatctttgcataatataaatttgcgtttttggtggagaggcataaacaaaggaggaactgattgtgaggaactgttcaagcagtagctataatggtgcagaggaaaatgtgggaaatgttgtgtgacaaacaaacggacaaataaaataacattaggaaaaagccggtaagaatcgaataaaaatgtcgaatgaagtagggagtgacgtgccgcaaccattgatcaattcatcaccatcatcattcacttatccaccaatccgaatcgtagcacattagcatatcatcatcattcatcactgcatcatccggctaatgctctccaactcgtcaacatcggcgaaagggtcggccgactgttggtgctgtgacgccgcgggtgacgacaattgtcgctgcttctgctgcggctctccgcctagcgccgaaaagcgagaga

SEQ ID NO: 21771 - DNA, 1646 bp, Heterodera glycines
aaaggtagccgaatcaaattttggaaattccatgactttttctgattcttcaaaatgcttaacaattgtttatgttagaaaaattttgaagagatcaaaagatgcccaattggcaggcaaaaagataaaaataattttggaaaatagtcactttataatttttttctttttttataaagaaatagtatgtaaaatgaaagatacttttttatctgcgctctctaatcatgtccagcagacatttgcgcctatgaacccgatttggtcaaaggcgcaattgtctggggcgcaaatgttgggttatttattgaacatttctcatttttcgagtcagtcagtgtatggacgcgtaaaaatcaatgcattgctaatggacggctcggattatatcacgattgttccacacagggctcccaactgaaaattttcaaaatcagcatttggccaacaaaaaatcataaaatcaccattttggataattttaatccaaatgaagaaaaaccaataaaaacgttcgttttttgcggtgcgctttttccagaaaacttttttgggcgggggtgccggcggtgccggtaggcgcagccgggaaaaatttttgaaaagttgagtgaaagtagatatgtatcagatttttatcaaaaatgaacggtttttgccatttttagccaattgtataagaaaaaagtttttgagcccgacggtgccgataggcaccgcagggaaaaaattggaaattttgacaatttttaaagattttttccaaaaagcaacataaatcagcaaaactgaaattttcgctttgaacttataagaatattaaaaatggagaaactaattatttataaacaacctaagcaataaaatttctaagaataaaaaattacacaatagaaaaatcaacgtatcgccataaatttgaaaatttgggagttttttgtagcatttttacataaaactggccatttttaaggtattttcccaaaaatcaccataaatcaccccgggaaaattttgttaacagattttgtccaaaaaattacaaaattttgcgattttgagcaaattttgcaagaaaaatagggatttttagggtccggcggtgccgataggcgccgccgggaaatttttaaaaatttcagttcaatttattaacagaaattgtacaaaacttgctagttttttgaaaaaaaaaattaaaaaaatttccgacttttcatcaaaaatttcggaagtcggaattccgaccccaaaaatgtgaaaccggaagtctttccgtgccatacctggtgcctatcgacatctgcgagaaattttatgaaatttaatgcgatttggtaacagattttgtctaaaattgaccaaatgacgcagtttttgactcaatttctacaggattattaagaaaagcctatccggcggtgccgataggcgccgccgggaaaatttcacaaattttgaatgaaatttgcgatgaaaaatgagttaactttaattaaatttattatttaatttatttaaaaatatttggcattctgtcttagaaaaattttcaaaaaaatcaataaaatcccgcataatcccgcacaaaaaatcaaatttgcggatcccgctgcgggattggaactcaaaattctttgcgggac

SEQ ID NO: 21772 - DNA, 1046 bp, Heterodera glycines
  unsure (1)..(1046): unsure at all n locations
aatgtcccttatattattatacaaatcgaaagaccaaattctttcgggccataactttaaaaaaatcggtccatttttttaagcattgacattatccaaaacagagccattaaaaacaaaattgattcagccaatataaaaaatatttatataaaaaaattcatattctacttgcatatagtcctcaaatactaccataattaacaaattgaaggtttaaaaaaaaagtcatatcccgaaaaatttagctcagaatcctatgaaactgcccttcccccagcgacagtcctagagttttgatttttttttgtgtttttaggtgattcggtgggacaaaaagttttaatttttttttcaattttctcaaaaaactaccttttatttttaccattttcagaaaactccatcgtccgccagcgatggcactgacccgacggagttggacccggagaagacactacggttcctgctacagtactccaccaacatcaaaccgcgaccgtagccacaccgtatgccccttctgttactgctgtgctaatgatgatgatgattatggatgaaaatgaagcttacttgccagaaaaatatttaatttctttttttaataatttatggaaaataaacgcgtagtttaaattttaaatggaaaaaatacaatttgaatgattcaattagttgcgcaattaaaccagccgagagcccaccgaaaacttttcgaaataagcaaattgctggtcaaaaaaaggcgattataaaccctaaattttcattttttggataaaaataaatattgtaagaatgtttttcatcaagtttcaataaccttatcattttgagcgatttggacagaattattacgagattttgaccaaaaatggattctttgaggcgtttataaaaaataatttaaaagatcgctaatccgactgtgccgggaaactttatgggttttttccattttattaccacttggcngaatttaagaaaagctcatgtttcagaatttatgaaaccaccaagcatatatatatatatatatttat

SEQ ID NO: 21773 - DNA, 1017 bp, Heterodera glycines
ctgtgccgggaaaactttatgggttttttccattttatttccacttgccggaatttaggaaaagctccatgtttcagaatttatgaaaccaccaaagcatatatatatatatatatttatataacaattaaaatcacattgaaaatttatacatcaataaaaagaataaacagatttacaaaaataacaacaaactgcaaaatataaaataaataaatataatatgatacattattattagggctgccaattttatgtaaatacatatttttcctggattctccatgctctaattggtaggaaaaacatagaagaattcgtgaacaaattcaatttggacattgatcaatttttaatcgttgagaaaaagacaattgttttttttattgtttcaatatgctggaatttgctaatagtttcttcgttttaaaacattggaaaataaagtttaaatgctttattccatttttttgattattaaactttgatcatttttttctttctatttctattttaatataagagatttgaaaatttgaattttcaaagtttctttcgaacttcgtctttttgatgaattttttctctttttaatcctacttgaaaatatatttcctggtgtttttcagggttgcttaacacgaatatgatattctttttttgtaacaaaagaaaaatatttttaaaaaatccgaaaaataaccaacttgaaagcattccaaagttaaatatatcaaaaatatttgaaatttcatcgactcgacctcgattttcgcctttgacccaaaaacgaatcggtgtaataaaaatgaatcggatcaaaaacgaatcgttacaaaacgaatccacgaaaaacgaattgggggtcgttaatgcgattggtcatttgctccggcaacaggtgggcgggtggacggtgtcgaggtcattggcatggcataattagtattaattagtttataatggaaattcattcatacactcactttacgattgcaaatattgtataagtgtaaa

SEQ ID NO: 21774 - DNA, 2212 bp, Heterodera glycines
ttgtcattatttttcttcctttgtttgtcatttttgccttacaatttcttcgtcgtccatcctatgtccatgtccaagtctatgtccatctccaagtccaagtccatgtccatctccaagtccaagtccatctccaagtccaagtccatgtccatgttcatttccctcttcctcctccccctcctcttcctcctcattgatgttgttgttgtttccgcttctcatccgtgctaatggtgttgcacagcaatacgttttcatgtagcttaatgtgcacctgaaaaaattaattattaattttcattataaaattttaaaaaaaaataataatttaatcttttcattaaaaaaaatatttttattaaattcaaaacaattgaaatttgagtcatattctttgtacggaagagcaaaaaagtgacacccacgaactcttgtccatggcctaattagatatacatatataccttttaaataattaaatttgtgagtaaagcgaataaaatcacacatataaataaattatctttttaaatttgtgtcaccttttcgagcagcactccgttgcaattccactctttttggtggtgccaaaaactgaaaaatatgtaaaattgcaaaaaattaaccacaaattatactaataaacgcaacgccaaataaagtttaatggccagataagcgcctgagatttcagtgccaaggcatatataaatgccaagaaatgttagtgccaaggcatatgcaaatgccagaaattgccgatgcagttctaattcaggtgaggggggggggctctaattcaaaaaatacggtgccagaaatttcagtgctaaagcatatatacttgctaaatcagtgccacctacagtattcgtggctaaataggtactgaaaagcacgatagccaaacccttacttttgtaggggtaactgccgcgctttgcccatctcagcccttcttgatcagtcggcgaggatttcaaatgctcttccgcttctgcttcttctccgtcccgtgcccaatcagtcggcaccgatggcaccaccaaatgatgccttagcattgcttcccattgtcgtcccacaaatttctcgtcatttcgcccattgggggccatcacaatttgggcaaagtccacaggcagtgaggaggatgaggaggaccctttgggagaccaattaattaatgagacatataaaacttttgcccaaattggccaacaatttggtctaccccctgactgatcagtaatcaaattcatttggtagcttgatcaggagactaacatctgatcgaagaaaaaatattttatattttctaaaaagataatgaaaaaagaaaaaccgagtgattctagccaaaattgcccgatcacgatcaccagtgattcgggattttcacctggaccggatttcaggattaaagccacaatctttccggacctgtccgggtgcatttccaaaattacccggatcagggaatcagcagcggattccgggaaaacctgaccgggttcggtgctgttccagtttttagttagacggaaatgagtatttttttatcacaatggagctcatatgctaattttcagcgcccaaacggggattttgttatgcctcgggccaaaattttcaaaaatttattcatcacaccgccttgaatttttatcattgctaattctcgaagcatttccactcacttttcttcgtcaacacaaatccaccgcacaattgctgcttgcaaattgcgtttaacatctgtgaacaaaaaaaaagagaagcatttgtcaatctagaacataaaagtttatactcgcccgccggtgggcttcgaacccaagacctttccattccgtgcaattctctaacccactgagccacgggcgctcccttttagacattctcccatatcctttatctcactttctcccacacatcgctcgcttcctatggcatcacaacaaaatggaaaaaattttcattccaagatgccaaataattttaaaaaattcgaatgccaaatttgaaaaaagaaaaatccgacaaaatactgaccattgtcagctttaaaccgcacagacggaaaccgcccgctccctccaacgcattgggggcggaagagagcagcaaaaggacgaacaaaaaggggagaaagcggaagcgcggtatggcggactgtgaagcaatgcgtctgttgaagctgaaccag

SEQ ID NO: 21775 - DNA, 1889 bp, Heterodera glycines
tgttcttttttggacaaaatctgttaataaattgcactataattttcaaaattttcccggcggcgccttaacggcaccgccgaccctcctctcaaaaagcaattttgggaaaataatgtggcaaaaaaattgaaaatttgatagcagattacaacttaattaggaattttggagaacttccaaatttaaaaaaaaattaattttttaaattaaatatttagataaaaacaaatttgaaaataaattgatttagcttattttttagttgattaaattttgataatgattcaaaaattatagaatttttcaataaaaaaattttctttcgcgtttgtattttcgtttttagggcactttaatttttgggtgaaaattatattattcgtctttgcggaattttttgtcactaaaaactttttaagtgagagtcacaaaatggataactttttaattcacttaactttacaatgaacagcattaagatttgttaatttgtacatatttattttagaggaaattaatgcagcaattggtaaaaacaaggtgctaggtcgatgcgaaaaaaactcagtgattgataaattaaataaataaattaataattcaattcacaaaatcacggcgccgtccggttaaccctaatgtacggcgggacgcaagtcattttcaatttttttttaatttttcaatttttcacatcacttctcgccaattttctccatttgtagtagacacagccggacgcaattgatgccattttgtagagctcatcgaactgtacaaaaaagccgctggtaccggcacgcttaacttgggttggccatcgacagggtcgggggcgaggctgagggtcctccggcagatgtgcccgacccatgacgggctccaaatgaatggatcgagaaccggacccggcctgggagatagcccatgaaaaactgaacaaaaaattgttcttaaccgggccggtccgggttccggatcaggcacttttggtgccccgaaagtggtgcgatcggcttccggaaaatgaccaatcaatcactgagttttttttcgcatcgtctcagcacgaaaagcaacagcaatcgttgagttcatttgtgacagacagcatctattggaagcaaaaaagcatcgtttaaggaaaatctgagaagattttttggaaaattctattgggaatttatttatttatttgtcgactatttcagttggatttgtactgatatttggctggacactctcccctttacaccaactacaactcccacaaccacaacaacaagcgtaaagcaatatttgttcggcattgacattggatgtaagaaagaaatatttaatgggttgaaaatgattgaagaacatagcggagaggggagaaaattgaaaattttaaataaaattttggggaaaaaaatttttaacaaaatgtggaactatggaaataattaggacaaaaaaacaaataattcaattcattcagccaaaaaatttgagaagccatgtgaaaagaactgctttttggcatcagaattaatgtatgtttattgtttacaatttataatttgaataataacttaatttagcaattttagagcaaaagtggtggaagcgattgactctgaagaaaagaaataatggcgaaaatggcatttaaaataaataaattattttacatttttatgaggctatccgagtcatctaatgaacatattcaaattggtaattgattattttcgattttttcataataaaaagtcatattttatgtgcggcattaaaatgagcaaacattaatggaaaatgcactataaattaattaaattatgcttatgggaaagataatcctcttggtccttggcccaatagaaataatggcttaacta

SEQ ID NO: 21776 - DNA, 1424 bp, Heterodera glycines
  unsure (1)..(1424): unsure at all n locations
ccagaagagccataatcccaatcaggattgctgaaatctatcctaggatcaatgngngnttaagattcgtctttcacataacttgaagaacaataaagtggatacgtctattggtgcacattctatattttgctgaatgatgttatcaggtggcgaccaataagtggcccgacatgaaagccggagaggagactctcctccagtaatgggaaaacgaatggttttaagtaatttctggtcccacatatcccatcacaacataattctatgtttttagacccttctggggcctctattttgacccccttcatattacaggttatccacgatgactgattcgactgctgatttgctgttgaaagggcgaaagcgtcggcaatcggtgccccaaggagaatgaaaatcgccaccatggacaacaaataagttggagacgatgttaatgctcggggcgtcttgctagcccgttgaatttgaataggcggatttttcgcccatcttaatttggccttgggccgaattggctcattgatcaattcttgccccatttcgacgggttcttctgatcgctgatttctcgttaattcttcatttgacttctcatttccctcccgggaatctccccgcggtgacagggcctggtttaagtctttattgtccggatttacctctaagggaactaattttgagaccggacgtgtccaaatatgtccatttggcattttaatttcggcactacgggcatgcccttcgggactactcagtcccacaattctccccattggccatgtgtttcgtggatattcgtcgcgttccactaaaacaatatgcccgagttcgggttggacattagcaataaggtgcggtcctttatgtgctgtttgattacgctcccggaggaggagcaaatattcgctggaccagcggtcccaaaaatttctaatggatttagctgttgcccaccatctggtggctaatttttcagcagccgatggacgataactttcgtcttccatatcagttccttcaaattcaaggtttgctctaggagcaataaaatcgattggtctgagcggcagaggaccgtcagactcatctgatacaaaagtgatcggtcttgagttgatcgaggcctcggcctccgctaaaaatgtgtttatctcctcccagctcaagagtcgtcggcctaaaactctccgaaaacagttctttatgtgagaatttagtcgttcatatactccgcccgaccatgggctaaatgcggggattagcgtccatttgatggacacttcagtgtttttctcaaagtgttttggccaacacaaattgagaaccgtgatctgaaaggatcgattttggaagtcctcttcgcgcgacaaagttaagggaggcaagcaaaaaatgctctgctgacatggacgaca

SEQ ID NO: 21777 - DNA, 2497 bp, Heterodera glycines
gttcaatcaatctgaagtccttttatcagatcacggccacataaatttcgtctagtgcctttgaagacgtaaatggtggcctccatcttttgctttttgtaggccacacagactttgaatgatccaatcactcctttgattggaatcccaccaaatgccataagaactgtcgggcatttgtaattgtccagttttgggtgtccaatgttttcccaatcttcataactcaaaagagtaacatcagcgcctgtgtccagttcgaaatttgcagtctttttatggacctgcaacgcgatcatttgaggcggaactgacactaaattgcaatcagcttgtgcaacgctgacaactttgcaattttcagtgaccacattggccgttttcttcttgaattgcgtcttagcacttgaaaactttcccgaattgtacttgttatgtacttcatttttgcacatttttgcccaatgcccaatcattccgcacttgctgcatttgtccttctgattttgacatttattggcccaatgatttgttgaaccacaacgaaaacattgaccttttgacccgccccttggctttgggtgtgtcaccttggcaatttcagcttgcttccctccaaaatcattgccaattgtgcgagcgtctttctcggactgttacagtaagactgctgtctctactgcgtccttgaatgccattgccttccctttgatcagttcagtgcggaccatatcactgctaatgccgttaataaataacgcgcataagcacatttcaatgctgtttctgtcccactcggccttagcgattaagctccgtaattggattgcaaaatcacgaattgacatacctgaggactgtgtggccgaaaaaagctcatgccttttagcagcgagcgtttttgattcaccaaaacgctctttcattagcttcacaatttcactgaaaggcaaagttcggacatcatcgggttgtgccatcattcgcaactcctcataaatcgctccaatctccgtgaagagtagcagctttttagtgctttcatccgtgattcctcggagtttaatgaaaaactcgaaccgttcctcccaggtgtaccaagacatctcatctctggggaataggcaccagggccttttccgacttttcccaccgcttgtggcattgttgagccatttgtgccagtcagttaaaaactgaaacactccaacttcaatttaggagggcacttttgttgaattcggcgaatgacgaaaaacctcgtctcgaggaaccgcacaccgtcttggtgatttaggtttttcgacgatttaaccgcgtcttgcggaccgaacaccacctgggcgatttggtttttttgatgagtcggaagattggcctcttctccgctttgttgctgtttgctgactgctgactgcgccagaaaactgttgtgtccgacaacagtttataaataattttatttggagcaaaacaattacaattaaatgcagagcaaagggaagaagtcaatagcacaaaataatatgaatgaagctgggaagaagagggaagggggagaagggaagacttaaataacaaatgagagggggtggggcaacttcaaaatcgtatataaaattagggttacgggcccgggtatttgggcaaataccgggtcagggtattgccgggtccagaaaagccgggtcagagtcctagtttttaaaccgagtccaggtcctgaaaaatccaaaaaaatctaaaaatttttcatgagaataaaataaatattttaatgaaatatatttttataaacaaactttattatttgtccattttttttgccattcgaaccacctttttgcgttgcgttttctaaaacttaggggacagttggggtccggcggtgccggtaggcgccgccggaaaaattttgaaattttgagtgagatttgttaacaaaatttgtcaaaaaattatcaaaattttttgttaaatttgcggttttaggctgtttaaaaaagagaaaaaaaaatttttaaattgaaatattttttataattaaaatttcaattgaaaaataatttaaagaaattattaaaaaaattatgtactgttgaggaattgaacccaagagaaaaataatgaaaggcagatttttctgactgctcaaaagttcaatctttaggggtgtattttcaactctcgcctctcgtccgaaaaaacgagaggcgagagtaccaaaaatggcgagagttggcgagagttggcgagatacgagaggcgagagttgtcccacccctgatgcagactcttacagcagaattcgaaaatcgcaaatccctctacaatatacaagagcctgtgcttatcatttgattttcaaaatttaacgagatttatttttaaaattcacaaacaaataattcaaagctaagacagaatttagtatttagtggcccaaaacaaatcacaaatgtgctctttggtatttttgagttgcaaccagccctac

SEQ ID NO: 21778 - DNA, 1002 bp, Heterodera glycines
attcaccaattgcttggcggttgaatcgcccatccaactcttggcttctcgatcaaatgtcggcgatggatgagttgggctcgaatgacttcaaatgcccacggcgctttagcaaagaattcttgccatgccaattgttcagtttggctttcttctccgaatggcagttttggcggcgcgatttggagaagctgatagccgctttcctccagagttcgccacaatttccgacacgtgcgaacgcgcatttcgatcacttccatcaaattttctgcggacgggagcatgtccgaaggcaccatgtcgccacgggcaccaataaacagcacaaattcatggccggtccaccaaacgacgagatgccgttgtcgaaccaaattttttgagcagaaatgcacagaacagtgcttgaagcggcgttgtcacctctttagcgccaattccgattttgcgatttaggacggcatcaaaatcggcaacgaccaactgcgtgcagtgctcatggccttccccagagcaaattgtggtccaaaaacaagttccgtcgccaagacagtactcgtcgcacttggccgcttcttttccgtccgcccctgaaaaattcattgtccctaatgaataaaccacttccttatcagtctcattttcaaaattaatctcgccatttttgatttcttccgagacacaaattaagccaattaaattcttaaatttggcttttccttttggcaaaattgaattgtttgggatcccagggggaacacgaatcattctttcgattggcacagaaattggatcagcttttaatttatcagcagggaccactctagctgaacttccggtcatttcaatgatttggtaaggcccaaaatggttccaagctaattttcggtgtgaggcttgtgctttcgttgaatggacgacaatcataactctgtccccccggcttaaatttttcgcgcgtcacggtttgggcgggaattaaatttccaatttgttttt

SEQ ID NO: 21779 - DNA, 1853 bp, Heterodera glycines
  unsure (1)..(1853): unsure at all n locations
aaaacttatactcagaatttgtagagaacaaaaagacctttcgaatgagttattgaatgcttggagaaattaagtttttcgttttttacgattttttgaaatttaattactggcccctacgggtcatgtgcactttttttcatcctaggaaaaataaaatttttaagtttattttctgtcgggaccgcaattctacacctttgcccntttcaaataacaaaggcacacttttgcgggccgcccttcttgttcgtcttgtgatggatgttgttccacaccggcacatttttgcgacccgtagtcactgaatcgccaattgtgaagatcagccggcgagtgaaagccaattggagcattttgagcacaagagttccttccgcgttattcggcagataggcgatgcgagtggtcgaactgtacggctgcccggggcgaatgtgtccatccttaacatttagaaataagcgacggaacaaatacgggtcgggaaaagacatacaatctgaattccagcaggaatatggtaagtgatttcatggaatccctttgcgtctctgtgtccggcgacataccccgggatttgcttcaccgtcatagtagcttaaatcatcaaatgctttttaattaaattaaaaccaaaatcaccattggcgggctggtaaccgacacattcgccataccaaagcatgcacagaggacactgtcgcttcacagcaaaggcggactgaagaaaaaagaaactaattaaagtgtgacttttgcacatgaatcaactgattgtgagataatttcaataaaaatagggaagagaagtaaaagtgggcgaatttcgaaaggggggaggtacgtccccaacttctcccgatttgatgtgcttttagttacaaaaatagacgcctcggaaatacctttatgcattccttgtggaataagtgagagcagagagacagctgcacaacaacatcgtcgtcgcactcctcgcgcatgtcactcaaacaaatggagcacggcattgaggagtcgtccagacaaacgttgggatggcgcatagatgaactcgacgcttggtttttcttttgagacggaggaagcccggcctgagaagcggcgtaagaagtcgatggtttgtccgacgattgggagtttccgtcctcggttttcagttgttcgactgggacaatggaccaaaactgtttctcctgttccctggtaagtgcgtctgctcttcggttggcatcttcgtcggattggtcctcgtcgtcgctatccatcgcatcgctcccatcatccgtcttaaaagtccaatttacaaatgaatgttgtgatgaaaagatggtcattggccggggttcccctttggcttgggcttggagttcctcccccttcctttgtgtcagcccctctcatcactttttgtcccctcaattgaccaactgcccctcccctttctgccaccctcaattcccctggcccgttcgttcattcattctgttaattgttcaactttgtttcgcttggcttggtttttactcaacaaataaaggggacatcgaacagcgaatttggggatttggtgttttgggccaatttggccagcccggggctgcgacgaggggccccattttgggtgtccccgagtcccaacagaccccagagtatagggcattgtcatggcgctcctgggtggatccgaacatttcgcttcactaatttttctcccaatttgttccccttaaaatcccattttcttcgcccattattagcattatttttttatgatttgtaataattagcgttttaatttttcacattttgcgaagccattatttctcncgttcgtttattaattttgc

SEQ ID NO: 21780 - DNA, 1820 bp, Heterodera glycines
tggttcttcactgttttttcaatttcattttctgatgccccccccgcatccatttcctcttgctctaaattgtggtccgcatattttatccataatggttcatccgaatcccgaagtgggagaataacgggaccattaaatgttttaactttttcctggtgaacttttttcaattttcccttttcgtccaatgtttgcattttttctttttcaatccaacaacacgatatggacctgtccatttttggtcaaatttgtgtttaagtacttccttttttaacagtactaagtcgccaatttcaaaatttctgaaatttgctttccttatttggtcattttcggctttgtttttctccagggctttcaaaatttcttcctttacaattttccatgcgattgatgccttttcagtgtgttttcgtgtataaacggaaatgtccgacaaaaattcattacttgaaggcaatttcaaaatttgatcagtgggtagtcggggttcacgcaaataaattataaaatagggtgaatattttgttgcagtatgtattgatgtattataagtaaaaattgcatgatttaatatttcatcccaattgtccccttgtgaatttattgtcgtggaaatatatttgccaatattctcattgaaccttcggccattccatttgactgctgatgataagcagtggacataatatgttcaaatccataaattttttcaaatttccgaaaatttgtgaaataaattgccttccctggtctgtgaccactgtttctggtgtagaatgttggtgaattacaatttctatgaatgtctcggccaccgtttccgcacgttggtcggaaattgcctttgccattacccattttgaaaaactgtctatggctaggaaaatgtactgatttcctttttcggttttttcaatgggcccatcaaatcacaatgaattctttgaaagggtccttccgtggatttaattggaacacttggtgctgctttaacttgaccaggaaaaatttttcttttttggcaaaattcacaggtttcatttagcagttttatgtcttctttaattccatcccagtaaaatcgattttttatttcgggccatgttttttcaaagccaaaatgtccttcgttgtgaaaaattcggaaaattcgttcccttagtgggtaaggaattatcagtttaggattttcagaatttgtttttccttttttgtagtaaattgcgtcatttattaagccataattttcaattatttttctccattttggctccccctcaggaaatttccccgttttcagtatgttaaatatttttgataattcttttacttttctttgttcttccaaaatttcttttaaagaaatttttgcttttaacgcttccattttttcattttattttgcttccccgcttcggtctactgccgataaaattatttggtttttattttcctcctcattttcaattgaacaatcaattcctggcacattgtaccgtgataaaaaatcggccaccttgttttttctgccagggcgataaataatttccaaatcaaagctttgcagagttatctgatatttttctaacctcccttttaattcttttgttttcatcattcccgtcaaagcactgcaatcggttatcaattttgttgtccccgatccaacgatgtaaggggaaaattccttgacggaatagaccaatcctagtgcttctctctctatagaggggtaatttgtctcatgtttatttaacgctctcgccgggggggccaccgggccattttcttggagtaacactgctcccaat

SEQ ID NO: 21781 - DNA, 1763 bp, Heterodera glycines
  unsure (1)..(1763): unsure at all n locations
cgtcatcgaatttctntcgttcaaacaagcaaattttntgcgaaaggcaccaacatggatttatatttggattttgatgatgtgtatgacaacaacggcattgtccagtcaatttggagtgtttttgcacgcgaattttggcccatttttgcgccaaacattcgccatttgactgttcccattggccatcaactggacgatttgcgtcatcacatttcaccgagaattttcaccgattgcaatcaattggattcaatcgattccgattctcggttgctcgatgcaattggtgatgatgggccaaatgcaactgttggccaagcattgtccaaatggttgcgcattccgacaacaaatgggcagccgaaacaatttcgtgatgatgaatcgtcagaaaccaatgaatgggtcaacaatttcaagaaggtatggtgccaatattttcgtaaaaaagattgttaaaaacttggactggcggcgcctaatttcgatcaattgcgaatcccggacccgaattcgaacaagaagccgaaagtccaaattttaaattcgcatttttgcttcaaaatcggtttaaacaaatggaaataaactgaaagccattattctttcaataaaagataggtaatttaataataagccgtttttagacaaaaaaaaaatgcgaaattcgaaaatttgaactttctattttttgttcgaattcgggtcaggggttcggaattggtctaaatggaagccatattcgtgattagcgattccaaaacccccatggttacatttttattgtcttttaacatcaacaaaaaatccatgtggcctaaactgtataattaccgactcattttggattgattgccatttgggttttaatttaccattttttaggaatttctccgtgccaacacttcttcggccagctacataattcaattcaaaacatacaccacctcagttgcgcagtttgaattggtgaacgaacggactaatgaaatgctgacattgaaggcagaagacgatgttgtatacacacatattaattgtgagttgaagcgatgccaaattgggcagacaattcaatgggaggacaaaaagacggacaatttgaacaatgtcgacatttcgcttcatggaaattgcattgggtgaggaggagtggcaacagcttttgcttttatttgtctcgtcacatttaaatttgcacttcgtttaggccattgtttccgccaaagacgggccaaattaacgcaaaaaatctcctgcaaatgaatcccgggcccagctgagaaatgattgatcattaggaatggaaactgattggataattgctcctcacatttgatacttctttcgtttgaatacattttatttgactgggtttttggcttttacatcagaaatgtatttgtttaccaaatccaataaacttagtatcattcgaaaactctttctcgattggcttcccaaaaatcacaaagacaaatcgacatgtaaaaaagttataaaataaaaatatgcaaaaattctgattttttgtgattttattgttgtaacttttttgcgaggtgttcaatcgcttagaaataacttatcaacggcttctaaacatatagagctttccaatgatatgtactaaatttataaaaattggtcaacaaagaaaaaagttatgttatgttattttttttcataaaaaatttcggtactaatgcactttaccagacataactttttttttgtcataacagtcgtgtcccgacatt

SEQ ID NO: 21782 - DNA, 2018 bp, Heterodera glycines
atcacttctctttctcccctccctcactctgtgtttgtttctgcgcatgtattcctcgatcagttcgattggaaattctctttcccgtccatttaagctcgtcgtttgaagcgaggaggaggagggaccgttgcgcaactgaacagattgcggagaatcgaaggagaggggcgtagcaacgtcggcggagatatggccaatgccattgcgcaatggcacagcgtcgacgacggcgggcgacaaaatgcgcgcgggcattggcacgtaaccactgaatggaatgtcaaaaatgaatgaggtgctaattattgattatttgagagtcaattaattcctcttcgtccttaccctccaccgttcaatgtcctgctttgttgctgatgttgcaaattgacaaaatcatgctgttgctgcatcagatgttctcccattgccgcgttcgcttctccgatcatcaaaagccccggcccttcgccgttctcttccattggcataaaagtgttcaaatttggcacataaatttccccgccgattggcgaagtgtttacgatcattgaagacgacgaaagaggcgctgaacgaaaccgttaattgtttttgctttagcaacaatttttttgcttcaactgaccattagcatcgccattattgttgttgttgcttcctcctgtcttatgcttatcgcccgttcggttgtaagccctcctgcggtatctgtcgtcaaaattctttgatcagtgatcaaattggcaaccaaaccaatcacttacgggtgaccgaccatgttgaattccccggtcaaaagcagtctgcttctctccgggcatttgtgctggtacagattggaacggaatttgtatgtctaaattgaaatcatttaattaatttttgtttaacaggtgctgctatttctcattaattgaccttgctaattgcccccactcactttcatgcaaaagcgacacttaaaaggacggtcgttgctgtgcttaaccgcgtgctgcttcaaataccacaccgaattgaacagttttccgcagtctttgcaggcgcactgttggttcttctccagcgtgatgctgaggttgtccacgtcctgcggagagatgataatcggaggcggcggaggggcggaaaattcggaagacggagagcgggcggcggtgcgactaaagcggtggggagggaaaggaggaaaaaataagagacgaaatgccaaaccgacaaacaaatgatcacctttcctccgaactgctcgccctcttctgcttcttctccttcggctgctgctcactttgttccccctggggcgtttcttcgctcattgcactcgccgcccctgcggccatcgcttggccctcttcgccgtagccattgctgttcatcccaagtaggaactgttccaccgcttctgtcggcaggaattccgccttcaccaccggcacaaatctcccgaggcaatcttccgccgcaatattcggcactctttcagaccgttgttgatgttgtaattgttcgctgattaggtgtcgctgctgttccgcaacactttccgacttttttgtcccttcgttttcggccctttcgttggccaatgccatcgaattggccaccaattgtctgcccatacacaagtctccatcactcagtgtgcccaattcctgtaggtccactagctcatcctcttcgagcagtccgtccccattaaaaaattgttgccggtgggccttttccgattgcggacgacgcgtgtggaaaagtgccgccaaatgaatggactcgtcgtcgggtgagccaaccccggcactgtgctccatttgcatcgcttaattggggggaaacggtgaaagcattgtaattatttatttctcatggtgaatggaataatgtttcaagatgatcattggacaaaaaaccagtgaccaaaaaaataacccaaatattaatataaaaaactgattaaattgaggaaaaaagtgatcaagcggaataatcaaggctctgacaatatcaaacgc

SEQ ID NO: 21783 - DNA, 2148 bp, Heterodera glycines
aacaaagagattattgagcatttacaatttttgttataagaaattccaagaaaataaattaaacaatttttctgcgatttttttaagaaaatttttgaaaaatatttttcgtgaaattttttttataaaactttcaaagttttttaaatttcaaatatgtgcaaatagacggcattgcatgctccataatccaaaaattttaacacagtaatgctaagtgtgagttagactactgtaataattgtaatatataatttggaggcaaactgtaagcttaagccttttgttctgcctgcctccacccagtaaagtaccaggattgagctcgcgcacttaccgctgctttccacctcagcgcgtgggtcggcacgaacttccaccggcacgccattcttgctccaagtgatttccgggcgtggactggccgcgtagggcaccagcagcttggccggctcacccaccagcacagtcatgtcgcgtgccaacattcccatggtgatcaacggcttgcaggcggacggtgcggccacaattggcacggagttttcgctccactcgccttggcccgccgcgttcacggcggccacgcggaactcgtaggtgtgctgcggtttgacgccggtcaccttcagtgatggcaattttagtgtttttttttggacaaatttcaacaattttccacggagcaggtcgtccccccccatcccgaaaatttcttgaaaaaaatgttcttgaaatttttcaaaaaatcttaggaaatttattcataagaaaatttcaagaaaaaattttttttgatgatgacctactattttttttttaatttttaaaaacatcactgaaaatttttcaaaaaaatttttttaagtttcttatgaaaaatttcctaaaacctttttagaaattttctaagttgaaaatttaaacaaaaaattcggggaatgcgaggcgggaggaaactacgcgttgaatgaaaggcacccgtttcccccaccttgcaacgcgtgtccggcacattgccaaacgcggccttctcccacggcgcgttggtgccatgctcacgcttctccaggacatagccagtgatcggcgcaccgccatcccgcaacgggcgtgcccattggagcgtgattgagtcgtaggcggtgtgcagtggctctggtgcgcctggcggtccgggcacatcgaatggcgccttggccagcagcggatcctccgcgtccagcggctcgcccacgccgaactggttctcggcacaaacgcggaactcgtagcgttctccgctggtcagtccgcgcacacgcagcgacaggccagccggtgcaccgacgcgctcccagtcaccaccacgtgccgacttgcgctccaccacataattggtcagcggcgaaccgccgtcatccttgggcggactccagtgcagtgtgcacgcgtctgcggcaagctcggagaacagaatgggcccgctcggcttgccgggcacgtccagcacgttcacgttcagcttggcactgtctttgccgtgccgattctgtgccaccactttgtacggtccggcatcgttgcgttttgagtcacgggtggtgaacacaattttgtcgtcctccacttcaatggtggtgcggtcgtcctcaaaaattgtcttgccgttgttcagcacgtccacattcggcttcagccctcccgagctgtacggcagcgtgaaagtgatggtttcgccggcacgcactgtaatttggtaaatttttttaattgactaattaatttatttaaaaataaatataaaaaatactaggaatttaaattaagaacccaaatggtaattagtacatgttctaatgcaatgcgttttttcaaaaaaattcttattgaaggaggcgtttggcgccgccgaaggaaaaattagaaatgttggccttatttttaacaggtttttcttcaaaaattgtcattttttagacaaattttgaaatgtggaattttcaagaatatctccaatttttcaaaatagcaaaaattttagaaaaaacgcatttaaatttctaagcttcggagcatcggaattaagcacaaatcttcgaaaataagcattatgacgaacactaaagtagacagaattaccactttaaaattttagtcccaactttt

SEQ ID NO: 21784 - DNA, 1118 bp, Heterodera glycines
ttgaagcgacgaaagaaatgaaaattgaccaaacgccgaacactttccaagtcgcaaggcaaaaactaatgggaaaattcataaatttaacaatagaaagacataactcacaaaattgacgcacaaattaagcaaaaaatagacaaaaattggaaaatgcggagaagagaaaagggaacagtcgaccgataagtcaaattgacaaaggcataagcgacggaaagaaagggcagacaaaaagcgcagacgaaggccaagcgaaggaactgactgagaaaagcaacaattaggcccaattaggcatcattaaataaacgaaagaaaccgatcgatgcggcaatgggaaaccaaaacagcaggcaaatcaaagcaacggaatgtgagcagaagacagagccaccacagaatgtcttcgggctaaagaacacaattaaaagacattggaaactgcagcagtcatccatcaaatggaaactttttgacaagaatgattcataactttgctcaaaagtaaccaattcgtggtattattttaacggtcttttgagtttatttgcaaggaatgttctgacactcctcgccataagatgcatggacccagacacaccaccttagattatgccaaagtttaatgattgagtcaaaattagcacatcccaatgaagtatcataaatgcgaaaaccaactctgatgtgacgccgagcagcagagaatccaaccgacgaattgactccgtcccttccctccctttccgccatttgatttcgaattttgtatcgccaatcactcgaccgatgtcttccattctgtccaccgagcccaaccccattcagctgatgaatcgtcgacgaattcgcgtcagggttttccattgtcaaggtagcgcataatcgggtaatcctgtattttattggtcccataaaaaaaagagattaaaaaggggtttttatgcaattctgagtagtgctcgggggttttcgtgggcgctgatcaagaatatgacatcaatttcgacctatttcgcattccgaattcgaacaaaagtagaaaattattttttcaccaacattcacatgtattggccaaaatcgattcaaatgcactaaatggccgtgaa

SEQ ID NO: 21785 - DNA, 2414 bp, Heterodera glycines
  unsure (1)..(2414): unsure at all n locations
atttccagacatttggtaaccngacattgtcgggtcacncaattctcgtgccgcaaataacggtaaatgcaaaacaacgaaattaaactaatatcatttaacattttttgaaataaatgttcaggcttttcaaatttgtcatagataattggcctttaagcattaatttgcggacaaaaaaatatttacattcatttgattgacaataatgataattagtgtgtgatggattttgcgattataataataattataataataataagctgtggtcatcataataaatatttttgttttaatttgattaatcgctcactcttcgaaatattccccatctttttttcaattttcgttttaatttcatccaaaatttctttcatattttgcatttgttcctccaaattttgcattttttgcttttttaatttatgcattatctgcctaatttctgtccatttttgcttatcccccatttgagtcagctcaatttcgagcaaatcccattcaatcatttttaaataattttgcgtgtcattttttattttttcttggaattcagaaagcaaattgttaagcatttgcaatatatcttaaagtaaacatttaaaattatgactatgttgagaaggttttttatgaatacataatattttttttcgcaaaactcttaaattgataattaatttagcaaatttaaataggtaaatattttgggaatttattgtagcaatgaattatatttaccagttaagcttaatatttaatatttatgtattttggatttattcaaaattctttgatgttcaagttttaatgtatttaaaattgcatgtatattaatgttttaatttcaacatcattaaattaattcaacaacctttgtccgaattaaaatcgattttgattgctttgacaaaattcacgtaattctcaccaaaatatttcatgtatgcatcttttttgttttcataaattaaaacaaagtttgggtttaatgagcaataaaacctgaaaaatttacaaataaactaattaattttattaaaatttttaattattttacgtaaaataaaaaatacttataaaatataaattagaaattttaaaaactattatataattcgaatcttacgttgatttggcgcacaattgccgttgcttttcacgaaaacgtttaattagcattttaatcgcttcgttatttagtaaataattagttgtctcaatttcttgcaataaatcttcaacaaaatatgccaaaaatgcaaatttatttcgaatttgatttgggcttttcgaaattcgttcgtttgttaaaagaaaattcaaaacatggttaaaaatttttaagtaatcaagttcttccaaaatatattctccatcactgtccatttggtcaagaatttgcaccatttttatcacttcataaactgtgggcgaataagccggcttcgtcaaaattagcaaaaactcataatttcctggtgaaaaaataaatattttaattaattaaacaaattaaggcttttaaacaattgtccttgcttataaggacacatttacccctggcattttcaatttgcagctcatttttattttccaagtacacattatatggcaatttccaagttggcatattgatttcgaccaaatcatttgaaatgttgattttcatgttaaaagacctaaaataataatttaaaatttgcggtaatcagaaacacccccggggatgttccaacgccaataatttaccaaatcttattccaagggttaaacatatttagaaattaattttggaaatagaaattccaattttgaatttgttaacttctgtaagtagttttaattacctaaatgcaattttgagtgtccagtacacagcagggatggcacggaattccgagttccgacttccaacatttttggggtcggaatttcgacttccgaaattttttggtgcctcggaattccattcctggtacacaggattattggaaatttttttattctacagtattttttgttctttttgaatatatcaaaggaaatttctgatcctacagtactatttttgtagttttttttacctatggattttaaaaccagttctgtaagcaaatgtaaatgcctttaaataattaccaataatttggtcattttgttgttcaatttgtacacacaaacggattgccaatgagaaaagcaattccgaaaatgctatatttttttctttccaaaatgaattttggcgttgttcaaactcttgaagcttcaatctttgatcaacagacacaatgttttgtagtgttttcacaaaatccatttctttgacaaggaaaaaaggcgagttttttgcttcactaaattttaaaaattaacaaatctcgatttacttggttaaaccatttttt

SEQ ID NO: 21786 - DNA, 1878 bp, Heterodera glycines
  unsure (1)..(1878): unsure at all n locations
atttcaataggatttcctaaaatatgatttgatagccaattaatctcgacgtttctacgagttnaaacaattgaaattttcaaacatttatttaaaataatccaattttgaatgcagaaaattcctgtgcaagaggcctgcccncagggcactcgtcagagttgcgagccatgtgagggaaatgacgaaaagaaagatgcaccctaattctgtaattagcttacaattaacataaaatataaatagcgtattattcattctttccctacaatacatttgtataatttaatagccaaattattgtaataaatttgtcattttttaaagaaatggtaatctatgattcataaatgaaagttatggggtcatttagcattttctccgttttagttaaattagataattggaattttagcttttcacatttttaaatggtaaaacagatgatggaatgccaattacgcaattttaataagtgtgcttttagattaacaagttgctgaactatggtggggataattggcatcaagaaaattgaaggggcaggagaaaattgggcggaattttgcctggatattttgattttgggtggactagtttgggaataacttcagttgtaggtggaacgggtgctcactgttgccccgtttgcttattattcgtggtgtgttaggcaaccgaactccaagattgtttcgtatcgcggccatgtttcgaagaatatggacttaattaacgtctttaccttacggtggcaaatgcacgctttgctcctcttttcgtttctttgttgataataacgtgatttattggaaccattcctacaaatttcctttagcattttcgataattgttttaacggaatttaatgcatttttattgataatatacaaatgcagaattagtcttacaattagacaaaaaaagttgattggatatgaaaaaagaataataaggatgaacaaatagagaggaggaatacattgttcataagtaatcgattttaatattggaattaaacattgattaaaaaataaataaatttttaaaatcattggttagtcttggggatttcatttatattaataattgctaatttttaaatgtatgaaaaatgccaaaagagtgttttatcttttgttttttatttttttgaaaaagtagaaaaatgaaaagttagaaattaaattttcaaagttgtgaaagctttgaaaaaacattatcataaatagagctgccagttatatagaaatctatttttgatcattttctaataaaaaagctcaattcgaacggcccacataaatttggaaaatatatgtctatatttttgtattttatgtccatatttctagatttttggtctatatttcatcaaatatttcgagattatccatatttgccagcactaatcataaatatttaaaaacataaaacaaatataaatgaatgaaaattacattcagataaaatgaatcaagtgatatagattaactttcacagggtcagagttaatatgtgataaaatttggaaattttatggattttaaaactcctaaatttttcgacaaaatttaaaaattaaatgagtaaaaagtagagaaagagatttcaaatcagggacctatttcaattcggatcaagtcctcgacttgatgacttgattttttgcgacatcgactgcaaaaattgtttttcaattaaatcgagtaaaaaatcgagtgccgcactcgattttgacatcaantcctatttttactcgatttttcacttcattttttaaaattatatatctagggaatgcctgaatggaaaaatctcattttttttaccttaaaagtattagaaaatttcactgctatgctaatgatctgtggt

SEQ ID NO: 21787 - DNA, 829 bp, Heterodera glycines
gccggcacgacgccttttttctgctctttggcacgcaaattttttgccacaataattttttcataaaattttgttaaaattgttggcgatggatgtaaagcgggtgatttaattgtttattctctgctgttggtgatgggcaaaaaatgttatttttcacacgatgagagagagagatagacagagagagagaaagaatgtgccacctgtgctgctgtttgttagtgttttgatcaaagaaaatggacaaaaatgagagaaatggtacgtaatcattgcatattatttgtcagtaaagaaacgagagcaatgggggaaatagtgcatggatattacatcccgctgccacccattcctcgccctcttttacaccccatccaaaaaatcaaacgccttttccgatcatatataattgaaagcgctcgccgtcgacgccatgcgatttgctcggcggcgccgtttcgtgccgctcgccctctgtcgtcgggccgaccccgacagagtgggcaatctgccgaaaggcttgcctggcaaaatgtgtggcttcgcccgcatgcgcagtcgtctggacgacgacgccatgtggcaccgcggcgcttgcattcggttggagtcggtttgagcacatcgtcaagttttttttttcaatttgctttaattttttttttttttgaattagcaacagcgggaagaggggtaataagacaagtctgtctaaagccggggtcaaaaggtaagcgcaaactgaaattgtgcatttaaaagccctctcactcaaaaaatgttatcaaaaatctggattcaatgaataaaaaactgttggtgcccc

SEQ ID NO: 21788 - DNA, 863 bp, Heterodera glycines
tgcatatcatgtttgttgctgtgtcccgctccaccaccaacacgtacacacctcggccaagcaccgcaatcagtcggaagtcgtcaatggccagcgccgccggcgttagtgccaccgcggcagccgaaacagtcgtcagaggcggtgccattttttgttgctcgtgtttccgctgttgttgttgttgttgcagcatctgtgcacacaattttaacccatttgatgaccaaaaaccaaacacctcaaggtccccacccgtttccccccccctacaatttgacgactcgcaaaccgaaaaataaatatatttttttttggtaattttttttaccccttaatgacggcaaacacaaaaatttcgatttatacacccaaaaaaaaatcttctggatgggaggggggacggcgggaaaataagctgttccaaaaagaaatatttttttttaaatttttcaaaaccccaatatcatcgccaaaacaatcacccaccgcctgctgttccgcagccgctgctcgcatcagcaacaactgttgttgctgcatgtactgctgctgttgctggtggggtggtgatggttgtactgctccgccgacaccgccgcgcattgccggcgtcccaccgccaccgcgtgccgtcccaatatgctgctgctgcaagagtatgtccaagtgttgaagctgttgttgctgctggtggtggtggtggtcagtttttgctgttgctgcagtggcggcggtgaacactgatggttgttgttgttgtgctgttggtggtggaagtgatggctcaaaatctgaaaaaagccaaattgcagctcaatattccgactgtttaaggggattccccgaccatttgcgctttt

SEQ ID NO: 21789 - DNA, 2224 bp, Heterodera glycines
ttccaaaaactaggaccgggaatatttttactcatttttaatgctaaaaattaaaacaattaattgaaaattcaagaatactaaagtgtactaatgctaagtaatcatcttattttccaatttcctgtttccttcatatttaatgaaacctattaaatataaaaaagttcgttatttaattagtcagggtataaaattgttaatattctaaacaaaaacatgtcataccgtttgattgaccaagagcagcaggcggcaattgaccataagctatctcactcgaatgatcccaattcctgtgatctgaaagagcaaaacaaaaatgaagatgtaaccataatattttaatttatatttcctgttattccacagtcatccttttatcttagctgatactattacacttaattaaaataatataaatttactgactttatctggggggttcgagtccaaaaccctgaatttttaagttttctattctcaaaaaaacatattttaagcttcaattacttaaaatttggcaaattttttaatgaatgaaaactcggatatttttatataaaaaaatgtaatccaaaattccggttcgaaaaagctaggaatctggaatagctggtctgtttattaccataacttgtaggatagtagtccgaatacggttgcacgttatgaatttcgcttagcccattataatactcatattcatctcctccaatgctttcattaaataaacagcaaagcccaatcatggaaataaacacagaaattgagaagctcgaagccatttggttgcaatatctttctatttgagtgattgcgaaccaataaaattttgaaaaattactatttgagagcagaaggaaatttaataataatatataataagtaaagataaagtaaaatattcaaaattgtttctgccttttattgcaattgtttttataaatgtaatttattcaaatgattttcttactgctttatttacgtcatagttaccccattgttacgctttacgctttggaatcatagggaaatttaaatatgaataataatataatagcagttgctttcgtcatgaatgtaaattaattttgtaaataatcgatttttatttatacgtcaaattatttttatttctgctttatttacgtcatagctaccccattgttaacgcttataatattataaaaaataggaaataaattttggaattttgcaggctaatagagaaaacttttggttagcgaatgataccaagattgttaaattggctgacaaaggaaaaggttatatatagtccaaaaagttgattggacccaaagttcggggctcaactgaagaaaaccgatttcggctaaaataaagtatttttagcttggtttggtgcttccgtgttgcgactttttcgccgcaccatttgctccgccaagcaaaaatgggcatttgcaccgatcagtcaaaaatatattttaaaatatttttaccaatttcaacgaattttactcaaattactgtgcaacaacaaaaaagcaataaaagaaatacaaagaaacaaattacaacgattgacaaatagtttttttcactgcgcgcatcagcaccaaaggcaaatttaatgccaaggaaagcaaaaataatggcaatttaattaggcacattaatgtctgtagattatagtttaaataaaattatttggattattttaaaattttaagaacggtgcaaatgggttttgtagggcggcgcaaatgtctatttttactgggcggcgcaagtgtcgaggtgcaaaagtcgcggcgcaaatgtcggtacaccgatgcttctagggtctttttatttccatacttttcacattttttgcatccatatttctgcaattgcaaaaaaaaaaccgaaaaatacacccctaatggaaaatttttggaaaatgcgcccataaatcgaaaaattttgaaaaaataccaaattgtgcaaaaaatttatgtgtttatgtatttttactcaaaccaattttcagaaatttatcttatcgtatttttacaaattaaatgatatttaaaatcaaaatttatttattttttgtctaaaattcaggcacttttgccattgattgtcaatgttatcaatcttttggtcagcgctcaattgttggtcttcaaatttgaagtgtcgtctctaacggtattggctgtccaaaatgtgcgccacccttccgatgcat

SEQ ID NO: 21790 - DNA, 1814 bp, Heterodera glycines
gaagttgacggaagaggaggaagaatgttctgctgctgctgttgaccactcgtcgaaaggtgaagccccaaaagcttatgcgacatttgaagagcacactgtgggttctgctgcacgatgccggccaaaaacatgtcgtcgtcgagccgtgagagcacaaaacgctgttgctcttcaatgaacatggagttattgaaatctgctggtactgttgctgctgcggctggagatgttgctgctgctctgccggttgctggtgctgttgctctgctggttgctgctgctggtggtggtgttggtggtgacgaagaccaaaatgcaaccgcccggtgttggatatttcatgaagaacagcgctatcggagagtccttcctcctcaccaccactttcaactggctgtaaatattgatttaattaatatagttttgttttgaaatttcattattttcagttcaaactcacaattccctccaagttcatgtcggagtggtcttcagacattgaattggccaaaatttggttgagatcgatctgcaaggcggccatcgaaatcggaaagcaaatttgaattgagtaaatgctgtaaaaataaaagttatgaaatagtaaaaaaatgaattcaaattaaataaaaaataaatgaatatttatgaagagagaaaattaataaagggattaaataaataaagaaatttcaaaatgtaaaaatgattggaatttatgaagaacgcaaaagtgttatgacagaataatgacaagcaaacaagtgaagaatcagtcaaggattaacaaaacaaaatttttgaatttggtcgcctaaattagctgagcggaagggattactagaagaagaaaattgcagaattcaaaaaatgaaggggattaacaaaatgcaaagtacaattaattataaataaataataaataaatatttccaatgaatttaataaaattatatttaaatatatttttttcccaaactttttacatgaagcatcgaaaataatttaaattctataataaccaaaaaagcgaaagaaaaggacaaaaaggaaaataaaataaaaattttttgaattttgtcgacaaaattagctgagcagcaagttcaagagagagataatgtttttctattgaatttaataatagttattaaacacatttttatgtttaaaaacatttacatgaaaaacatttcaagttaagttaaaataaatggaattatcgaaaagataaaaattaaataaaaattttcaaaatgtaaaaatgattggcatatattatgaagaacggcaaaattgttaaatgacagaataatggcaaaccaacaaaatgaagaatcagttaaggattaacaaaacaaaattttgaatttggtcgtctaaattagctgagcggcaagggattagtataagaagaaaattgcagaattcaaaaaatggaaggggattaacaaaatgcaaaagtacaattataagagaaaaaaataaagatttcgaatgatttaataaaattatatttaaatatatttttatgttttcaaacttttacaaaaagcaacaaaaatattttaattctaaaactaacaaaaaaaatcaaaaaaggcaaaaaagtattaattaaaaaaaattttaaatttggtcggcaaaattagctgagcggcaaggatcaattgccgtaggcaaaaaaggagcatccaatgaaaaggggaggagggactaattaaatataaatagtaccaaaaatgtgacaaattctcattttgcttttcagttaacacttatttgtttatcaatttagcctttatattttt

SEQ ID NO: 21791 - DNA, 1321 bp, Heterodera glycines
  unsure (1)..(1321): unsure at all n locations
aggggtgcaaccctttgatgttgccgcccacggacccgtgcctatgggaggggtgcagccctttgatgttgccgcccgtggacccatgcctaggggaggggtgcatccctttgatgttgccgcccagaacccaaacctattggaccactttaaagttcccgcccagaaccaaaatctattggaccactttgaagttgcctcccacccaaatccgatttcccaaaaccgtgcggtttttttttgcccaacccatccctcctcgccgatgttgccgccgcgcaaattaatcgataatgacaccgccctaccctccccatcgttgtcagtcgcgcaaataaatcaataataacatccaccaccctccccgccgatgctgatgccgcaagaagtaatcgataattaataaatacacaacagaaccataaattgagggaccgtcccaataaattaaaaatttttatcgtctctttaaattcttttgagccattttcagatagggcagcatataatggtacatttcgtcaatttcagaattgtttttagttcccgtaattacgactttaccggtccagaaaaataacgctgtcatgcttttaccccgcttgaaatttaaaccgcaaaatatttctggttcataaaaggcacgacgattttttctaaattcgtttagttcaatctcatgtccgaatttaaaggtcgaaacaatattttcaaccgtatgcccggtgtaagaagcccccggacaccccgagcccttaattatttctataaaatttttaatagcattttcacagtctatcagacttttcgtccccagacatatcattttcccggattcccataataatgccgtggctttgatgtggcttgtacatttgataaccgcggcattgaattttctagggttatacttaaattcgcattcggtgatcgtcagagagtttagtttaattccggtaccgagattagcgagagcaattatattgacgattatcggtttttgcatttttgatacaatgtaccaatcaaatggtcctttcatccctttatataccccttctataaatagtagccaaaaataaaattaaattgaaaaatgaactgcccgcataaaattaagtgttgtcattactgtccctgtcattacgagatttgtaagagatgtaaaaaacacagtcttttgcatttcggtacatcattttttgataatttctggctatgccccaaatgcgcgaaatatgttccctatgaaaatataaataggtcaaataaataagaggaattannaaatgttcgcggtccgttcactctaattctctcg

SEQ ID NO: 21792 - DNA, 1965 bp, Heterodera glycines
  unsure (1)..(1965): unsure at all n locations
gaaatnagtgaaaaaatcgttacaaaacgccaaaatagtgaattttcactattttagtgacgaagcgtgaaaatagtgatttctagtgaccgatagtgagatccaaatcgaaaaattttaacgcagaaatgcgttttttgagttcctttcttcaaaacaattgagcagaaaaaatagttaaatcactaaaagtagcggccctaatgatcagtgatcaatggtcgaggagaagtatgagcattcgaattaattttataaaaaattttaaattaaccgggccacactaattttataaattgatcaatcaatcactcacgctgatcaaatttttaaaatcaaagaatgatgccaaattatcgtacataagcacatgacggcataattcttgatcattctcaattaaattttatatgcttgttttgggttatgatctgctctggtcacaacgaatttaatcaaaaaataaatgccaatggttcattttgagcaaattgaccacggtaacaaagcaacaattcattagaggcaataagaggagaaaggactgaaaattagtgagagggagaaaaagaggaaattccttgaaaatttagaggaatttcaacttttccaggcagagccaagagaattggtagatgacgctttttgtgccaggacaattgggcaactgtgccgtcctcgccgcttttgcttctcccggcacccaccggcttgtccttgtccagaccggccatcacttcggccaccacggtgagcaggtcgtcgatgcgcatgtccacctcgtccatggcgttcagtcgctggtccaacgagggcgggcacttctcctcaatgccctccatcagctgctccaccggcggcatcggctcgacggaggagggcccagcgctggcgacggcggcggcactcccagcggtgccatcggcggaagaaatgggagcaattgtggaggaggacattaatgtatagtgagggggcaaaagcaaaatacggtttttgaactagttgaagtcacaatcaattttgtctagaaaaaacaacaaaatcggccccagaaaatatggtagggtagaaatgggatacggtatttaactgtaaaaatacaatcaaaaggatgccaagttcaataattgataatgatagccatttctgagttgagaaaatggtatctgttttagggcccggatttgaattctctctctttttctgaataaataagcgcagaatgggcagacatcttagctttttgctcctcattcatccttcctacatattttaaaattaacaaaccttagtaacccgtttcaaaaaaatcatcaaattaattagctgacgcaaatttcctacgagaaatccgggccctaaaacagaaaaagtaacgtgaaaatttggttggaccaaaatgtgaattaacaaattttaaagtaaatttagaaaacccaaaaagcaacgaaaaacacatcggaaatgaacaaaaataaaatggaaagaattaactgtccatcaattgaacaatttgaaaaattaaattttgtggcatatttatttttatcatttgcattcattaattatatgttgttcaacaccatcttcatgatcattaatcatcatcctatccgctccgtgctcattcttcgtcctcttttccagcatatgggtcggtcggtggttggaactgttcgcgctccttgcgccaccgggcaacaacattctgcggcaagtcctccacccggtcgtagtagcgacgctttggacgtgtcaaactgtgcggaggaattgggagaagtgatcagaaaaaataacacccaaatgggtgatcagcncacaagaaaaggatgaacaacagagagagcaaattggaattggcttttgtgccgcccccccccccccgaccttctcacatcatatcgttgcgttcgtcccgctccgggtccatgaccaatactcgtccatcagtgccacctc

SEQ ID NO: 21793 - DNA, 3074 bp, Heterodera glycines
gcgtgttacaatttttggcgctaaattcaaatttgaattttcgcgtcaatactcggtgggtggaggggcgcttgctggggaggaggggagggggcgcgctttggggtgtggggcggtgccgtaggtgtaaggcctatgttattttaattaaattttattttaaattaaattttaactattattttaaattaaataattctcaaataattatttcccatcagtgggaggggcgcactcattgagagaagagatgaaatttattatatgaaatgtgaaaaataaatttaaaaaatgagaactgatgggaggggagggattagcagtgggggcaatgcggtgtgcatttttgtttccaatggttgacgattaggcgctttcttttgtctcgttcggtgtgcttcggaacagaggacgcggaagaggaagtggtggatgaagaagcggaagagcaggaggacaccgagctgaacgcggttcccggcctgctgtctccaaacagaactgcctccgctgcatgaatttgttgtggtgaaagcagtttgtacgcggcgcgtacacattctctaggaatgcaacgtgaacacgttggcgtcttattgggggggggtttacatttataggtaaaagtgggtttaggctaccgtttgcaaaacatcgcacaacggttgaggcgccggggcatcatcgagcgggacaatttggagtgccggtgccggagggggcgcaaatgcgtgctgctggccgaattgaagagaagggagttccaaggcgccctgaagccgaggaaacggcgagttgatgaaaaatggtggaaaagcgggccgcagaggagacatgttgtgaaaatgcatctggagtacgctaacggcattgtcgacaatctgcgaaatcatcggccgaggcggcagcagcagttgttgttgatgttgtgccgggaacaattgctgcggttgttgttgttgtgccgggaacaattgttgcgggtgttgttgtgccgggaacaattgttgcgggtgttgttgtgccgggaagtttgtcaattgttcgccgtcaatgtccagctcaatctccacgtctgccggtggggcttcggcggcagccggtagaacaacaacgggtgccggagggacaacggcggcggcagccggctgtacaatggcgggtgccggctgggcagccgcgggaaagaggcgctccttaacatgtgagtgagcactcattttgcgctaaattttttggcacattaccacatcaacacgctgcccattaattattccaaataaggaaaagtcctcattcccacgtccattttttgcaaaaacgctaaatttttgtaaattatcgaatttatgcctaattttctcctacacttggcgcgctttttgcacgttaagccggctgccatccatgtggcgaggtgttcacaaaggtgagcagtctgccgagacagaagccggcctagaaattatgcgtattattaatttatgattttatcaggaattttacatgcgttaggacattttcgtccttcaagtaggacccgccccacttcgtaacgacgtgtggcgtagcgtagtcgatcagataaaagaatctgatacgtccacagagcatacacgcgcagtggtcgtacagcatgatggctgatatctcgaattcctcgctgccgtcatcctcttcagcgatgtcgcgaagtccatgtctcggtgacggtgccggcactaataaacaaaatattaagctcattaaaaatgaggtagccatgaattgatctgtcccatttttcacgcaaaattatcggaatatttggattcagattatcggttttacctatgttgcagaattataaattacttttagaatgactcttaatacataaaatttccccgatcgtcccctcgtttaatcataatttcaccagtttttataacgcacattaaattcaaattttttccgccaccaaatcatgtcagtggggcgcctaaagttgcttattcttttgtgcacaatattcctagcactaatctttgctgatcgccccgagccaaacaaaggaagataacatctgttgtatggccattctgacaatgaaaagacgacaaattgacaaaagaaacaaatttttggagaactaaagtggatggggaaggggggggggtttagcgatcgggccatattccgctggtcatttctccgaatattcgcgccatgcagtggattaaattcaactgcacgctttgtccaattggacttcagtgtttctatccgcgcaagtacgcaaagcctgtgctttgtgcgcatcccagcgtccgtaacatcacggactttttgagcaccgggcagcttggcgaagctgcaacgacaacaacaacaacatttccgacaactgcggaaacggcggcggcgacagaatgcgcacctccgcccgcgcatttgaccgcgtggatcgcggtgtgcacagcgctggtggcgcttttggtgattgcggaggtctgttaattttgggaatttatccgctaaacccctattcctcaattaagcttgtgcgtgcaggattcaaagtgcgcaaatttttgaaggaccgcgccttcaaaaaggggatgctgcgccgacatcgccagcgtgagtttctcgctattacatttttagcaaattgtaattaacaatttgtacaggaatgagcgccgcaaggcgcaaccgccagccggcaagcgcaccgactccgctgattttgccggctatgttggccggcgtttctctgcgcccgacgggcgtcaatttgactgtggaccgggtgtgcaattttaattaaattaaaatctttatatattttaatttctcactcatcaaaattacaatttaaatttaaaggcagcggggcagcgccgcgcggatggtgcaattgaggagggcgaagagcccgtgtacgatgaggtgccgcttgacagcgacatcgtggtcgagatgcgcgacgaagaaaatggggaggaggaggacgaagacagtgatttttaaaggattcggcaagcgaacagtcaccatttaaccaatcgatcgatttttcactttaaaat

SEQ ID NO: 21794 - DNA, 1421 bp, Heterodera glycines
ttttaggcggctggggtttctggacaaaaaaaaatcaaggaaaaatccctgccaaatattcaagttgtttgaagagactccattttttacacattgacatatatttattggacataaaattaaaaaataataattaactgaccaacacccaaatgtgtgttgatggacgcataacgcgctgtacccgtcaaatttttgtggtccctgtatggaatgtgctgcttggtccgctggtcacgataccgtttggccagtccaaagtcaataatctgcaaaaatggaccaatatttacgttttttacgtctaaaagtgccaacagtagtcttacgtagacaagattgccccgcttgccgagacccatcagaaaattgtctaaaagagtgcttttttacaaggccgaataatgtaacatgaaaaaaaaagaaaacctggctttatgtcgcgatggatgaaatccttgctgtgaatgtattggatcctggccaactaaaaaaacattttattgtcattaagaaagaaaatgcatttgtagtattgtactactactgcttgtccaggggacaatttttcatgaaaaaattttaaaattaaaattctttaatactatgttgcctaaaatataaaccccattttgtgggttgaaaaatagaaacaccagggcttatattttataattacggtatgtggaataatcctcaacaatttccgttccaaaaaatacgtaatttatgggtgcaccccaaaatctcgccgccgaaatctcgccgccaaaatctcgccgccggaatctcgccggcctgaatctcgccggccgaaatctcgccgagacaaaatatcgccgccgaaatctcgccgcagaaatttcaaaaaaaaaatttcaaacttagaaatttttcaaggaaaaaattcttagaaaaatttttttataagaaaatttaaataaaaaaattgttgaaaaatttttcagcaattttttttttgaaattttatgaaaatttactgttttttttgaaaaattttcaaaaaaacttagcaaatagttttttttggaattatcttataaaaaaattttctaaaattttttcctggaaaaatatctaagaaataaaattaatgaaaattttcaaacaaattttcttcaattatttcaaacaattaatcatttttggactaaatcatcgaatattaatagaaattcagatttgattttcacatcactttttttcggagcgctttttcaaaaaacttttgggaaagaagggttccggcggcgccgataggcgccgccggggaaaattttaaaaatttgggtgtaatttgataacagattttcaacaaaaaaaggaaggtttttgtgattattaagctcaattggtaggattatcatttaaaaaatgataaaatatgtatcaatttaaaa

SEQ ID NO: 21795 - DNA, 1549 bp, Heterodera glycines
ctgataatgatgacaataataataattatcgtaattatcagtcagtctttttggccgtgaattcatctgctctcgcttttgcttcttctgctgttgtttctgtggataaacaacatttgcggaccgacttttgcggaccgacatttgtgactaaattatcaaaaaaaaagagaaaaaaaaaataaaatgaattttcaaataaattttcgtaattaccaaattgaaataatgactgaaggtgataattaaatagtgcttcttgctctaagctatgtcaatttcgacatactttttttctttaatcggaaaatttacccacaactaaacgaatttattacatatagtttattaggcaaattgattaataaaatgctttatacaaaaatcatatcacaaaatatatagcacgcaaaatttttcgtgtttcacctactagccttagtctaaagagcttagattttgatcaagcatacctaacaattaatatcaagaacaaataaaagatataaaaatatattttatatctttaaaaagcaaaattaaaatgaattactcacattatcaatgacaacataattcttgtaaatcaggaatttataaactaatgcattgcacaagttgatcagatcactacttaaggatgatatgaagtgatcaaattttttgcaccaagaggaattgaaaaaagaactttttggaaaaactttataaatttttcatattttcattcgcattaacttgcttaactccgaaaaatcacatataaaattcaatattcagatgatcatccaatttaagaaaaaaatttttttttgaaaattaaatccagaaattatgacccgcaaaagacggtccgcaaatgtcgcactacgttcaaaatatgtcattcttcttttttaccttttgcaatttgttgtctttctttgactgtctttgtttgtcacttcgaaacatttgacgataaattttggcacataaaaaataaatactaataaaaaacaaataataattaagaataaaaataaaaataatttattaaaaatgaaaaattgaaaaaaaaataataaacaaaatttctatgaaacatttgaattgcattataatcgaacaaacaattgcataaaaatggaaaattaaataataaataataaaattaaaaattgtaaaataatttatcaattttaaaattctaaaataatttatcaattttaaattaatttttgtttgccatctatagaatttggcgttttagtgccaaaataaataaaacagtcttctctttccccctctccccaatgtttggcattctgtccgcccgtccgtcttttcgtctcggtctctgtttaattaacttggcaaaatgtctgatgatggcacccccggcaatggcatttttggcatttttgctgtgttagcccccgcagcgcttaaacatacacacaaaaaagtggccgccgcatcaaatgacgcggcgccgcacctcggggcaaaacaatggcacaaaaaataggcggcaattagagagaggggggggggggggtggcatggt

SEQ ID NO: 21796 - DNA, 2137 bp, Heterodera glycines
  unsure (1)..(2137): unsure at all n locations
tttttgaaatgaaatgaatttatgaggttttgcgaaattttaaaggaaatgtctcggtttttttgtccacaaatgggacctgaacaattcgtttttgcccgaaggcaattgtaattttggatgtcggtggatctcttcaaaaatcacctcgtccatcagtccacattcggtagcgaccttacgcacaagtttaacggcatcgatttgttctggtactttctccaacactgctctcttcgattttgcgataatctcctccgagtccaacacggcattgttgaccagttgggtgaccattccgatgtgaggcggcggttgaccccaaagaacactgggtgaggagttggagaaggacattgagtccccggcggatcgctcctttgtgttgtcattaaccaatttctgcacaagtagctctaggcgatccagccgctcaacaattgtggcgttgatcgacgggttgagggaggaaacaagcttttcaagacgattaagccgaataccgatatcatcattgtcttccaaaactggggacattcgacatcttttttgggaggattttggcatttgaatattttggagaatgaatattttggagaatgaatattttggagaatgaatattttttggagaatgaatattttttttggagaatgaatatggaaataaatgaccccaaaaaattccgagaaattgcaaaagaaataattaagcaataatgcatattttccccattgagaggtgtgatttgtttcatttatgtctattgtttttaatttgacacctattctgtgatttgacacttatttttgtgatttttgactgccatttatgttttatttttattctcactttttttctttttacaccactgttagagtgcatagcaccttgtggtttgttcgataaataaataaatatatttaatttgttattttttctgactcacatgccgtttggacccggacccggttgtaaaacttggacccgcccggctttcctgggcccgcaatacccgcttttttgagaggtttttttccaaaaagcacaaaaacttgactcattggctactcaaaaaccgcaaaatgaggctaaagactacaaatatgattgaaaacctaaaacatttttctttttcaacataaataaataaattatctgcatttattttgtcaaaaatttagttgatcaatatttcaaaaaagaaataaagacacgaggagaatgatatgataagtgttcgcgcaaacaaacaagtaaaaaattctgaagaaactttgacagcaagtcaaacaaatgctatcacttcttctgttgaagaatcgcaagagagtatgtttcaaaataatgataactaaaaaattattcaaaatctgcctaaatataaatgatcctaagttgaacatgttcgcacaatggcgcgttctacaatgagatttaaattcaatccacttaatgaagaccagcgtgaagaactgtgtgaaacatggttttacacatcagtaaaattttaaactaaaaagtagagtgccacgggaccgggaatttttgccaaaaccgggaccgggacttgccgggacctgagaagccgggaccgggacctcgattttttttcgggaccgggaccgcaagaaaaaccgggaaccgggaccaaccgggaaattttaaaaattcaaaaaaattttaaaaatttaaaaaaaaattcaaattctaatttatatcaagtgaaaataatacaaaattatttggttttttatttaataaattaaattaatgaaaattttcaaacaaattttcttcaattatttcaaacaattaatcatttttggactaaatcatcgaatattaatagaaattcagatttgattttcacatcactttttttcggagcgctttttcaaaaaacttttgggaaagaaggggtccggcggtgccgataggcgccgccgggggaaattttaaaagtttgngtgcaatttgtttacagattttcaacaaaaaaaggttggtttttgcgattattaagctcaattggtaggattttcatttaaaaaatgataaaatatgtatcaatttaaaaaaactatgagggatcatattttctttataggaaacccacgagtatacaaaaaaaaaa

SEQ ID NO: 21797 - DNA, 2031 bp, Heterodera glycines
  unsure (1)..(2031): unsure at all n locations
tttttggagtttttttggcaatacttttttgtgtttcaaataaattttttgaaatttgcagggctattagggactatcaagcgcttttaaaatgatatcaagcttatttaatttgaatgagaaataaaaatgttatagcgtttgccaaagtggccggtcccagaaataaatatttttgatgatggccatcttttttcgaaaaataaaatttttatcggaggaaagattattttagggatttttggggtcggaaaatcgaatctgacattaggtattcccaacctgtcgacccccgaacctggattcaagcaaaaagttcaatattcaaatttctcattgttcgtatgaaaatggtttaaattggattcctgctcgagaatgtgtgccattgcggcaaattgtggccgtaaacaatttttaagatgcaagtcggactttttcttgcccaaaagtatgtccaccctcgtcacccaggaaacatgtctttatgactttttaatttggattccaacaaatgtaattcagtggtgacgcaaagttgtccccctccaaaaaatgggtgcagatccatcgacaaagtaccggaataaaatgtgatggtgtgtggcaatcaaatgcaatggagataagaattaactaacacaaatgcataattgatagtgaataaaaaataagacctggaactggaggaactgaagcaaacctttttgctcgtgaccttttttctatgtactataagtttgctaaccgaaaaaaatgaaaaacagttattcccatagatataattaaaaaatctcttaatttaaaagaagaaaaaattaaagatacaatagaaaagcttaattgtatttctattttttctatctgttttagtattttttctggatttaagaataaaattttttcaattgttttatagttatctaaaaatgtagtttttctgatatagagtcagaagaaaggaagagatataataaaaatattgatgatgttttttttccaattagagaaaaaaattttttttttgcaacgcgccgtggttgcccgacttcagctcggcaaatgttttggttgcgtgccatttgatcatgaaccaatcacgttggtaaatccacatgaagtggtgccattaatgcttcggacagtcaatgaatgaatgacacggcatttgccaaaatccatcaaaaatgagtcccccccgtccccgctttnttgtccacctgatgcaaaagttgcgcattttgccgctccctcagactctgatcgatgaaagtgcgcgactttttcggcaattcgatgctgccctttgtcgcctttcgttgtgccattgtctgtcggttctcctcaaaattggccacacggcggaagattttcacgcacagaccacctcctaattgagtgatgtttttgtccgtcacacccttcgcccccccccgcccccgcccatttccccaccaaaagtggcgatgaccaaaacgccctcctcgcgtcccatgcgtagtgctgttcgagaccaaaaatttcccgagactcgagaccgagactcgaccccgagaccgagaccgaaaaccccgagaccgagacccaaaaaacccgagactcgagacttttttcaaaaattttcctattcgcttaaaaatcgttaaaacattttttgctctattcttaactaatttttggttttttttttaaattttgattcaatttggtacaatatttatcatcgcacctattttggaatttttgacaaaagtgtgctgctaattgacacaaaatgaaccgacgactttaagcagaaaaaaaaatgtgaggcattttcaacttaaaagatttctaatgtaaaactcggttaatcacggaaatgaaaaagtcttttgaaaaccgacaccctagaaagtgatatttcttgatgcgattgaaaatttttcaaaatcagaacatcgggcttaaaaaaaaccagattttggggtctaaaaccagaacatttagcgaaattgcttcaaatcagttatttttaaaataattcgaata

SEQ ID NO: 21798 - DNA, 1797 bp, Heterodera glycines
tcctccctgctaatccttcttttccttttgggatggttttctcttccgctttatatatctctctattcctttctttcttttcttttcctccttctctttcttcctgttcatcccttccccttccgttctttcttccctctcttccatttgagtgggtgattctgattctctcttcctttttctcttcctcctcgcccctcactttcttttctgtcactctttttctttcctcatctcttccatttgttgggatgatgactttctcttccgcttcctcctcttcctcgtccatctcttctccgtcctcccgctgttcttcctcttccgcggcgtttccgcccgcttcgtccgccgtcccctccagcaccatttgcgcttcttccgccccttccggcactccgttcgttcctccgccaccgtccccttccgtccccagaagcaaagagtcgaaatgttcggccgaatctgcgtaattatcacgggcgaactgttcagcagaagacaaaaacttggacgaatggccaaaaaaagaagcggacgaatgaaaaggaagagaaagaagggaaaaaaggagcaaaatcagagggaagagaaagggggcggtaagaggagggcgagagggggaaaagggaagggacattcggcaaaattaattaatcagcactgataaaagggcgatctgaaaaggcaaaggcattgaaaaacgcaatgaaattggaatgaaaatgattttgattgttccaaattttggcattttttggtgcaagactcttggattggatgtgctttcaatcgccgcacaaattttacttttcttttccgcaatgcatgtgcttcgtcagtgtttatcagtgctgatcggtcagtcacctttcatcctccccccccccctctggtcatatccggatcactttcaccgtcattttcctttttcctctcgccgctccctttgttttccaatggaatgactcccggcattcccccccccctcgcgccggaatttaccacccaaaagggcgacccctcaagaataaactcgtaaaataaatattaagtatttatttaaaattcagatggatattattcatttgtaattggaacaatttaaatttaaaattggaaggaatgtttcgattgatttaaaggacatttgatcaatcattgagtcaaaaaaggaatgattggaaacgaatgagcgaaaaaagtgaaatgagaaagaacagcaaagaaagcacagaaatgtgagaaatgggaaggggagagggaattggcattttatgaaagcgaaagacgcaaaagacagtgggaaaacgatcacccggcacagcattcaccagctgatcagtcggtttctcattaaacttcatttggccaaatgagtcccattgatcagtttatgtgtctgtccctcctttcctttgatctttccccccccccctttttttggtttgtcgtctcttccaaacagtgaattcaaatgaagaaaaaaaataatggcaaggtattttgttcattttatagtccgtttcttccttcaaccaggtgcgtaatatagggtgtacaaagggttaggagaagtgtggaagttgtagtaggcacctttcgggtattttccgtattttgtaaccattgcatgaatagtaatgggatagggagagctcagttatcgccccaggacgactagattggattaagtttaagataagttatgctttattatttgcaaataaaatttaaataataattaaatgtaattattccaaactctgatatttttgtcacttcgtcctagcacct

SEQ ID NO: 21799 - DNA, 969 bp, Heterodera glycines
aaatgttggtaccaagttttcggtcaaatccccaagagaaaaaagagatagccattttttcgcaagaattttttcgttagcatttcaaatatcgtgtgagtgttggtagagccacactagagaaggcaaatgttggtaccaagtttgcggtcaaatccccacgagaaaaaagagatagccattttttcggcaagaatttttttcgttagcatttcaaatatcgtgtgagtgtttggtagagccagactagagaaggcaaatgttggtaccaagtttgcggtcaaatccccaagagaaaaaagagatagccattttttcggcaagaatttttttcgttagcatttcaaatatcgtgtgagtgtttggtagagccagactagagaaggaaaatgttggtaccaagtttgcggtcaaatccccaagagaaaaaagagatagccattttttcggcaagaatttttttcgttagcatttcaaatatcgtgtgagtgtttggtagagccagactagagaaggcaaatgttggtaccaagtttgcggtcaaatccccaagagaaaaaagagatagccattttttcggcaagaatttttttcgttagcatttcaaatatcgtgtgagtgtttggtagagccagactagagaaggaaaatgttggtaccaagtttgcggtcaaatccccaagagaaaaaagagatagccattttttcggcaagaatttttttcgttagcatttcaaatatcgtgtgagtgtttggtagagccagactagagaaggcaaatgttggtaccaagtttgcggtcaaatccccaagagaaaaaagagatagccattttttcggcaagaatttttttcgttagcatttcaaatatcgtgtgagtgtttggtagagccagactagagaaggcaaatgttggtaccaagtttgcggtcaaatccccaggagaaaaaagagatagccattttttcg

SEQ ID NO: 21800 - DNA, 1889 bp, Heterodera glycines
aaaagaggcagcggagaatgacaaattaattccgtacttcaaaaatcagacttttgagcagagagtggccaaagaattggaagaattagcagggatttgtgagacaattgcagagacaaaagggaaaagggaaagtgcaaagacagaaaaggaagagaagaaaagggatgaaaagtcaacgaaagcgagaaaagtggaagaaacgcagtcaaatttgaaaatggtaaagcggacgacatttgaatggcaggaagtgaaaataattaagcccatttggatgcgaaggcattcggaactagagaaaagtgacgactccttcaccaataagatgccgccgaccgctggcgcattccaaattcaaaatttggcattttcatcagggacgatgaaaaatttgagggaggggaagaaaattggcagcagtgagactggcaagaaaaatggcctaatgagaatttggcgatttgataagtacagtgtgaaagtcgccggacaaatcatagtggaaagtgcgaaatggctcaaaacgtggattttcattaaaattccggataaaattcttttggattatcacatttaatttttcaaggacacacggatggaagccaacatttttaaaagccgtcacgccactagctgaaagccttgaaccccaccactcggatgccgaattcgccgttattttcacttaaagacgaggggaccgtctttcttagaggccggggatgtggtattagtgactttttgaccctttatttgattgtttgaatttgtttggcatagtgtttatttgaattgacctcaaatattttgtttttcttctagagtagttggtggattttagtggtcgtttgtgttaattttagccgttttattggtcgttgattgatttgtgtttaatttattttgtgttgactgaatttgttttaatttgaattgtctttttaatcatttgttggataaatttattttgttttggtgtttgtttttaaaagcaggttttgcctaatttcactgacatttatcccctcgtttacaaaatttggaagtgtaaaaagaagaaaccccgacaaattctccttcttttccaacaagacaagaaaaaagtcaatccgaaactcataacccaaattccttatattataaaaaaatatttatttgcctaggctcgtcgaaaaaaagaggaatttctctaatcaaaacagattttttctcgaacagagagccatgttaattacaaaaaatatttctcatctattttgactttagtgactataaaatctaagtttttttcttttagaaaagcatatattagtatttctgcattttgtgtgatcaatcaattggaaaaagggcaaagtgtgcttattgaaccaaaaaatgaaccgacggtaaggaatttaaaaaaaaaaatttaaaaaattacaattttaatttttcccaatttttctcatatttcagttggatttgtactgatgtttggatggacattttcccatctttcgaccgtcctaaacttggtctccaaatggcattgctttctttccgttttgatgttttggtggacaaacattttggtggaaaaagcgaattgacaatttggcgaccaatcgtaattaacaagggcattggaccaaaagcaatgctattagtcgattggaagcctgtggcacttccggaccgtccactgcccaacaaaatccgctttaaagaactttggattctgtaagaacatagagtttcgagtcgaggtcgttttcgcgtggcctgagtttttgaacttaactttttttcattgttcaccaaatccaacattatttgtgtcatttgatagccctaaatgtcctctattagcctgaaaaattccgaaaaattttaattaggttcaa

SEQ ID NO: 21801 - DNA, 2877 bp, Heterodera glycines
  unsure (1)..(2877): unsure at all n locations
actggctcctaaaagtgtgatgaagaagcgcaaaaaaccttgccgtgtccgggatttgatacatttaggtacataatatctcctgactaagcattttcgcacggttcgcttgaaagtttagtaaagtgaaaaacaagttaaaatttgaaatttctaaaaatatgctggcaaacccactatatgtatgcctttcccggatacggccaatatcttacaaacaaaaaaaatgaagaaaaccgcaaaattaattaatttaatttacagaagatggaaaatttgcacattccaagctacaaaaaaaaaatttatcttttgaaactgatgatcattgtgaggactggataagaatcagccttttctaacttcttgagctttttacaaataatttacagccgtagtgtttacggatcaatgaaagtggaaagaaccaaaaaaaaaaaaatggcggcgaaaattttgaatctaaatctgttttcttaaaaacattatgccaaaaattagccaattgaaaaatttaaaaaattttgcggttttacaacaaagactaaattgcgttttttcaaataagcagttttgttagcgcggccgcaaagcaatttcaattttcagactcgcccaaagagatttcgaacatgccaaatgagggtccgtcccccttttttggatttccctcatttcgtgccagaaatggcaactttttcatccattttcccccacaaatttcagtttgcacacacactttcttcatccttcctcccatttgctttaccaaattcatgctcatcactttcgtcctccgctgcacaattgccactctcttcttccgcttcctcctcctctctgtcctcttcaaaacgtctcgaaagtcgtcgcaccgcatccctcgtgccacgactcatgcgaacaatgcgccggtcaaatgttggcggcgagttcggcgtacttgacgtgcaggattcggtggcggaggagatcggtgactgacggcggaggaggtggttgtgctgctgacccagcctcaacatctcgtcttcctcgtcatactcttccatttcgttgccatcctgccgttcatcaccctcatatgcatgagcattgttctgctgatatttcggctctgtctgctgttccccgggcgtgctccgtccgcctttgttggtcggcgtggtggagcgcgagctacgctctgtcaacgcgctaccactttcttccgccgaggacatcgactccacgccggatgtactgctcgggcactcctgttccaccggcaacagttcgtcatcctgttgaagcagttcagccacagctgctgtttctgcactttcggagtccgcttcaccgtccccaatggcgggcattcctcccgcaatttccttctttcgcttcatgtccaacatggctagcagcagcagctgacgtgaactgctctcatttggcgcaatgtaaagcaatgttcgctcaataggcatcaccggaagcagcggaattaggggagggattggcacaagtcgacgatcatcgccaaaaaagtgccaattcggcagacgacggaacatcggattatcgaacaacagacgattcgtccgttgttgctgcggtgtcttgctgtgtctgctgacaatgttaatgttactgctgctgctgttgttgttacccagtgacggatggttgggccaaagatggacagtggcaaagcaaatgccatttgatgaagttggtgcaactgcggatgattcttcgacattcgtttctgtcttgatgttgttggacagcgacggcgcttcgcgcgaattgagggacatcaatggcgagaagggcgtccatttggtggcaaatttctgttgttgctgctgttgatgaacattgaacaattgcctgtggctgctgttcagctgctgtttctgctgtccaaacagctcaaatacaacaaattcaggttgcttcgtcgtcgtctgttgctgtacagcttgaacttggggagctgtcgtcgtgctactgctgctgtttggcttagtcatcggaatgaaaagggctggcgcttgggaggtcacgctgttgtcacccacttgcgcagaaatctgtcttccgaaataattttgatgataaaagtgctgtggggtgtgtgttgtctgctgctgctgttgctgatccgtcttggcggtgttggcgatcggaggtgctgccatttttggggggttttgatcactctttgctgatcactttttttggtatgtgtgtgagaatgaggaattgaaggcaaaaatgagagtgatgagagagaggtggcgttgaataaaaatctggctgctctgtttatgtcttttggtgctaccctaatttttgttgtttgggtggatggagcgaagaaaatgtgaggctgatgctgtagatgaaccctaacaaaatgcaaataacaacaaaaaacaatgaaaacaatttgtttttttggtgatggtttgtactgctcgacgtcgtcgtcgtcactgtctgatgagcctcaacagcaaacagtaactccttcttctgttgttgttgttctgttgttgaacttgtcggtgtttatgcttttgctttgtgattagtctcaaccgtttatctccgttttgctgctcgttctgttgttgttggtgttgatccaatgtccggatgaactgctcctttgtctccctctctttccgttgatcctccgttctgtttgacgttgcttcttcgtttgctgttgttttcctcttccgtgccgtcgtcccgttccaaaattggtgctgtttctttcggatgtactccttgaaaatgatgagggtcaacagttgttcctccgtgttgctgctgttactggagctattgttagtgttgttcctcangctccgtcggacggaa

SEQ ID NO: 21802 - DNA, 996 bp, Heterodera glycines
atcctacaagaaatttaagcgaaaaatgcgccaaccccccctcccctccctttcccctccccgtgagtgagtgagtgagtgataagctgttagctgctgataaggccattaatcattttgctgctgcttggtccctttgctttttttgcttttaactgataagcttagtcagaaagtgtcgtttcatttgtacaaatatttcacttaatttgtttgtactttccttctctttctccgtctgtccgttgtccattcccacccaatttcccccctccccccgaaaaaagtccatttgtcccatttctctttctttcccacaaaatgcttttttccatcatttccttcatcattttcttttattcggtttcctctgatcagcaacaaaatgtgtcaccgttgcgcaatgtacgggcacattacgacgccaaaatggacacaattttggtggattgggaatggagtgaaattggacggaaggaaattgagggtgaaagggcgggagaggcggggaagagggtagggggaggaatagagagagagagtggcacagggagagggaggaagagagggaaggagagagggaggaagagagagagtggacagggagggggaggaatagaaggaggaagagagagagagtggacagggagggggaggaatagaaggaggaagagagagagagtggacagggagggggaggaatagaaggaggaagagagagagagtggacagggagggggaggaatagaaggaggaagagagagagagtggacagggagggggaggaatagaaggaggaagagagagagtggacagggagggggaggaatagaaggaggaagagagagagaatgcgacagcgagggaaggaagagagagagagagagagtgcgacggaggaagagagagagaatgcgacagcgagggaagaagagagggagagagagagagagtgggacggaggaagagagagagaatgggacagcgaggggagga

SEQ ID NO: 21803 - DNA, 1021 bp, Heterodera glycines
  unsure (1)..(1021): unsure at all n locations
cgctttgttcctaatacttcggtgtttcgaagccattccgcttagggtatttgctgaacccattgaacggggctttgcaactgaacagagcgatccgctggtaatttggatagcgagaaagtcgcaggacaaaggcaatgaaagcggagaaaattcggagaatgggtaggttggcggacttctgttgtttgatgcatggtctttgttttgtgccggttttcagcgcgatttccatggctgatgagcttcttccgccgtacaatttcaccgccaacattctcagtcccggcaaagtgcgtctcgagtggagaacgcctccgctgccctcgccttcgtccgtccctttttacattgtgaatgtccgtcagctaagtgccaatacaggcgatcgcttccctccccaacaggtggacatttacttggcatttccttggcgtttgccgcatttccttggcatttcgtctaatcttcgttttttccttttcgcttcgcgtcgatggcactcattttttgctcggcaatttggtcgctggagaaaactttgagttcacaattcggaccgcgttggatgccgaacgcatttcgtcggcagctgccattgtggaaattgccattccatcaggtgaaatggagcagaaggaaacactgaccttaccggtcaaaatcattgactaactgatcagatagtgatttggtggaggtgggcaaactgatcgtgacttcgcgctttcgtccggacggaaacggagtggtgaacctcacttgggaagtgccgcagcatttgctgggaaagattcaatgtggcaacatttaagaatgcttcgaataatctaagagtttggttttagcctatgaaatgcgttatttggaagcggctcgggcgcaatcagtggcgatgccattttgggaaaggcttttctttcccggcacagcgccaaccgccgaaatttacaacatgaaaccgttgggctgacctcaagaacatattggtccgataatgaatntttctgctgctgttaag

SEQ ID NO: 21804 - DNA, 2189 bp, Heterodera glycines
atgggggtgaaaaatttttttctggggtattttgaggtgctgagcacgaatatgatgtttgttttacgtttcagaatttttggaattttttaaaaattcgaaaatatttttaatttttttggacctcaggattttgggttaaaatttgaaaattcatatctggcctaaggtttgaccaattttgattaaataaagcattaaaaatggagaaaaatcaggagaattttatgggttttatttggattttctagcataaatatgaaaaaagttattccagaaattctggaaaaattcgaatttccagaaaaaaattcagaactcggttctgaaaagtcattcttgaaaagtaaaatactacaaaaatccgcaatttttagccctattttataaattttatttcacttttttatcacatttttaaaaatagatacaaaaataaaagtgattttggtgttcgggaccacaagggggtgaccaggatttttgagtgaaaaaattttttcatcaaaaaccttcaaaaaagatgtctttaggcgttatttgggttgctgatcacgaatgcgtgatcagattttacttctgacatcgttaagaccttagaatccctgtgtgattggggattctgaggcatcattttttttgggggggggggcgaagttcgaatccgcgcggtgtatattattttctatgtatttttgggttatttttaatgttttaattcatttaaaagagtgtttttttcttaataaaaataaaattttttaatttaaattaaattgtttttttgtgaaaaatgttttaaattaaaataataatttatttacttttattaaagaactcctgtattttttaaattagaatttgtaaaattaatttcaatttaattaatattcaatccttgtacatttcaaactttctttttaattaataaaaggaataatttattttattttttaaaatttattaattacattcaatatttaatcttactttttaataaacgatttccttaattatttaattttaaaaccatgattgtaccctttttaaccattattgtaccattccaacaattattgtaccttttcgacagtggttgtacctcatctaatcacttttttacctcttttaacaattttgcacctcttctaatcactgttgtacctcttctaatcacagttgtacctctcctaatcactgttgtacctctcctaatcaccgttgtacctcttctgatcacagttgtccctcttctaatcacagttgtacctcttctaatcaccattgtacctctactaatcacttttgtacctcttctaatcaccgttgtacctctcctaatcacagtggtacctcttctaatccctgtaaggtcaacaaattttgaaaaacgggcgcgaagcgcccgactgaggccgcgaagcggcctaacaagctaaaaaacgggcgcgaagcgcccgtcttgagcctcgatgtggactaaaaacccctaataattttttaaaaattcaaaaaaatctctccaacaaattcaatcaatttgaatcgcttcacagcctaggtagcgaagctcccaaagcgcgaagcgctttttcccagctaaatagccgacggttcacgcacccgctagtatatacgttatattgacaaggagtttcgtttcaaaaactaatttgagcttaacggctaatgggacgggtctgaaactggtggaagggtcttacaactttttgaggagaatccgggaaaactatagaaaaaaattcagcgcggacgactgagtcccggggaccgatttctcactttttcttgcgtttgaaggcccctaactttttttctaaaacccgaattaaaaagtgcccgctgtgagggcactccccacaactgtcctctacatgctggtattttttatttttttattagagccaccccctggcctgcacgcttggctaattgaagtgtgctcaaaatgtacacttcagtaccaggcgaataactcgccaggggttgctttgaccgaaaaattgtttctgagcaaaaatgtgtagtatttgaaaggctatccaaccaagttttaaaatttcgaaaattttgaaaatttttcgagctaggcctaaaaaacggttttcgggtttttgaattttaggattttttaacgatttttcccagagaaacggataccactttcc

SEQ ID NO: 21805 - DNA, 1505 bp, Heterodera glycines
atacgcacatgggtggaagaagacggaaaattgaaaaatgcgggctgtcgggcacttaaggcttggataatgactcagaccccattcccaggcgataacgaaatgcacattcgctcgctgccttcggccgtcattattccatcgggagatcgggccgatcaccgatcggaacagctggaattagggcattcttcgagagatcgggccgattctcgtagaattgttcctaatcgttcggctgatcgtccggccatccgttaccgtccttatgagactaatcgccagggacagtacggtaacgaacgccgtcgggaattccgtctcaatcgccgctgagacacctgttggaccccacctttcggttcttgacttctaaaggcagggacgccttttctgattgttgagggatgttgtagaattttaattataatgactcattagtgttaattaaatttggcataatgtcttgtttcgcgttttttctcacttaaaattgtattctttgttttttctttccatctttcattccaatttttattatctggtaatttttattgttttgcgccgtccaatttcttttgactttaaaattgatattcgtcaaattgtttctcatcgatatttgtcttttggaattaaagtgtttggatttgacattggcctactctgtgtttggtataattgcgtccctgtcttaagtcagtagcaaaagtacaattatacgattacccccccccccaaaatttttaaattttatggtgaataccaagttttttcaaaaatcgttgaaaatttttttttttcttagaattttttatgaaaaactttctatgaatttttgcttgaaaatttctactttctaagaattttttcttgaaaatttctaagttggtaaattaaaaaaaaaaattggggggggggggggggggaacgaactgctccccgccgaaatgcccactctcacccggctgtggcgtggcaacgcaatgcgcataaattccgcccgcctcgttcaaaacggtgctgctgcgcaccgacgcggacagaggcaattcactgcctacggcacgccgccggcgccccgctctgtccacatatttccggcgcaattcggcagcatccatttcggaagcaatgtcctgaaagtcaatgaaaaccaataaatttaatgcaaatttaaaaatatcttaaaattgctgagttggcgaccaccttttttatggaaaaacctaaaaatttaaattagtaggttttagtttccgggacatacctgtgcaagggggggggggataagccaaagggtcttacgatcgaaaattgattttagtcgatcgtagaaaaatgcaatttttaattgaatttattaaaaaataaggcaatttttcgaattgcctataagaaatctttgattaaaatttctattttcatatttacgatcgcctttttcttttcgctgacttttttttctctccttttttcttctttccctcttccttccttcaccc

SEQ ID NO: 21806 - DNA, 1342 bp, Heterodera glycines
atgttttttccctttggtccttccttccacaaatcttcgctaattcatttttttgtatcatgaccatattaaatttaaggaaggaaattcgaacgtgcacgcggtcgccgaaagtctcgcggttacaagaactgaggaattcctgtttcgctttgttgagtatattcccttgtcatgttacctttttgttatggaaatgaaatctttcttatccataatcaaagaaaaaaattgttgattttcttttctgttatttattctttttccaagtagaaggctaaacatgacacaactatgaattgacttggtgaacgaagcctgcatatgaattccaatttgggtgttttgaatcgtcaaaatggatgcaagcttcgttcgcttagcggatggagcagcgaagttatcggaaatgtttattgtggtagtattaccggattttctagcctagaaaaacttttgggtgaacgccccgtgaaaaaatgggtgcccccgcagtcaaccgcctgtggcgctcgtcagacgtcttcctccgccctccgtctcgccccactacttgctccgtcttcgcatgctcccttttgcgaaatttttgcttttaaatggttatttattttggtactgaagtgtccattttctctgggactcagttgtcccagtgcttagatggcattggttcgagtttataccttgttttttagacttagctcatcaagagctttcgaatgataccaaatttgtccgaatttgagtgttttaaaaggtcaggaaccccccttttcacacaaattttcgagttttaaaccggttcaaaaaccggttttttggcatttccgcaactcgagacatatttttccgtgcttagctcctcgagacgaatcgattggtatataatttgacccattttttcacggggcgttcactacagttcacccgaaacaactttaatttagtttataaactcacttaattataaaataaatattcgttagaaaaaagagtgaaacaacacgcgaaaacgtcctggcccgatttttatttgtttataacaaaatgacaataacctcaatttttaaatttgaattttcctcttccatcctaaaaatggacaagggactaaaagaagacttttgcttgtttttataaaagtgtatacatacttatgtattttagcactcggtttaaacccttttcttcatggcttcaaagtattcagaatcggctttcaattcgattgaacaatcgccgtcttgggaaaaatcccgagaagccattcgacgaccgataaaaaagagaaagagcaagtgaaggaatggggaatttactactgctcagcgtttgcttt

SEQ ID NO: 21807 - DNA, 2583 bp, Heterodera glycines
  unsure (1)..(2583): unsure at all n locations
agaaatcacggggctatataggcacgagatagtcgacactatgccaaaatcccctcgggggatagcaattagcaggagggattaacacaatcaggtttttgttaattgtttagctgaaaaatccgcaattaattccattttccccattgcccccggcaccattaaaaatcaaatgtcccgacccaatcagcaccctaatgagctactactaattatcatgatgatgaatgctttcagtgcccaaatccggcttaatccccctttcctttcccttctccacatgcaaatgctttacattgaacataaaacggagaagaagcagaacaccccgttcccccgattcatcaaatatcaccaaatttgcccccgctaaccccaccaaaattgcccccttaagctacaagcacagataataaattaattaattgttttgccgcccgccgtcgttcaattagcccatgccccgcgggcacaggggcgccgctgctttcgtcggccgcgcgcgcgctgtgcgccaacatttcgcgcacattggagcttaaatgaaggaaccggcttttcctcccatttgttgttgtttgtttttgtttgttgtttggcgttgtgtgtacgtaccaaagacgtgtgacggacgcttttcgaaaagaacgacgacgacggcttcttccaggggcccacaaaatgggaaaaatccactcactttcgcccactttctcccccctgggggggggaggcttttcctaataagccaacattttgccgcccctccccccacccggcttcatctgtcactctttgtctgagcaccccgggggcatcatcatcatattcgtcgatgaatacgatggatggaaaatgatgatgatgatgatgggggtgattatgttgcgcgagcagtaagcaagcacttttcgggggcatgggagaagaagcatctctctctctcctcttcagcaaacagaatggggaagaagcattcattgattcattgcaaatgctttttcttcgcgtccccattgaatggagaaaaaaggaggggcagggacgccctcgaggcaatttttgagggggggtaattatgcacaattaacggaatttgatggtgtaaagcgaagaacaaaagttggtgcagcaaacaagcggaatgtcagtaaaaactgattaaacaatatgccatcgcnaatattggacaatgttatattttcgtgggattaattatacgatcgnatggattaattacggcgcttggcgggaggcgttaattgggcaaatgcaattcaaacggatttccaagcaattattaccaatttaggtggctgcaaattaatgaatctggcaattttaaggcttcggcattagcaattccgatttatccgttaattagacactaattaggagggttctgctggggaaattgaggaatcgccctcgcactgtttttggcaattctcaccttcctggaagtggccgtcatccgtcgcatcggtgccgtcggtgtccatttgttccacgagatgtgccaacgcgtggccgatcagctcatcagctgttgttgatggtgttggcacaaattgtgtttgttgtgctaaaaaattggaaaaatttcgcatcgttccaattactgtaaatctctgatgattattattgtatttcaactaaaatattttgtttaaaattccctaaatttagtgattgatttagagcccgatgtgggacgggaccccgcgcgggatttgcgggatctcaatccccaatcccgcatttttttgaaaatagggattttttggaattagtccttgcgggagatcccatctgctaaattttgaattccaatcccgcagcggaatcagaaaagttgatttttttgaattacaaaatattaggtaggcctatcaaaatttttataaaatttcaaaggcttgccaatcaatgcttggcattttacccaccctcacattcgtcggctgtggcattttcggaagatgattttttgatcaattcagtcttaatttgttgttgtggtggagctgatgatgatggaggagcggaagaagaagatgaggaggaagaggacaaatttgaaagacttccaaaattgaggggcacctgaaaaatttgaattataaaataaattacacatcaatttgcacttccaaaaattttaaatattaaaatgaattaaaaaataaataaaatttaaattcaaaatgcaaaatgcaaaattaatttctgcaaaatataaattaaaaataatgtataaattaaaatcaaaatccaatttaatttttagtaaaattagataaagaaaaatttaaataaccgaaaatcatttgttacctgctgttgctgggccaacaccaccgtgccgttgttattatgggtgttgttgtcagcaaaatgttgttgttgttgttgtagtgccgccggtgccgacggtggcacaaattttgccgtcgttgcctccggcacaccgcctcggaggcgttccatcatttgctggaaagcggctgccacaaacagctgatcaaccaattgatgctgctgctggtgatggtgatgatggtgatttggcgtgctgatcag

SEQ ID NO: 21808 - DNA, 1556 bp, Heterodera glycines
caatgtaatatttgttaaatgtcattagaaaaagtaccgccgcggctggaaattgctcaaaatttaaacaaagcaattaaagatttctttctgatcagattctgcactgaagacgccaaaatcgagggagggcgtagggggatcagggatggacgaaacttcggcttcgagcttcggaaacatcgagttttttgagcttcagcttctgataaattgtcctggatttcgggagaaataatacacccacccctattttctaaaatatgaattacgtgaaaatatttttattttatgccgtctaccgcagttttactttaaacctgattttattttattcgcatttttatcttgctaatcctgtgatttcgtccacttcttttctcacttcatctacgatacttttattctgaacagtagtcagaataagtgatttatgcatgcatatctgatgaaatttatttatgtgataagtaaataaataaaaaatagaatttctaattaacgtgatgataatttttccaaacttgttttttggtcggcgattttttgtaagcaaatttggattaaaaaatttttaaacaggaatacaaaagataacggtccatttgcaccaaaaaagggggccaccatgtacggacaataaatgcacaatattcattatttttttggaagatgtacggacgggagccaaaggagattttcgccgggcacttctcaatgtggtttttatggtgctagtgcgtttcttaaaaactgccagccataaaactaaaaaccatgcacgtttcttaaaactgccctcacccctaatttcaagaaaattcttgaaaaattttgaaaacttgaaaaatatttttaaaaatttttggaatattataaaaacatgggaaaattaatttttattcgtaaattaataaataaaaaattatgaacttttctaaaaaaaatcgttgaattgcattttaatgacttgaaatttaatttctttttggagtttaaaacctattgttaatctattaaacactagaatttcaaaaactaaaaatttttaaattttaatacaaacttttttatatactttgtaaaaaatttaagtattaatattttgatagaaaataattaaagctattgaatgataccataaaatattggttgcagttgagtaaagttatgaattttttttacattttttatttagaaatatttcttcaaaaattctaattttctcttagaatttttcgttgaaaattttctttaagttttttaaaaaaaattaatttttgaaaattttttgaacaattttcaaggatggcagttttaagaaacgcgccagcacggtttttattctgtgccgtcgtaactatgactcatcgcaggtgacaatcaacagttgagcacatgtttccttcggaaaatatgggtgaaaaatagcgtcgaaaatttatacttgacaaatccttcacccaaatgattgtcagagtatatagcaattaaattcatttaattgctttgtttaatgttgagcaatttccagtcgtggcttttctttttcataa

SEQ ID NO: 21809 - DNA, 1747 bp, Heterodera glycines
ttaggccaagtattaaatgggtatttgtctaagccttcaactatatattgtccatgaacaacagtgagtgaacattattattttttcatttgttaagcatatcgataatgatgataaatgcgggaattcaaaaaaatgcgactgtttttgatttataatactgaaaaaagggcgtgaatgaccttagtatttattagtaaaatttagcgaaaaaccaaaatttttaattttataggccatttttataaactcttttaaatctgatccttttttgatgggaagcttaaaataaaccgtctttatagcgcgtgcaatttaaaactgtccaaaggcacattagtgttcttacatggtgcgaaaaagacaaaaaaaagggaagcgaacaattaaaaatatagaagaataccgtaataaatagaccaaagtttataattctatttaagtctagttttttttcttttcgaacattgatttgaaatatttttttgttctaaatgattaaaaaattacaacacaaagcctcaaagatcaaacattatgagaggggtgtcaaaagccaattgcttataatctcatttattaaattttaatttgtactttcaatttatgaataaaagggtcatgtgtttgtttcaaaaatatacgattaatataaattcccattacagcaaattcatgggcattggtacggcaccatggattgcattcctccaaaattgagttgaacccgaacacagattaaaaatgcgacactgagaaaatatgacacaaattttgtttttttaataatagattgatttttgtttctatacagcgtcaggaaattggccaatccttagcaaaaaaaaaattttgtattgtgcctaacaaaggagaggtacccaagtgacgctggaacttccgaatgaaacttacagggtaggtagattaccccccccccactttgtattataaaattttttttatttttgctaaatgaagcttctggccgagatatgaagctttttctttttgatatattaatacctttacaaagaatgaagagccaatgtgagcgtcggtggcctagtggttatgccttccattctttttttcttcttctgaagttcaattcccccaccctgcaaataattgttttggttcttttccctatccaaaatatttttaataaaaaatcaccaaaaggtttctagcacatctaaatttgtttttcctacccaaaatattttttaaactttttaacattaataaatttggtcttaaaatttttttcatttctattcaaccttaattttaactttcatataaattttaaaatttgatagttttggtagaaatgaatgaagcaaaggaatttgtcacattatgcaaatctaataattattagagagggaatttttatttgaaaaattctgaaaatgtgctaaaacccaaaaatatgccaaaatatgttcaaaatatttattgtaaattggaaaaatacagtgtctttatgtaaaatcccagaaaaatctctttctttaacattttcgccgcgtaatcgcaaaacaaatacatttaagatgttcgaggatcttgtaaaagatattaatatatcaaaaaggaaacgcttcatatctcggccagaagcttcatttagcaaaaataaaaaaaattttataatacaaaaggggggggggggggtaatctacctaccctgtaattttcattcggaagtcccaccgtcacttgggtacctctcctttgt

SEQ ID NO: 21810 - DNA, 649 bp, Heterodera glycines
ctctccacctcttccccctcacctctttttccccttctccctccctctcccacctcttccccctcacctctttttccccttctccctccctctcccacctcttccccctcacctctttttccccttctcccctccctccctccctctcccacctctttcccctcacctctttttccccttctccctccctctcccacctcttccccctcacctctttttccccttctccctccctctcccacctcttccccctcacctctttctctcctctctcctccccttttcgcccctttctctccaagtgttcgctcgttcgtttcctttctttctctggtcgctccatcgcttttcctctgtttattgtgtaattctctatttccttataattcgcgcacaatggccctataaaatgcattttgtcccttttctttctcagtttgactaacttccgttcgttccgttggaatgtttaaattcgtccactttttctgctcattggccacttttcccctgctgatctctgccatttgtaagtcctttcgccccctttgccctttaaagtccaattttcccctaattagcttccaattgcttttacttgccacacattgtgctgaacggcggcacttatgacgagttcaatgcttct

SEQ ID NO: 21811 - DNA, 1618 bp, Heterodera glycines
aaaaacgaaatgataataaaataatgatttttagtttacaatctttcagaaaatttgtaaaacatatttgaaaaaaacattttttgactaaaatttatttaaaaataaattaatatttattaaaaaagttttgaattgtagaaggaaattgttttaagcagagttttgaacaaattttggcattttttttttgtttttagcacataacaaaactgaaatggtacaatacgaccctataaataaaccagtgaagaatattattacagaaaagttcaacattttttttaatttattaaggttttttggtaacaaaaccagggttgcctactgaaaattgagtgcaatttgtaaaaggttttcatccaatttttttttttcaaaaatgagcataaatcagcaaagtttctcaaaaaacagctataacggctgatcgaaaatagctgtgcgagctgaagcaaaaggggctaaaatgaaggaaagattgccccaaaacaacattcatccctcccgagtggtggatgtggtctagtggctaagacaacggatccacacgtaaggggccccgatcaaatccggccttccaccccaattttataatagcagcaaagcagaatttggagccctgattatgatgatgaacatggaaaggatttataaaactccaactgaaatcatttgaccaaatatttggataaaaatgggaagaaaaggaagaagaacatttgaatgaaaaaaagaaaatgattaaaaaatattgtaatataaaagagaaaattctgcaaaaacaagaaaatacggagcaaaaaatggagaaaaattgaaagaaaaattggaagaaaactggggtcaaagcaccattatatttataagtggattaaaaaatggaattaaatcaaaacgccaaaaagatacaaataaaaaattgaaattatacaaaaaaagataaaaataaaaaggcataaaattaaaaattattaagaaaaattaaattttaggggtaaatattgatgattttttggcgttgtctgccccccctttcattgacggcatttctttcgcatgtccaactttttgtcgaccgttccaaagttgtggagatggcgtcgctgcactcgcatttcgtccaatctttggctgtcgtggactttgcgcgacgactcaagtgaatttgctgccgatgggcattaactgttagcaattgaattgggttcattgacagctctgaacagcgttgttcggtccgtgatcagctgatgttctgtttggtgccaattgtgcctcaaatggttgaaattgccggtcctttttttgcatttatttttgttaatttgcttctccaattcctttcagactgttctcgtcgtcaaattggcatgctgatgtgcgaagttctgttctcccttttcgatttcccttctccgcctcaatttgactacgccgagaccgacccaatgctaagagagtttcgagcggcgcttcaaaatcatccatatcaaaatagcacagaatctaatgatgaagatgtgctcctagagaataccttctgtaacgtattgaccatttaaaattgagcacttcgggtgtctagaactgaaaccaaaacggatgacaattgatg

SEQ ID NO: 21812 - DNA, 2152 bp, Heterodera glycines
ggggatcctctacgagttaacataaaaaacgacccctttcatccaaaaaatatgttatcagaacaactcaaaaataccaatcataacaaaagcgatcaaaatgacatttaacaaagcaattgccctgactgtttacaaccttttgccaccggtatggagttttagggcccttttatagaagtttgtgccattctttgaggcgaggtactccctcactggctactcgatccatgttgagcctccagaaatgcagaggaagaaaaaatgaaaaatacgactagcccgtataattgaatttatatttctgattattatttttaacgcctccttccctttttgaaggcaaaaccaaaattgacgtaaaaatcaaacttaaaaaatttctgttgggaaaaaaccaatttttcatttctttgttttttttaaagtttccgaatcgtcattttttgctcttgtttcgtttttaatgaaagttttccaaaatgaaaatttaaattttaaaacttgaaaacgaaaaagaaacaaaaattttttcttggacgaaaaagaaacacaaaaacaaaaagataccgttttcatacgaaaaaaacgaaaaacacgaaaatttcgcacaatttatcatttatttaatgtctttgttttgtaaatcatttctttaagtattttttgaattataatgttatttaaaatttttttaaatgaataaaaaattgcttcagcaaagctatttaaatcatggtttatacggcttgcttaaggccttaatattaaacataaatttaaaaagaattatttaaaaattagccattttttgttttaaatttttgcacaaatatattttttcatttatgggcagaaagtgcaaaaaaagggcatgatttccagcattctatctccgatcaaaaaaaaatcatacccatacgaaaatttcaatacaggtcttttttgcagtcaataataaacaggatttattcagttctatgattttcctgatttaaaaacaacctcaaagcaaataaaaaatttattcatttttaaaaattttaaataacattataattcaaaaaatacttaaatataatttatatgtataataattatatgcatttatgaatggaataattaaatttaattattttatttatcaatgagtttttttcgcatcgcccacactgagctatccattatttattagaatctctcaacttatgtaattatgtaaatcaatttaagtgattgtgccgaatgtgcgaatatggcccaaataagtgcatttattttttaaaaacatgcatttgctcatttttaatttcagaccatttttctgcaaacgggcaaaaactaattccaacgtttttaagtgctcctcaattgaatttgtatggactaaaatatcatcaatgtaaaccgttacattcgaaattccttccaaaattttatccatttttcgctggaaaacactcggtgcatttcttaggccaaagggcagctttagcatttggtaaagcccccaaggcgttacaatcccgcatttataggaactttctgaatccagcggaatttgccaaaaacccgacaacaaatccaatgtcgagtaatatttttgtccggaaactcttaaaattgttttgtccattcgtggaatgggatacggatccggaattgttattttatttaatggtctaaaatccacgcatgggcgcaattggccattcgattttttaactaacacaacgttgtgggcccatggcgtacaactctctttaattacgccggcttcgagcattttcccaatgtgcaatttcagctctttctcgtatttttccggtacgggatatggtttgacccgctctggcacatttgaatttgtcaaaatgggagggcatttaattaaacattccccgaggtcataatcatgggtggaaaaaacatctttatgtttttgtaaacataattccaagttcggatcttgctctgtggtttttgccttttcacgttcttttgccatttcacacgcaaatacttttccgtccgttttccgtataagtgcaccggtttggaggtccaaaaacagaggcaattgcctaagggtatttcttccattatcatgtcggacgacccttctcctccaattttagtctcaactacataa

SEQ ID NO: 21813 - DNA, 1927 bp, Heterodera glycines
tttaatgaaaaaaaagtaaaattgagcatttatttaagagagagatttttgtagttcactggtttgttcacgtttatgcctagcacacattgatccaggatcagtatgttgtatcaaggtaaaaagaacagatgaattttggcaaaaaagattaataaatcataaataaataaattgaaattaaaaaataattttaaaaactaaattgaaaatttatttacgaaacttcataaagataatataattaatattataaattcaattttcaatcttttcaacaccataattataaaaatgaaaataaaatttaaaatacttataggttctaatgattatacttgaattaaaatgcaaataaaaaattattagcgtttaaaatattaatttatataaattacgttataaaaattaccctaatattaaaaaggtaaatacattaagatttcgagacataaaaaacatcaatttaaagataaaaataaatctaaatcatgcgaaatggatagcttgaagcgctgtagttgaataaatggaggatgtaacgcttattaaaaagaaaattttttaaaattatttatttaaatcttactcccgaaataaaacaactagaaaacaattatcgtatttgggtttgactaaatgagcattaatgaattaaaggataaatttttaattgttctgatccaattaaataaagcatttcccactactaatgataaagtatttgctttatatgacaaaattattgaaacaataatttcctgtttaaaatatttatatcgtgaaataattaattcttaataaattaaaaacaataaaacacacatatcatgtaaaaataataataattctaatattaatttttaattaaaatcaatgaaattatgatcggtctaaaataattaaatcaggaccgtaatgcggaaaatattaaaatactgatttagtttttaaagacgatgcattctacggaccggtgggaaaataaactaactgaaataattaaaaaagataaatatatatgacacccgaatgctaaaatatctaatatctttatccaataagaaatttattataaatgagttaaaataattctttgttttagagtaaatatactttttaatgagccttaccatatataatccaaaattaaatgtcaaaaataagaaaaaactcaaatgaagaattgtaaaattaaattattattattttaacccaaacgattcacactccccattctaaaactcgaaccgatagctaaaaatttaaagattgattatacattataatagagttgagcggtaatcggtaattgtaaaaaaaccggtaccggtactgaccggtaatgcaaaaaccggtaccggtaccggtaccaactttttccaccggtaccggtaccggtaccggtaaaaaccggtaattttccaacgtaaaaatttttggacaaaatttttcaaatacaaaatttttattcagttttcgcgcgagtgcctgttttttagcattagaattgttcagaagtatatgtatattcaggttgaccaagttttttttttcaaattcaggacatagaacactaaaattcagatatagacctcaaaattcagattattgcaaaacaagggatcagcggccaattttccaattttgcgaaggggtctccggccatgtaaattaatgtaaatcaatgaccttttttttgctttcaacaccgctttttacgcggcacgtttttccaagacttttgggggacaaggagggccggcggtgccgataggcgccgccgggaaaaattttgtaatttttaatgcgatttgttaacagaatttgtaaaaaaaatgaccagttgattaagttttgggtttttaggatgcttaacatgaaagagaaaagttggaatattttttaaaattaaaattttaattaa

SEQ ID NO: 21814 - DNA, 2083 bp, Heterodera glycines
  unsure (1)..(2083): unsure at all n locations
tttgagtgagaataaaaatttgtttattttgattttaagcgttactttcggatagttcggtacagacactttnnttaatcncaaatattntcggataacagaattatttattaaattaaaataaatatatatgctaaaagtcacttaatgatcagttttatgtttcatagaccattatttaaattttattctagcttaatttttaaaaactcaaacttttatttatttttttaattttccccgttctgttagaaagaggtctcggctctattgcagtttacacaataaacttatataattttttagccataaaaaattcaatttattaagaagtcgtgcatgtaataataaaattatcctatgaaagtattaatgggtttaaattctctaaaaattattcctgggtaagagtaccacgacaaattccattttttgcaaaatgaattggagatcattttaattacttaagcatttaaataaataaattgtaaagatgatttttgtcattgttcgcattttgaaaaattatatgtattttttaattattgttgcaaattatcactaacaaataaatatcaattgatgagtgtaaatcgaatttcaatttttctcttcattaattcatcttttcattccgaaacataaaaaagagtctgatcagcaacagaattgctgtgatcagtggcagtacagtgattgcacaatacgttgtcaacaataagaacacttcaatcacaccaattggcattatgccttcgttgtcacgacgacgaacgcgtcttttttgatgtgcttttgcaaaaatttttggagtttcgaattgtttaaataaatttttgctatttttctctacattattccaaccatttttgttaatggttgataatttgtcgagaagcgtttcaattagttggcttagcattcgataatctttttcagcaaatttaccattctttgatgaaaattccgtcaatatttttgaaatttcatcaaaaaaattgacaattgcttttaaaatttttcttttattgtcatttttctctgacaagaaattttgaatttgtccctcttctttcttcaatttggccaaaaattgctgaaaattcaattcaaagctttcaatgaatacggatttaattttgagaagattttcattcttggcattacgttcatttttaagaatgcataatttttcaaaatttgcattaatttggccgagttcgcttgggtagtcggtttgttggtcatttttgaatatttcgcatcccttttcaagaacaaattcttcaatttgcctgaatatatttataaattcgaatcgatgaaattttttattatattttttttgaactcggttttttcggtgcatttgcctgtgttgatcagttctaaaaattaattgactaataattaaaaaaaactgaaagttgctcattatttacttaccaattaaaattttcgtttgttctaaattattcgaattgagcaaatcaacggcagagtttaaaattaacaaatgcaaaattatattcatttttaatttaaaatagaaaatattgaaattttttctttaatgatttgaatataaacaaattattaaatgacaaaaaatgattgaaaaataatttcacaaatgtgaccggaaatacgctagcggaaaatgcgtcattgatttattgatacataagtaagatcctgtaaatttttaaaatctaattccttcacccttaaatattaaaagaatgaattctaatgataaaatttaaaagataataattaggtctggggtttttatgtgctaaaaatgctgaaatatgtaccaaaacccaaaaaaagccaaaatatatgctcaaaattggaaaaactaagtgtatttatgcataaaaatccaagaaattcattctttatcgttttcgtccgcacaattacaaatcaaatacatnttggaggtgtttggggataaacttttttccatcagttgagtaagtaccagcaataaagttcgaaatccggtgacgattaatgaagaattgattaggctattttcggcacagaaataataaagaaaattttgaaatgctaa

SEQ ID NO: 21815 - DNA, 1227 bp, Heterodera glycines
ttgtaatgcatgcctttttcatttaacacttacctttttcggctttttatgaaaatttcattcccgagatttttaaaaattctccagccatccccaacattcagaggataatgaggcagcgcaaagacttgcgtgttgttgtgatgagtgcttcgctgaaaaccggcaaatttgcccgttacttttccggctgtcgtaccatgcaaattcccggccgttcatacccagtcgagattaccgtatgtccattttaaaatcatttcgcttggctaattaccccccccccccctattttggttctccgattgggaccttgaagaagacccggaagtgttcattgagagggccgtgtccaaagccatcgccattcataagaaggacgaaccgggcgacattttgatctttctcactgggcaagaggtgccaaaatgaaaatgcttaaaataaaataaaattcgaaaaaggacgtcgaaattggctgcgaaatgcttgaggacgaggccaaaaaatgcggcgcaggccgcgaattggttgggttggagaaaattggctaattatgcatttaaagcgttttcttttctttctcagattgtcttccctctgtacggctcaatgcaacacgaccagtacaatctaatcaagaacacgccattcactgcaaatagtaagcgaatgaaagtgatcctttgaatttgtgccgatgcctttcttaaattctgccattgtgacaatttttgttggtcgttgtgttttgaattgctttcataggccctcgccgttgcattgtggccacaaacgttgcggaaacttcattggttattcctatttattaattatttccttttgaaaattagtgaatgtttaattttgttcggtctaaattcagttggtcaggttcgggaggtacgggtactcgaccaaaaccagacccatatatccggcttttgaacgaaaattttttatccgggaccaattttttctagacctggaaatacccaggctcggccaacccgtgttgaaataatatattttttatctggggaattactcttttcgtaacgcccacagacaaccgatgggacagaataatatgctctaattaaaaatataaattcttattaaaataaaaaataaatagtttgaagaataatccacctagaaaatccaaaatttgcttccggtatgatcccccctcctttctgagggggatgataatgagagaatata

SEQ ID NO: 21816 - DNA, 1425 bp, Heterodera glycines
  unsure (1)..(1425): unsure at all n locations
atgcatggtcttcttgaagacggaaaatttgggacaaaactctggcagaggcagctctgtcgcgctggccagatcagatgagatggctttttgtgagcatcatggtctatggccagccgagtaatgccatagaattgtggaacaagtacaaagaccaaatgtacaatccgcaaggcattattactccggcacagcataaagcagcagagcttgaagccctagccgaccttgattggcggctgcacagctgctttaacttaagctgtgtgcattttggcctgccagacccgccaaactcaattgccaaaaatactgacgcggcaattgaagagtttttctttggcgatgatgatttgaatttgcctccagggcaaccaaatcttcgtccacagccaaaagcccctccgccacttaacagcgaccaacagaaggtctttgatgctgttttgttggcaatacagtcgaaccctagggatccgactgtcccccgccgtttcttcatatacggcgatggaggtacaggaaagacattcctgtttggccaaattattaggcgcttgcgaaaggccccatacacctacaaagtgcttgccacggcatccactgggtgtgcagccattttgctgccatatgggaaaacagcccattccacgtttcgtctgggtagagaagtgtcattagacaagctcccaagcattccgctggagagcttctttgcccgtcggattcgtgaggcccaactcatcatcattgatgagatcaccatgcttcacaacacggtgattgaggtcatcgaccgagtgtgcaaagagatggcaattcgccagcacaaggatctcctcttcggagggaaaacagtcattttcagcggtgacttcaaacagtcgctgccggtcgtgcctcatgaaggcttaaccgctcaggtgacagcctgttttcaaacatctccattgtttggtcaattcaccacgatgaaattgaccatcaaccagagattgggcaaaggtcagcaagcgtacttgcaaatgtgccgccaaattgggctcggagaaaccggagagcacttctggattcctcggcagttcctcgttaagagcaaggaagagctgatagactatgtctatcctaacttccaacaactccttggcaatgacaaggagctgctcaatcgtttgattctcgctccgcacattgacacgtgcgacgaagtcaacgacatcatgatggcgaatgtgccaagtcatatgcgggaatacttgtccacggataagccccttgacgaccgcccactggacatcgatgagatcgagtccgaagtggctgcgttgaaccngcgcacagactcgggcatgccccacacagtctccggcttaagtcggatgcgtcgtcgtcctcttatcataaagtgatagggaggactgatca

SEQ ID NO: 21817 - DNA, 1244 bp, Heterodera glycines
aaattttcaaggggggtcacttcccatatagtgccgcgcaacctcttcttcttcaagttaggctaaaagtgaataaaagataggaaaatcagaatctgattgtttggcattttatttttagcgcacattttctttttcaatcaaaaaacaaaaatagagatcgactcttaagaaaaacctgacctgtgtttacgaatggcctgtctttactttctgtataaaagtacagaaaaatgaaaagtacaagtacaacaagttgataaaatttgcctgttcctttaccagagacggtcgtagatattttagtagattttcaccaaaaattgctaattttgtggagttgggaaaaaattggtaattttctttacttttaaaaaaattaagggtaaatagtacggatggtaccaaaaagttaaaattcaaatttttgaattttttatttggtctagaaagggtcgaaatgattttttattagtgaattgtccaattttagtttgtttctcgatatgtaagccatttttagaccaaaaataaaaaattcgaaaatttgaattttcgactttttgctcgaattcgggttcggggttatacatagatcaaaattaatgccagattcggattctccgaccctaaaacccttatatgatcttttctcgaaatttttttttttaaattttgtttttcgaaaaagggggggggggggtaccatccgtcctattgggaccagagcgtttgggccccggggtcatttgggccccaacccaaaaattgaaaaatgtgcttttttaaaaattttctgatgggatgacaaaattttggagatgcgagttcaaaaaatcaatttcacattattttggagtttctccggggaatttctcgcaactatcgaatgaacccgtgaatttctgttaatttttacattttttattgttaaaattattgttgaatttatttttaaaatgtatattttacatttttatgctgaaatttaaaaagttgtttttactgtgatttttcatttttctgcacttggggcccaaacgaccctggggcccaaaaacgagggcccaaacgattacctaagtgcaatgaataacagaacgccaatgtatttattatcaaccaaaaagttttttttttaaagtttcatttatggcctgcctactcgaaatgaaaaggaggggagtaccatttgtagtgtctgtattaccatgttccttattgttttgatatgtcctcttaat

SEQ ID NO: 21818 - DNA, 2538 bp, Heterodera glycines
ggtaatgatgcttgagaccgaaaattttccgagactcgagaccaagactcttgagcaccacggctattcgggatgtaaatttgcattaaaaacttgaaaaaagataacagaattttcctaaaaaaaatctcataaactcatttaaagacactctcatctgatgttgagtgcaaaacagacgacattcgcaaatccccgcatcgggtcggggtgggaaccctaatatttttaaaaagccttgcccttatctccaagaaattatttttttaaatttaaattttttttaaaaaatttcccgctttacatcagcggtactgcggcggcagtcctcctgcgtgcgctcaatttgcgcgctcaaatcgtcgcattggcgccgccagtcgtccagcacgcgctcgtgcgtctcctgcttcttctgccactgcaagatttgggtttgcgcacgctccgcttccgcacgcgcctcttccgcgtcggccaacaactttaatcaaatttaaaattaagataaaaaaattgatttaagaaggaaataattatttttaaatacaattaattaaaaattaatttataaataatatttaaaaaaatatattttaaataacccatgaaaaaacacaaattataatttgtccttaattcatatgactgaattaatgaattcacaaaatgcattgttttaagcagaaagtaattagttaataaaaaccgtaattatattattacaaagtatttaaataaataatttaaatatttaaaaaatttttcattttataataaacgaatttacaaaatgcatttgtttaattagcatgtaattgattaataaaaaattttaattgattattacaacaatgaattaatataaagatttattatctaaataatttattttattttttaatgaattcacttttgaatttgttttctcgacagctgcaattttggagttcagttcagcaaggtggtcactgatttccaactttcggttcatccgacgacggcgttcttcttccaattcatcaacagcaacaaggccttctcctagaggaatatgtaatttttcacatacctaagcttcttataaaaaatgttttttttcattttgtaatttcgcgcaaaaaatgattaatttgagaaattttgaagggtcaaattttgaaaattcaatgggttttaattagttaattaattcgagaattgaaccggcggcgccgaaaggcagagaaaatttaggattgctggaagccaaagactttttttttttgctccactacccctaaatattttttaggattccgaaagtaatatttttagcagtttttcgccagaagttaaccacttttaggtcaaattatgaaaaattccagggaattttgtagtcaggcgtaccggactggcgccgagaggggaaaatgcttcaattttaattaaaatttgcttacgaaaattataaattgcttaaagcgtggggcgggaggtcaaaattaagtttgacacatggaacagattaattaatcataaatattattaattagttaattaatagtttcggtcggcaccttcgaatttgcctcgccattgtgccgcctccgccttggctttgctgagctgcttgagcagttcctctttgccctgcacttcctcgtcaattgcttcacggatttgctcaatgtcatgctccaacgctttcacattggcactgacctataaagaaaaaatgattattttaatttataaaaatgttcgggaatttttaaacaagaattttccaaaaatgccacaggcgtttagaagcaaaattagggcaaaaatttaaaaatttggagaaatttttaacatatttgaccaaaaatatccaattatgtggacccaaaatgctccagttggaaattaaaaatctaaataaatattgaaaacattgttaaaacctaaaaaaatattaattaaaattttaaaaatttttcccaacggtgcatattatgtttttacaccggacggacctccattcgttcttggtgctcctcctccagaattctcttcgcgtcttcaagctgtgccaatgcctgcgccttacgtttgcccatttgatttaattggctttccaattcctaaaatggaaacattttttaaatttatggtaattaatcttttttgtattgatcattattgtacattagaaatgttttcacctcactctgcctttcttggtcacttgcttcagtttgcaaacgagatttggtcgcttgcagttcttggataagtctgaattttgaatttaaatttaaataatgccgcataattcaacatagttaaactataaatttttatttaaaaagaaacgattttaatttgtcaaaaaataatagttactatcaagttttttttttttgctgtccaaatttaattatcaaaatttcaaatcaaatcaaattattttattttttatcaagaaaatagtgctatgcgagtttctcggtctcgagtcaataaatggtatagaatagcgtgaaattttcattctcgtacagtaacaca

SEQ ID NO: 21819 - DNA, 1222 bp, Heterodera glycines
taattagatatctcaggcttgcaaatttgcatgatgatcctatcagcaactttttttaaagcactaattagttgatcgtcgcgccattttttttacccaattttcccacaaatttccacgatttttgacactttttcttcattcaattcatccgtcatcatctgctctctgttggtgattgattttggggagatttctttgtgcttctgctgctgctgatgcggtggtacatcttctaatccattttctgcacttttcttcccccccccccatcccccacccaattgatcaccatatctctcatctgtgcatatcgccgtttttgattattcgcgagcgatttgctgccccctacctcccccaccccttccccgctttttcgtcctttcctttcccacccaacccattcggcaagctgagtccgtcctgactcagtcccagatacctgagaaaaccgaggctgcttagaaaaacgtctaaagtaagaaaagttgaaaaatttggatgggactcaattgatcgagtgagtaacaccattcgttcccatcgagccctctctcctccgcctcaattaaaatttcatttttttaaaattttatgctcagactcaatgtaaggaagaatcaattcccatgtcgttcctcatatcgctctcaattaaatttcactttaattttcaaaaaaaatccacgtcctttaacttggcctcaagcggcgggctggcaaagcctccccacccctgctgcccctaaaattaatttttttttcaaaaattttgctcctcgactgtgaactaaacgggcgggcaatccatatccgatccaatccatgcctatcatttcattaattaaaggttcattttttcaaaatttatgcctcttggagacttaaccaggaggagtgaatcctccccatcccctccctatcaattaaaatttgatttttttcaaaaaaaattcgtctcatctactgggacttaatcggacggacgagtcctccctcaccccacctccctacccccatcagttaaaatttcattttttttttaaatgttgctcccccctatgaatcaaacgggtgaatccatccccgacccgacccctccctcccccgcacattttcccaacactccatccaatctccaaacacatcatcatcatctacagatacacacacaacacacatattgcccccccccccccaaactgactcatcattcaat

SEQ ID NO: 21820 - DNA, 1869 bp, Heterodera glycines
ccccccccccccccccggcacattgtttcccctcaattagaagtggggtcaattggccgtgaatagcgaagaaattactttttcgatgagatgtgcgaagttacaacggcacggacggacaatcgaatcgcatcgtccgtttgttccttacaaattagagtctttcctccctctaatccgcccactctctcatcatttcccttataaacactcaaattctgctgctacggatttgggttgcaaaacgctaattttgagattttggcccccgcgggcgagggattagcgcagagtttgagaagggattaaatgaccaaaagatttgaaaaaggacggcggatgaatggagtgaggtgattaagtgttgaagctgaacgagaacaaacaatacgaagctgatcatcattcatttgtctctttcctactttccaaatttttttttgtataaatttaaattcgggcgtaaaaaattcttacacatgtagagctcaaatagctttcgggtgagctattgaatgtctggagaagtcaagttttcagtgttttatgattttttgaaatttaattattaatccctagggctcatatgagacggaggtctggggttcgagtccgcttggctgcagtttatttattttttgatacttgatgaaaagtcatagtcaaatcaatgatttttcaaaatctgagttcagattcgagatcagcgtattttttaccccagggaaaggcaaaaataaaatttttaactttattctgcagtattatcaaatttccagtggcgtaaggttataaaaagtcaggacaatacggattccggccggacctgcaacggttgtctatctttttttttgtccaaaaattctttcggatttcattcattataaacagaatgaatcgatttcaaattttgtcgaccattcataataattagggattctttttttaggcacaaaaaatcgcaaaaaaggcatcaaataggcacaaaaataggtaaaaaaattttattaacgctttttaggtattaaaacacgtaaaaatttaattgtaaatgaattattaaataatttaaagttttttccagataaggacaaatttttaaaacaaaaatttttattgagaaaagaaattaaattttgggattttttttttgaaaattttttcaattcttaggggtgtattttctgaaattttttttgggtcatttcttagggatatgtttttcgtttttattgcttttttgttaaggatttttcgaaaatcctgcaaataggcacattatgcacaaaaacctcgaaataggcaaaaataggcattataaaagtcatcgtagacatccgaaaccaagcggaaaatgcgtttcccgtgcttatctgtgagtatcaagtgcgcagaaattttaggcatttgcctaaaaaaatatccctaataataataataatcataatgcctttctttttccaccattttttgaattattttaggatttcatactttccttgttttgagctcatccaatcactgcctgggcatattctttttgctttttgaattgaattcgattgtttttctgtttttatagtcatggccatttaaataaaattaagagagcaaagcgaataatcaaagcaaaataaatgatgagatacgaagcacaaataacgaatgggtggtggtaattccgcgcacggccttttgcctttggtgccgccccccccccctttggcccttttcgatgcttaaaattcgttaaaaggcaattatttttctttcttttttctctccgtgcgcacttttcttaattcccggcattttacacattcaaatagtgaatgaatttgcttcttctctttcttctgttaaactgca

SEQ ID NO: 21821 - DNA, 2325 bp, Heterodera glycines
  unsure (1)..(2325): unsure at all n locations
tcaacactgatagcactttattagagtcgagaccggtgatcttttttccttttaatttattttatatgataataagatttttaaaccaaaaatccccattaaaatcaatcatccttggcataatttatagacgtattgaacccaatgttatnttctttgaataaaaattcaattttttgactaaatcatgaaaatttacaaaaaaaaagaaaaataaataaaaatttaccagaaattcataaatttttggtgaaaatatgttacaaaatagaccttaaatttcaaaattcacccggcgctgcctaacggcaccgccggccccccaaaactcctattttttcttaaaaaaatttggcccaaaatcgaaaaaatctatcattttttggacaaaatctgttaacaggcccatccaaattttcaaaatttttcacggcgcctatcggcaccgccgaacccatttctcctaaacgtctttagaaaaagagcgccgcaaaaaaaagaccaaaaaaagatttatacagattttcgctgaaaataggccattttaaatgccttaggttgtgtttttaattaatactatacaaaatatttatgataaaaaaaaataataataagcacataaaattattattacgaaatttaaatatttttaagcaaaaatttataaagttttttgactatttggcataaggcaaaaattgaaaaaccccgaccccgaccccgaaccccgaacgatttggcaaccccgaccccgacacttccaaccccgaaccccgaattttcaaaccccgacgtcggggacgcaaccctaatttgaaattaaaaattcttgccaagaaaatgaatttttgagaaatttgttttattttcttaggagtgtatttttgaaaaattttgggaagattttctggactgtgggaggcctgaaacgcacgaaaaacatgtttttagcttgattagaagcttctatggtgcatttctacatccatatttttccatatcgcaatttatgtccatatttccgaaaaagacatttttagcaaaattttgtcgaaaaaattaattaaatttaaattttcttaaaattggttaatttatgtcaaaaataaactaaacatggaaaatttcggttttttggttggttttctctaaaaattgttttttttctcctaaaacgagtcttataccgtattcagccatttaaaatgtattttactagattttaatgaatttgaagaaatttttgaaaatttacccataaattcggaaaatttatgttcatatttttgccattttatgtccatatttagcgatttttggttcatattttgggaacgggacaaaatctcgcagcagaaatttcaaaaaaatttttttttaacttaaaaatttttcaaggaaaaaattcatagaaaatttttaataaaaaatttaaagaaaaaaatttctgaaattttttagcaatttttttttgaaattttatgatgattactgtttttcgaaaaattttcaaataaaattaataaataatttttttttgaaaatataaaattttctaagaattttttccatcatttttttttgaagcgaatatttgataaatttttatttgaaaaaagtgcattttaattcattttcgtgagtgtaaaatgccccaaaatttcactgaaaatctgttaaaaaatggtcaaaatttatttaccgaaattgagaggattttcttcataaaatacatttgatcactgatttgaattatgatcggttggtcattcttaatattaattcatttcttctgcatctgatcattgattttgttgttttgcacatcactcattttgtcagcagaagacggcccttttgtgatgctttgtccggattcttctgcgaatggtggcggagacaatggccttaattaagcgaaatttgaattatttaaacaaaattaaatgccttttttaattgctcacccaatgcaatcattggcattaaaaaaccaaatggacacattgttacaattgttgtcccaattatcatctttcttttgctgctgcttctcctttttctccccaataattttgcatcgtttcattatccaactgttgtccaattcattttcatttgctttggtcattgtcagcttttcctttgtccattcgttaagaaattcaaatggcaccatttgcattgacggcgcatgaacagaaaaatgggtaattgtttagatggtagcacaccttttttgacaaaattttttataagttttaaaatttgtaataacatgtcttatcggattttcggggtcgctgatcacgaatataacatcct

SEQ ID NO: 21822 - DNA, 2135 bp, Heterodera glycines
agttgtgtttcttcaggacacgaatttgcgaactccttccgacatttgagacggatgtttttgaattcaatttggaactcctaatgaccaatttagatcaattaattaattatttgatttgcgtctctcatcatttgcccacctgctcaaaatgcgatgcagaatttgtggacggattgaaaatcaatagaacaacaatgggaatcaaaagaaaattgagcaaattgcaaagaccacccattgaataaatgattagaaatggacaattattggtcaatttgctaaaagggagtgtatccggctaatgtgtggaaattggaaatgaaagcaaatggaataattaatgggagatcgatcgcagtgaaatgattcgtcggaataattaaaaataattgttttttttttgtgtatttaaccaaatccaggaaattaatttaaaacataggaatgagtatagaaaattatcaaaaagcatcatttactcaaaaatttaacaaataaaaaagtgaagaaaacaaatcaaagagtaaaaaaacatcgaaaaataaagaaataaaaaagaaagaaacattacgaacaaagaaaaaaggaaaaaacagcatctgaatggacaacaaagctgataaaaataatttcaacaataaggtatcaaagaccaaaaaacaattttaaaaaatttttaaaaagaaggagaagaaagagttcgatgctgaaatgtcgatccactaaaagtgccgaattcgtctccgaattggtctttcggcatttatcgtcctcataattagggatgcaatttttagatgccaaaaactgccaaaatagttaggttttacattctaaaaaaaccccaaaataggtgctaaaaatgggaaaataggtgctgaaaattccgaatttttaagggtggaaaatcgaaaattttcttcaaaaaaaaatattatgccaaatcattaatgagatacataaacaattctcgtcaagaaaaatatatatataaaagagatgttttgagaaatttttaatttcttaggggtgtatttaaaaattttgggtcgattcttatgggtgtatttttcgtcgtgccaggtgatttcgacagtaaactatttcgctttttttcactgtctgcgtgtgatttcgacaacgagtgaattcgacaataagtgagttcgacagtatcaaaaaaattgtgaattcgacagagattgattttgacagtaccgaaaaattaaaaaaacacgagtatattcaaaattggagcctaaaaatgaagtgatacagtaatggaaaaaggtcttgactcaggatgtttaaaaattgtaaaatttcaaattttgagtgaaaatttagcgcaccagaatatttcaatccactttatcattctcgtgaataagtcgcctgatcagactttgctcaaaaaaggggcggaaaaaagtcttgactcacacatgcaaaaccaccttatagttcatttacatgcttgcttatcttttggtcctcaacaaaaaattctcttacataaatttgatcagatcactccttcatggtgtcggaaccacaaactacgttaaaaatctttgaaattttcgaaaaaatttcctagggggttgggaaaatttcaatggaattatacttggttgaaaaatggtaaagattataaaggaaagatcagggagagcagaaacacgacccacagccctcgtcgaagatttttaaatcgtgatcctttgatttatattcgagcgtgctcatcagggatggaattcagaggcaccaaaaatttttcggaagtcggaaatcggaattccgaggtccaaaattttttcggaagtcggaattccgaccccaaaaatgtcggaagtcggaactcggaagtcggaatttttcaaaaattttaaatataataaaatttttaaatgttttattagctttaaattttaaaattcttaaccatgtaaaaggtgatttccatactgtttttattatatttctagatttatttgaaaattttttcaatgatttccatcaaaatattttatgtaattttacattattttggatttttttttgggacagttacacccttttttgcggcacgctttatccaaagaaaatttggggaactgggtggaggg

SEQ ID NO: 21823 - DNA, 1806 bp, Heterodera glycines
  unsure (1)..(1806): unsure at all n locations
aaaacaaaaataaatcgatttttcaagtgtcgtntggggtactcaacnanttatggggagcaaaaatccaacgcagaataaagtacaggctatagtgagctatccggaaggattcggtctccccataaatctgggcgcatcggttcagggggactgccccgaaaacccaaaaaaaaaattttttggataaaaattatttaaatgaactgactagataatatttaaaataggttatttctcttcctttcagtatccctgcaaagtttggtgcgcttctgatcagtttctgaaaaaaaagttaagcctaaactttttggcctgtttaaaaaggaattaaaaatttttaaaaattttattcatctccctttttgatagaaaaagcatcagagtgcctaaactaacatgtaaataaaatttggtgcgtttcagaaccctttctgaaaaaatatttaagaattaattttgcaaaaaataaataaaaacgaaagactcagattttcgaaaaattttttagagcaagctagctcggcgctcatttcagtgtaagttagtcctttaccggggagtatccctgcaaagtttggtatgcttctgctcaattagcaaaaaatatgagtgatcaaactttcactaaaaagttaagcctaaattttttggcatatttaaaaagcaattaaaaaatttttaaaattttattcacctccattattgatagaaaaagcatcagagagccttattaacttgtaaataaaatttggtgcgtttcagaaccctttctgaaaaaatatttatgaattaattttgcaaaaaataaataaaaacgaaagactcagattttcgaaaattttttttgagccagctagctcggcgctcatttcagtgtaagttagtcctttaccggggagtatccctgcatagtttggtacgcttctgctcaattagcaaaaaatatgagtgatcgaattttcactaaaaaagttaagcctacattttttggcatatttaaaaagcaattaaaaaattttaaaatttaataattttcctgcaccgaaggtactcactcggcctcttcgcggcctcgtggtgggccttcgccccccccctcccacgcccttcagagcacgacaaatatttcaacaaaaattttgaaatcatgtttcccactcccttctcccaggggtattattttgtaaagtctttttttccccaataaacttgtcaaaccccatttttcgcaccgtgaatgttatttttattgaattctgaaccgttttgagtagattagactataaaaaattgaaaattttgaaatcatgtttcccactcccttctcccaggggtattattttgtaaagtctttttttcaaaataaacttttcaaaccccttttttcgcaccgtgaatggtatttttattgaattctgaaccggtttgagtagattaaactagaaaaaattgaaaattttgaaatcatgtttcccactcccttctcccaggggtattattttgtaaagtctttttttccccaataaacttgtcaaaccccatttttcgcaccgtgaatgttatttttattgaattctgaaccgttttgagtagattagactagaaaaaattgaaaattttgaaatcatgtttcccactcccttctcccaggggtattattttgtaaagtctttttttccccaataaacttttcaaaccccatttttcgcaccgtgaatgttatttttattgaattctgaaccgttttgagtagattagactagaaaaaattgaaaattttgaaatcatgtttcccactcc

SEQ ID NO: 21824 - DNA, 1953 bp, Heterodera glycines
  unsure (1)..(1953): unsure at all n locations
tttaatcctcgattatttccaaatcaatnnttcatcaattcttcatcatcttcatcaggttctgtcgatggtgccaaagtcaaacgaccccaaatttcctnttataagcaaaaatttttttgccatttcaccactcagactaaaataaaaaaggctggttttagggattaataggcgcaacaatttgtatggattttcatttaaaaaaaatgataaaaatgtgtcaattaaaataaaactatgagtaaccatattttggtcaaggagactagccactaggcaatccgccccaattgtcgtcgttacttttaaagaatatattaatatatttttaaaattttttccttttaactccaattttcttcactaatttttcactcagacccccattcttaccagtgcttgtttttcccggttgccctaccgggaccgggacctgagcttttcaaaatccgggacctcggaggaccgggaattcccggcccattcccggcccgctcaactctaatttttaaaaaatgcaaactttggccccaatacggaaaaataccaccgaattttatggagagcttaagttttaaattttataataaatttaatttggcgttatgttgttaataatatatttttttgtttgtttttcttatcctccgttccttattttgatgtttttttgtacacctctaccatttgataatcatcattttagggtattcttttaacatcaattttggattccaacaataaaatgattggggaagagcttacggatgttgacaaggttttgccaagacaaaatttcattaattttccaattccattttcaaatttttaggctcgcattgcgtcagacattctgcttcagtcgccgccgggcgagttcaacgaggtgttcaacgacgtgcgcactttgttgcagaacgacgcacttttggaaaagggcgtctgtctggaggcggtccggcgctacaacaaggcacagtttgtgccggtcaaccccgagccgggcgctgaacacccggcacgttttaggccgaataaaaggggggagggacggccaaaccggtgaaaacacgaaaaaattaatataaaattgaaatttcaatgtttttgccgactatcactttttaaaaatgccaactaatattaataattggttttttttggcagactttgatcaccgaacacaacgaattgccggacggacgtttcgtggacccaaaaacgggccgtgttttcaaatacgaccatttgcgaaaggaggcggccgatgcgcagccgtcggggcccaaggaaattgacgaaaaattggagccatggcgaaaggcactgcaaaaagtttgctttttggtactttctccaatttaggacactttttgacgaattttagtattatttaatgagaaaaaattgcggaaaatccaacgcgaatgatttgtccagttcatccacaatcaatctcaattgtgctttttgaggagttggacgagtacatttacgagcatttccatctgaccggcgtcgccactgttttcacgccgttgcagcaccaaaaagagccgaaactcattctatgcattgagtcccatcagttccagccaaaaaactattggtttgcatcaatgtaaaatatctgttgaattttcaaattgctttaggaacggtcgttggcgttccgaatggcattttcccaactttgacggctcttcaaaaacggcggggactctccaaaaatgcacgggcaaattgcgtttgcaggtgcactattatgaagacggaaatgtgcagctgatttcggagaaagaggcgacggtggaagtgaaaatgacggtgagtcacagcacaaaacgatggatcaaatgaaataatgggtaaaacaaaccgcaaaaattggggggaggggaagcagggtctaattagcgttttaattgggtcaaagccgagggcaatgaa

SEQ ID NO: 21825 - DNA, 1317 bp, Heterodera glycines
  unsure (1)..(1317): unsure at all n locations
catgtcaaagaaagaaagtaattctttaaagnaaacaaaaacactttttaaaaattatttaagtgatgtggagatggtactgtatttattagagctcgacaatttgaaaaaacctggacttgagctggattcaatgttggacctgattttcatgcacaaaaatgcaggtccaggaaaaatccaggcttggacctggattttttttaatcttaaagcaaaccacatgtttgaaaaaaataaattaattgcttaataggaacatctaaaagtatctaatagacaataaaatgcgtttacccagcaaaagccaggcctggaccaagtccatgtcgagttttagtttttatgtaatttacaatttctgctcaaatcactttaaaagcacttttattgtatgagcataatttcgttttgcttttataaattttgggttttttgggtacggtgccaaaagtgatcagaaaaaaaaccgataaggggtcaatttttcatttatacaaaaatatttaaaatgatagtggacaaaaagagttttaaaagtaacatattatgccgaatactgcttttggaagtgacagttcagaatgttcccttgtaagtggtcaaacgatgatgcactcgctctagaccgtgtgtccaaaaccctaaacctaacagggctgggcgtaactggattttaattatggaaaatcgtaacccgtaattacgtagttttttaaataacggaaatacaatactcgttattatgggaggaggggggtcgaaaagtgccgtaattagggaatctcggaccatcaaaaccaaagacatttcccactctcgattcgcgtatcaccacaaatacacctaaataggaaaacagttcgatttacctcattttgattaaccagtgcttcgacctccttcctgttgtggtagcaaccagaaaaatcatacaaatatcgttgaacttttttggtgccattggcatatacagacagtaacaccaaactttcggcaattaatctcagcctcacaataatccgggaagaacggcacagttttaacgcatttgctctaaatttggaaagaatttgcaaaagtgagtgtcatcgttttaggttccaaaacctaaagcccaaaaaatgaaccgtattttgtattttgtttggtgccaaaacataaaaaaatgcctaaaaagcgaaccgttttttttgcaaattatcaatcaaacaattttaatatttttagataattgtcgttctgtatgtcgatttggccaaaaatattttcgtatcttgtttatccaaaatatatacccaattcctatggcaatat

SEQ ID NO: 21826 - DNA, 997 bp, Heterodera glycines
aaaaatagaatagatttaaaaatttgaataaaatacccgtcgttgaacgggtggtcgtacatgagcacgtcctccgcccccgttgctgtcgattggtgccggggctgtccttgctggtgcccagcggcaatgccatcatcgaagacggccatttcataagccaaaaaatataataataataataataatctactttaaaaatttaaataaaaaatgctagacaaaatagaagaattttaaaaaacaactgatcagagatggcgcgggaattccgacccgaattttgggctaaatttcaaaacaattcagatttttttttaattaaaaaaaacatttcgccattcaaaaatgttaaaaaatggatgaaaatctgttaaaggcgtgccttaattttggagttgcattggaccgagaattttagaaatacccggaccgggactgccgggacaggaaagccgtggcgggacttggattctcaacaggggaccgggaccaatcgggaatttaaaaaataaataaataatattcaaaaaatttaaagttatttttttaattaatcctaatgactagggctgcaaaaaatatgggatataaaatcgcgaaatatggtcataaatatgggacaaaacaaattgcgaatatggacataaaatggcaaaaatatggatttgtgcaaattgagtgtataatttttcaaactttcttcaaattcgctaaatataaagtaaaactttcaaaaatggctaaatttggtatttaaattcactttgaagaaaaaaaacacgataaagccgaaatttattaattttaaacaaaaaccaacctgaaaagcgaaattttcgctttttgtttatttctgacataaaacctaaaaattttagacaaaatatgaataaaatatcgaaatatggacatcctaaatcgcaaaatatggaaaaatatggaaatattgatatagaaacccattctaaaagcttctgaccaagctaaaaactaa

SEQ ID NO: 21827 - DNA, 1369 bp, Heterodera glycines
  unsure (1)..(1369): unsure at all n locations
ttgtttatgttctgaacatagtccgctctcttcttttgctcgaaatatatgactggaaaaagtgagtttgcctttttatgtattaaaatttatttcccgttcacacgaccgttattttattttattttttttgcaattgataaaaaacaataattttcccagtgtcttattggggtgcactacgtttccgctctccccgctggttccgcccggacaaaaaatcgctgaaaaattattctttaaaattttctaataaacaaattaattgtaagattttttctttaaaaatttcttagttagtaagttttttaagattaagaagaaaccattttttccaaatatcttctttaatttttggtaaatcctaagctgactagcatcacaaattgttttattttaatgaataaaactaatttcttaaaatggtaattatgacttttcgttcagattctcccgtgaattcatttgcgttctgttggccagccttttgtctttctcactgaccgtccctcttttgtccgcccttccttttgtctccgaactttgtcaaatttccatcggcacttttttctgtttgcttttatcattcttcgcaattgttatttatgccgttgatcgacgcaacccaattttggattctcgaactggcaattccttttggttcgatgagctttccctcgtcgtttgtgtccatttcctcttcttaattttcctctctttggtggttaatccttcgaacattgtcagcgagggactccatcagccgtttagcacttgcaaagttacatttttattttttaattcgatcattaaaccttttttcagtctgatggtcagaatttgtgcaaatttcgcaattctttgtttgactttcattgtttgcccggcggaagaatcgaagattccgaaagtggttttgaatggtatgccatctgtgggactccatttcaaaaccggaccgaattttcagttgttttaaggtaaccaaatttaactatgcgcttttgagtcaataatgatttatttgcctttagcgtgttttgctttttggcttctctgctcctttaccaagcggccgctgcctcgggaaaaacgccacacttttaccgagtggtttatggccgttcagaaaagaagaaaaagaccaaatgattcatcaaatcatgcacnatatttttgatctcgttaaccaattggatatcattttctccaaataaattattcctcggcagaccttttttttgctgttttngtatgtttttagtgatgtttcgtaattatttcccgtaatttatgtattaatagcattttttanagtgtcgttttagagtcattcattttattnccgacatgnacccaaaggcgatgc

SEQ ID NO: 21828 - DNA, 978 bp, Heterodera glycines
tactgcggtctaaacacgtttttggtagaatgcggccagaatttaaaaatacagtttgctatgcttcgcatcacccgcttcaacgggtgctcagtgtaaatatagactggccattcaaattctgcctttccagccttatggaaagatattatggaacttttggttccatctcagttgtcaacgccgcgactgcatcgttattatatcagtcgatagaattttcgaatcgcttttaaatcgtctcttttgcgtcccttaatcttcactctgagccgagttactgcggtctaaacacgtttttggtagaattgcggccagaatttaaaaatacagtttgctatggcttcgcatcacccgcttcaacgggtgctcagtgtaaatatcgactggccattcaaattctgcctttccagccttatggaaagatattatggaacttttggttccatctcagttgtcaacgccgcgactgcatcgttattatatcagtcgatagaattttcgaatcgcttttaaatcgtctcttttgcgtcccttaatcttcactctgagccgagttactgcggtctaaacacgtttttggtagaattgcggccagaatttaaaaatacagtttgctatggcttcgcatcacccgcttcaacgggtgctcagtgtaaatatcgactggccattcaaattctgcctttccagccttatggaaagatattatggaacttttggttccatctcagttgtcaacgccgcgactgcatcgttattatatcagtcgatagaattttcgaatcgcttttaaatcgtctcttttgcgtcccttaatcttcactctgagccgagttactgcggtctaaacacgtttttggtagaattgcggccagaatttaaaaatacagtttgctatggcttcgcatcacccgcttcaacgggtgctcagtgtaaatatcgactggccattcaaattctgcctttccagcctta

SEQ ID NO: 21829 - DNA, 1378 bp, Heterodera glycines
ttcagattccaccaattacttcctcttctctttggcccttgccgatctgctagtttgtgccgtggtgatgcctttctccattttggttgagcttggcaatggtttggctgcgcttttgcacaaatgtctcaaatttcgaattgcttttcccccaggggttttgccgtggacattccgctgggacttcttctcttgtctcgtgtacacttatgccgatgtgttcctctgctcttgctccatcgtccacatgactgtgatctctttcgacagatatttgggtaaattctcaaaattatatttttttaaatgttggcatttgccgtctttcaaaagttccaataaattttcaggcgtttctcaacccctcaaacggcacaacaaacgcaagcgaattgttttgatgaagatttttgttgcttgggttctgtccaccataatctcttcaccgttggccattctctcttttgtggaacagcagaatattttgatggtccgtttaattcccaaattcatacggtatccatccaattgtatacggtactttccctgttcaggaaaatcgttgcggtattcgttctcgctttttcatgctctatggttctggtggggtcgttttttgctttaaatttttgaattcgctcccaattttgcacttttctcagtgttttcctttctcatccctttggccattatggcaattaccaccagccgaacggcccatttactgcagcgtcaggctcttctgttgagctccggcaattccttcggcggattgcgccgaattatggcaccgcagcgcaaaatgggcggacaggcgccgatgatgttcatcgccaacttcagcggggggtttgccaacagcagcacggggaggagcagcaatactacgacgacgacgaacagcaggtggccaaatgggacagaaggacaagccgaacaaagaatggcacgggagaggggggggggagggctaatgacccctcatttgtcagtgattagcgagcggagagtcttttaattgaaacaatttccaattttcagtggcagcagaagccggccactcccaaagccgatgaattgtaatctttcctttagtttatcgccttttaaattgaaagtgatcagctgatctgatcagtttaaacaattgacaaaggtcactcccatcgtttgtccctttgcgccgcttcacccctgcggcggatgcaaagccaaagtgccgcaaactctcccgcaacgatctcccgaatgggggaaaagcaatgtgccattgttcagcaacaaagaagcgatttgaactcaccgatcatcaaaattttgccagtcgcaaccgataggaagagagaaaagaggcacaaataatttaaaaaaagcggaa

SEQ ID NO: 21830 - DNA, 967 bp, Heterodera glycines
gggcaaatttgacgtcccaaaaacccccccaacaattcccaatactgaaattatttaaattaagaataaatcaggcattaatttcattttccatcaactttgcagaggataattaaaatttttgcgtaatttttaaatgaaaaatgggcaaaattgaaacgccaaaatccgaattcctattctcgcttttatgtctgcggttaatatggcaatttcccgattattaatttttctttttttcttaccacggtgttttgtacacgtcatggggtgggtaacggctgtgcgggatatggtaagtgccgccgagcacctcactgtatttgtagtgaggtgaatgccaacgctgttgaaagcttagtccatgttgattgaacaatgcacgcaatggcagctgatcacgatgtacagtatagaaggacatttttcggcgaaaggaaagtaaatatgtgttactgtgggaatgtaggttactgtatggaaaagaatttgcggattgcaactaatttttaatataaactttgttaattattttattagtctttcattggaatgcaaatcgtacagatttcgtgtgaccacaattacaaaatataattgaaggaaaccttctgctgattaagttaaaaattttaggctaaaaaaccgtgcatttcctttgtttaaatttgatgcacttttttacttgttaattcagtcaaacagaaaaaccgaggcataatttatgatatccgccttcagtactgaaaggtggggggaataaaaattttgaaatttagcattatttgataaaggatttaacaccgtaatgaagttttgagggatattgtgcaaaaattttgaaaattcaatctacggaataggtctccaactttgccgataagaattttttttaaaaaaaaagtcaaagaaaatctaataaagtgatcggaatccaactgaaatgttctcatattgatcagaaata

SEQ ID NO: 21831 - DNA, 581 bp, Heterodera glycines
tcggtttccatctgcgtaacgcatcggacactgcgcgaacatttgccgcattgcctagggcgccaattttgattgcatcaacggcacaattttcctcgtctgccaacagtgtgttcagttgttgttcaagaaaatcagaatgcggaacatgtactgcttgaacacctgactggaaaatttctcaaactaggggcaccttgcttaataatctattacaattaatcgtaaaaatgaaaaaccaattaaaagtcacctgaggactttgtgccgttagcattgtgatcactgccataccgtcggcacccaaggccgtgaaagttttaagatcagtttgaatgccggcaccgcctgacggatcggagccagcaatactcagcacagcagcacgatgagaggacattaaaaatctgataaatttccatgctggattaaaaaagagttttcttgcaatagagaaagtattccttcgacgagattctcgattaaaaacaaaattaaaagtgaattctattttaattgtctaatttgtggctcattagaaagaacaataatgccacattttttttattgttaattattag

SEQ ID NO: 21832 - DNA, 1537 bp, Heterodera glycines
gggctgggttaaaggaacgacccatgcgattcttaatgggaccgcattcgatccccagcgaatcgaataagcctttgatttttgaccggtccatctctgcccgctttgctggtgaactgtcgttgtgttctggcatgccaataatgacgacacttctctgtttttccaattcctccgctgaaattggcatgccttcagtggagagagcagtggagcggagttggaaatcgatccattaagcaggtcaatttgagaggacaaagtggtaattagggtattaaaaattggcatttggtcggaggtaaaagaggtctggagttgtttcaatgcttccactgtagtcttgacaaaagtcatttgcgagtcaattaactggtggataccatttttttgggaaattggagaatattcggtttcggggcagggtctttttgtcattgaatatttaaggcaaattgaatatttaaggcgaatgaatatttaaggcgaatgaatatttaaggcgaatgaatatttaaggcgaatgaatatttaaggcgaatgaatatttaaggggcaacttttttttcatctttccattgaaaatttgaaaataattacagtggagaaaaagcagaagaaaatgccaaaaattttggctttattatcgcgaattaaaatctcaggaaaaaagaaaaagacatgaacaaagttggcacacaataagcatttttaatttgctaatattattaattaacattcgtaaatgcagttaaattgaaattttaaaatttaaaaaatttgcaatttctacctattttcaaagaattaataatgtttcgtcgtttttttttaataatttttcaattaatccattccaaaatgtaaaggaatttaattttctgtacatttacaaattgtgcatttatcttttgagaacacattcataaaaatgaatattttaattttttaggtcatcgttttgccgtatgaagttttgttaaccccataaatttttgtgaacaaatccgcaacagaatgctcatttattctctgccatttattcaataaaatttttttttcatttttatctattacaaaaatcactgaattcagagcccaacgttaactttaaaataagagttaatatttcttaaatttcaccagtacttttgggtaaaattcgtcataagcctaagtttaaaataggaatgggaatttaagtcaaatgattttttttctgctggttcaaaatacctttaaaatgaattaaaaagcattttaattttatttgaaacttctgaaaagcatggcttttttctattttggcatttatattacatttttgcatttttatattttttcatatttgaaacaaagtgctgaataatcgagtcactggaaaaaaaagttatttaacttaataaatttccatccctattatcattccacaaattgaaaaaaaagcactgttaattactaagaccgggcccggttaattgtcgcttcggtccgggtagagaatattgattatttatttgaatttacgcgccataca

SEQ ID NO: 21833 - DNA, 1686 bp, Heterodera glycines
  unsure (1)..(1686): unsure at all n locations
ttttttttgaacccaattactaaatttgncgctaaatgcacatttacgcgatagtgacaaagctgtcaccnatgagggcgcttaaatttttataagttntataatatattcatntaattacaatgtttaaaagaatctgtggaacgaatatgcgcggatcaaagggtggaggaatttggcgaaacggaaacattttttaaagtatcaatttcgtgaatgaactttttgctgtgcttcgcgctactttaaatacacaaattagtctgccctctgccgcgctctttgccgcgcggacttttactcataaaaaatgctttttttggtaaacaggcgggcccggggatccttccaagaccataaaaaatttttggacgaaattttgtgcgcaaaagacagatcaacgaacgatcataaaaatttaagccggcccaatttagcctgataatagaagggcacaaatctgatgtttgattcgtcgaattaaaaatatatttagaaagcctaaatttggattttctttaaatttcaaaaattttaatctttgaacccaataaaaaaagtaaatttctaaatttaattttagttagatcaaattggtctttgatcatttatgaaagagcatttaaaatggtatttaaggatgtctttttcctcaaataaatgcacaaaagaattaataaatatattctaaatttccttacttcacccttaaaatttaatttgctcttattttaatgatgcggccacgttccaaatccctttcaaatataaattttgaaattactcaaacaccaatctgccgtttttatctacgctttatggatgcgttatatggtagaaggcgtttatcaactcctcatagaaattttttcccaacaaaaatgaacataggtctttctcagcacttttttcattttaaaatatatttttaaaattttagaagcaaaacatgatcggatttttttgaagcgaaaaaagaacaatcgttgggtgaagattcgacgggtatatccagtattcatcttggcgttaatattatttaaataatttagtcgtcacgtctgctggataaaagaaataatattgataataaaatgaaaatcttttccaattaattaattaattattttttgttttttttggaaaagatgaaaaatgttgattaaattgtatttgtaaaaatttattcgcagataaaataacaaatttaaataattgtagcttacactttgaaggcaatatcaactaaaatgaatggtcaaataattaatccataatattcaaaaagagtacaaatcacatggataggataaacaaattagtttgaattttttcatcatttcatcaatttaaaaataagtacgatttgttgtatcggtggtataatggttagtgtgttttgtttaggacataggagttcaatgctgcgcgaagtagtgcaattaaagcaaattaaggaaaaggaaaaatggccaacaccgaaacaaatggtcgacactaggacaaatggtcgacactagggcaaatggtctaggacaaatggtcgacaactcgggggacgaattgggcgtaggctatttgagcgccaactggcgctcaaatggccggctgagcgctgggactgaaatgtcccggcgctcagatggccccagttacctgaccttacactacttatataatatatat

SEQ ID NO: 21834 - DNA, 1451 bp, Heterodera glycines
ctaatatgagaaaaaaatttacaaaagcctaagcttaggcttagtctaaccataagccattgttcgagttttaacaacgaaatttttagttaaaaactttactgaatacctgacaaaaaaaatagtttttctcttagttattagtacaactattataccatgagaccagggatggcacggaattccgatttccgaaaatttttggggcctcggaatgccatccccgccatggacacaaaatgtcatgggacgcgtaaagtgttgttgggacgcgtaaaatgtgatgggacgcgtaaaatgtcatgggacgcgtaaaatgccatgggacgcgtaaaaccgactagaacccattttttttgacaacttggatttttgtccaaaaaaatgttaatattggttaattaaacaaagactctcaagagcatcggtaattgattttattgactgacccttcaatttctaaaatttttatcaggaaatttttttttattacgtttacacctttaaagagattcaatatgggtcaactccactagtgctgagtcgttataaaagccataaaaagggcgttataaagaaacacatcaaattaaaatttttaacaaaaaaattaccgtaattcttgatatcattcgtagcccggtacttttctgttttgtgacccccccccctgaaattttcaaataaaaagtcatttctagggtaatttgtgccgatgatcacgaatatgacgtttatttttcaaaattccgaacccgaattcgaaaaaaatcgaaattcgtaaattacagggaaaatatatttttaggggtttttgaggtcgctgaaaacggatatgacatccattctaggactaattactaaactgatccactattgttgtaaactgaatactattatgtatgctaagataatctaatattttgacatcaaaatgaattaactaataaagactcgcacaaatccctactttcacgaaagaagtcacttttgcatagaggttcaagaataccgtcagtgcgtcagaattgatgaaagttgaattgcataattgtccgttagtttcatccatcgttttcttcatttcagcgtaattaacaaattcgcttataatacgtttatcggatcccttctccgccaaaatcgttattttttctgccgatttagtgcttatgtaattttcttttaaaaaattattgttgtgtatgtttttgtagaaattccattcgagattgccttctttgtcagtcaaaagagaatactgttttgggccgtcttaaacaacaaagcacaattaattttttataaaatttaccctattatatgatctttcaattttaatgctacattataataaacattttaaataaatataatcctcaccaaaggggccaactgcaaaaataaatttatactggccactcggataaatgacataatctgctttctcc

SEQ ID NO: 21835 - DNA, 867 bp, Heterodera glycines
tgccagtttttagcacctaaaaatatcattcctagttataagtagagaccgacttttgaggcatatgccttttttttctgcgcactagttacggtatattaagcataaagaacacattttccacttgctttgtggcttctaagttgacttttattatgcctttttttcctttttcgggattttcgtgccctaaatgccttttttggcattttgcagttttgttgccttttttagtgttttttttccggaaaattcaattaaaaatgcaataaaatcggaaaaatatacctctaaaaaatgacgaaaaaatttcagaaaaacatctctaagaattgaaaaattttctcaaaaattgatcaccaaaatttattattttttttcttgataaaaaattttatattaaaaaatttcttattcgaaaaatactataaatatttaataattatttaaatggctaaaattaagttttttgaataagttttacgtgttttactccctaaaatacttaataaaaaatttttaaatgccttttttcatgactttttcgggattttcgtgctttttcatgccttttttcaattttttggtgcatattataggtacctttttcgcgatttttggtgcctttttagtcggtctctagttacaagttgtatgcactaaaaaaatgcctaattgcgcatataatattcactaaaaatcccctaaatatgccttaaaaatccagaaaattcctaaaatatgcaataaaatatgccttaaaaattaccccaaatggcttttaaccctcaaaaaatgccaaaattgtgtaaaaatacagaatttactttaaaacatcaaaacaatggctaaggagcgtattttaga

SEQ ID NO: 21836 - DNA, 508 bp, Heterodera glycines
ggtactagtgcagttggtacgccacaaaaaattgttttaagtcctataaaaaaagtttcagggttttcgagggcgctgattatgaatacgacctctatttcgaccaattcagagtcccggactcaaattcgaacatttggtcgaaaagtcaaaaattctcaaaaatcttttttaccaaataaatatgatcaacaatacatatgtcaacaatataggcaattaattttcgcatggacaaattttttttacgttgatctgattaaaagcacagctattccactgatatggaccatataaaaaatttcactgcttaaaaacttctgaggaccattcgaatgccacccatcaggatgagccaaatcccaatagtcgatcaacggaaccacttgctgctgactaggttcggcccccagggctctattatagggacccacccgtttcggcgctcgcgtttcggcgccaaaaaaaattataaaagtttaaatacttggttaaaatctacaaaaaa

SEQ ID NO: 21837 - DNA, 1753 bp, Heterodera glycines
tctgtcgtcccataaatccgatttgcaacattagcaattactttggcaatttgattgggccgattatttgcttgttgagaattaagtgtaagaaagacaattgcaacaatcgcccatgggttaaggtcactgctgaaggctagtacagtgatacaaagaatagcaagagcgattaataaagcgtgaattgtcgaagagtcaattggcgttatggcacgtcgtcgacggctgaatttatcattgccaagagaaaccgctttcttttctgtcacttttttttgtctatctgacgaagccgtgtgcttttggttttttggaattgcttgatttttagctgccttcgttggagcctttgttttttgtgccatcggtgtgttaagtttcgtccgtagcttaggtgaagattgcttttcctgagttgatttaacagatttttaggaaaaatgcaagtttttcgctcatttttgaatatcgaaaggaattagtggttctgggatgccgataaggccggaggaaaaattttgaaacgaattttcctcccatttttttatttgcttaaatttcgtcaaaaagtttcttcattattgttgttgagcccatttttagtatgtttcatgcccgtccacggtaggaatggggtgcggggatccccgtttcctgggataggaaaaacggggaacggggatgaaaatccttccccccccgtccccacacatcctcactcattagaattacctctggattagtttgagtagctttgtcttggtctgatttgcgaactctttgcaaaaaatgtgtccaaagccccatcattaagcccactaattgacttggcattacagtactaccgttgtttgccaccgtactcttgccggttacttttccaattgcttctttttccgtactttgctcaattctctcgtgaattagctttagcacttccatcgcttgcccatatatttgtaaccttacagactttccttgctcatttgcctttggaaatatttgtgccaaaccgtccatcccgccaattccaactttcgccgccgtatcctctttatttttcatcgttttaaatgttttatccaattcattgtccaattcctttaagccttcattttcgcttatttttccattgctgaagttcgtcataagatcagtgttgagtctttggatagtctttgcggatttctcatcgactttgaccagttgagattcaatttccagtaatgagtaaaccgttgttaatgtttcacttaaaaaatgaatattcaatttgaaaaaatccaaaaatcttttttcactaaattataatttgccgaagtaaatttttattccgacagtgccgtaaagtttttctgaattactcgatgccgcaccgaaaatcgactcgagtgccgatattcttgatcatccctactgcaattattccttaatagaattttatttgcatctacaaatgaccgaacatcacataaattctgtgttcagaaatgaattcaattaaatatccttttaaataaaatttggtgtcctttcggtcatgccggcttcaattatgctcgtgattagcattttgccaaaaaaccgcaaactctactagggcagccagattcttagttagcgctaaaactatcctagaattgtttttttttgttgtcagatttatgacaccttttggggtggggtgggcaataatcgaaaaggtgctagcgcgtttgttaaaaactgccactcatgcgcgtttgtaaaa

SEQ ID NO: 21838 - DNA, 539 bp, Heterodera glycines
  unsure (1)..(539): unsure at all n locations
caaaaaaagatgcctcagaatccccaatcacacagggattctgaggtcttaacgatgtcaaaagtaaaatctgatcccgtattcgtgatcagcggcccaaatggcgactaaagacatgtttttggaagatttttgccgcaaaatttttttcactcaaaaaccatgtgtacccccctcccccccccccccccgcccttcaaaattttgaaaaataaataaaataataggagactcgagaattttgaaaattttttataaaaactgatgacaagctaaggtgataaaacaggttatttctcttcctttcagtatccctgcaaagtttggtgcgcttctgatcagtttctgaaaaaaaagttaagcctaaactttttggcctgtttaaaaaggaattaaaaatttttaaaaattttattcatctccctttttgatagaaaaagcatcagagtgcctaaactaacgtgtaaataaaatttggtgcgtttcaganccctcttctaaaaaaatatttaagaattaatttgcaaaaaataaataaa

SEQ ID NO: 21839 - DNA, 2161 bp, Heterodera glycines
  unsure (1)..(2161): unsure at all n locations
gcaccaatgttaggtcatttttgtgccctccggctggtggcacgtggtcatcaatttggacatgacaattgnctgtcacacaaaactttgcttcggtcgtcaatttgccaaaagtttgtgtggcatacataacacattggttttaatcaccaaaaaaaaagaccgcttgtatgaaatatgacattggtacacggattgattcgtccttgtacccaggggcgcacttgggaactggcccaaaatgtcctttgaatcagtggccataattctcctgacaaatgaattgcacaaaaaaaaatacttggctttttgaggaattgaaaaaaaaaaatttttttttccgttttcatttatgtcctttttgcccaattgaaaggtttggccaaaaacggtgcgcacgcgtcgcgcgttggccgtccattggctgaaggcgttgaagcgcgagcggcccgaactgatggcaacaatttgcagcatcaatcgggagcgtggcttcaccatcccatgggacgacctcagcgaaccgtaaataatttttgcacatattttggcaattaggggattttataaattttgttttgacatcctaagattttttttttttgcattcatatttttcgcttcatggtaacgacacgggccaaatgaagcaacacaaaacttgaacattttgtgaaaattgagtttaagagggaaactttagtaaaattctataatataaaaactgtccaatttcgtttttgtgtcccttaaacttcgctcgaattgggtaaataatagcgtataatattaataattcagggaccaaaaaatggcattgcatttctttttacaaatattttttcggaaatctttttttcatttcttgtcagattcgactcttcgtccagctcttcatcgtcctcctcctcctcctcagatgaagcggatgaatggggggcggccaacacaaatgggaacagcggtggtagtgcaaaacaaattcagcagcagccgaggatgacgacgacgacgccacaaaaatatttgaattgtcacaatttgcacgcattttcgaatggaaatgggtgcagaaatggtatttctttaatttttttttcaatttgtttacattgtgcaccgtaaaattatcccgtgtatagactttataaaatagagaaacatttacaaatttgtcaggtgtgtcgtgttcgtcaacgcgagaaaagcggaaaaaatgctgggattattccgatgccatggcattccatcaacagcagcgtcaaccccagcaccaacactcaaagcggaatgggggcgaaccaacaacaataacaacaacaacaatgcatgttggagatggtggaggtggagaaattggcggcacaacaacaccgaaaaagttgggagcaatttgagttgttttttttgggggggggggggggcaaatcatgcaatttcaccacccggcggtttttcaaacaaatccaaattttaggcggtgtttttaaaaacacttataacctctgcgccgcgcggcgttggcaaatcgttgaacacaaaacaatggtgacggaaaatgcacacacaaacaaactcaatatatagattcgttttttgttttcttttctcataacatgcaaataaagagaattattgtagtagtaataataataataatatttacggtgttgattttgcggtatgcaaaaaatgaatttttcgagttttctgcaacgtaaaatatttatggccaccaaaaccggggtcacccaactcatccatccatacccaatcaatccatccatgtacaagaaatgccgcgatcgatcgctcctaagtaaattgccatgacaacgaccccacatagtgtgatcacgcgccgcaaacattggacaattatgcaccagagagtggtgacaagacgacgaagcattggaatgtttcaaatttcaacccccctgattccgaaacaattgaatcgccactttcgcaacaaatgttgattataagttacctacatatatataacaactgccttctttaaattatgtaagggcatagttcttcatttctttttcttgccgcaatcgctgattgggtccaacccaaatgatccggtgggggtcgattgggcgccgccgattgggcgacgccgtttgggcgccgccgattgggcgcg

SEQ ID NO: 21840 - DNA, 1107 bp, Heterodera glycines
aaatcatctaaatttaatttttgtttatgcggggtcaaattggttatgttttagaaattaatttatttgtttatgatttctttacaccaggcaaataaataaatgaacttcaatattggctggtccacgaatgtcaaatttaaatatttgtttgaattggcacttaccgcaaacgaaacgaaattagtgaatcccaaattggtcaatttgttgtccaacacaaagttactaagtgtcccaacgcaattctccgtcccatttttttgcgagataattctaaaagttgccgaacgaacgcagcagcgccaaagcgaatcttaatggagtattaattattgctgttaattagtactaattaacaattaattgttgttaatatatatattaactattagtaattttgcaccttttttcgaagtatcgcaacaaatgaaaatgcccaaccatttctcattgtcagtgcctccatttttcgtttttatttgtgccactattttccatggtaatccatttatgtacactttttcgctgtaccgactgctcccaacctcctctcgtgcaaattccgacactttttcaatgtccagcaaaagtgtgcccttttttcgatcagaaatccgtccattagtcgaaaatggcattgggaaaagtccgtcggaaatcccatgacaatttggaagggatttgaactgataaacggcgatcacttcatcttttgataaaacaccgaagggaactgtaaatatgtattaacttattgaaaaataaatttaaaaaaacatttttaaaaatcgccacaaaaacaatgaatagtttacggcatctcatcagagaacgagtttgaaattttgacttattttttaccaattttcctcgtaaattccacgtttgacaaaagcggaaagcgaattttgaacagtgccgggccaagcatttgacggcgattctctgctgaacaatcaatgccattttcacggcatttttcatcggcccaacggagtgcctttaaaaaaatttaatggaaataataaatgactaataaaattttagtttttaatttaaattgtaaaataccgcattcccaaatgaatttctcactgatttgca

SEQ ID NO: 21841 - DNA, 985 bp, Heterodera glycines
  unsure (1)..(985): unsure at all n locations
cgcagtgagaagganatagttgggataaatttgaaagaaattttccctcaaattttcaaaaaaaaaaattttttttttacaaattgcatctaaaaaacattccgggcagtttaatccaaaaactccaaagtttgtcttgaataattcgattgataaatgttttttttctcatggtaaaatcttatcttcggttataaatattacattttatctaaatatcccgaaaaatgcaaaaaataaaaaaactttttggcacgcccgcacaatcgccgctcggccctcgtcatgggccaaccgtcgcaccgccacctccgtcggaacaccaccatttcgattcggctcttctgtggttgtgcgtcttttggcggtgttcaaatggtcgcagttggcaccgtcgtcataaattgtgccatcaaaaactggtttcccattttttgccgtcgtcggcgccgtcctcgccagctgtgaccaagagtcactgaacgtcacccggccaatgcccgccttggcacagtgccggaccagcgaacggacaaatgcctaataataatattaaaaattatggcaaaaaatttctgaccgaaaattttagttttttcgacggctaaaatgggtgacttttttgtcataataagtgcacactcatcacgaatttgacacccattttgaccaatccctaatccgaactcgaacgaaagccggaaactcgaatgtcaattttttcttcaaatttaacggaaaagtggaagactttcattcattggtatcgcctccgagacctcgcgcacccaaatttctcatttttcaaaatccacaaaaatatcatttttggaatggtcgcacagggcgcccccctccccaattcaaaatcttgngactgactatctctctgcacaaacacacctcgttgatgtaccgtcggtcgtccaaatggaatgcaatgtngtggggcggtagtggcgcggagttcggcttcgtctttatt

SEQ ID NO: 21842 - DNA, 329 bp, Heterodera glycines
catagctcgcttcactccaaatcaaactgaccgaatttgatatctaaaaattgcttttgaatagaagaatcgtttccaagagaatgctaagcaatttatttcatatgaaaaaagttatgagcctttcaaatttttatcacgttataactcaagtcctaaactgctgatttcaaccaaaatgcgaaaacatcatttttctattgattctaaataatcaaagtaattttgtatccttctaacaaaactattagcatttgcgaatttatttatttttatatgttagagacatgaaaatagtacgccaaaaggagagaaaaagaaatgtaaaa

SEQ ID NO: 21843 - DNA, 1501 bp, Heterodera glycines
  unsure (1)..(1501): unsure at all n locations
cattttcgcttttattttttattcattttaatacatacaataagtacagaggcatacaaaactatacatataaatatattcattcggcaatgagaacaaatgagcataaaacattacataaacaggtcaaacatcattatgaaaaagccacaatatattggcatatttaaacagaacaacagccatttgtgggataaatacattcagcaagacaagcaagacaatgcaataggatatggccaaaatcgtgaacgttaaatgaaatgggtgacacaattagaagccagaatgatggctaataatcaaaatgagaagaaaaactgggaatgactttttgactcgaagatgcggccatgattgtataccggttgtgcaggtggatgttcatgatcacgagtttgtccgggatggccggactgacactgatcgttgttggcatgcacagccactgcacggaaggcagtcgaagtgagcacagactgaactgatcgaaagtgagcactgacaattgggggaagtgccaagggcaacaaaatggacacaatgccaaattaataaggccaatatggacaaatgaacaaataatatggacaaaatatatatgggtggtcaaatggcaccgatagtgtgaaagttaacgagacgaacggcacactgaattccttcttttctcatttcgataattggcacagataagcaaatgataaaaaagggtcgcaattttgtccaaaaagactcttttggaatgatgaaaatggacatcaacaaatgaaaatgattaaaaaagcacaaagtgatcgatcggagggttagggccaaatcgacaaaagcccccgcccctccctttccccctccgcccttttcagtgccttaggcgtcgtcagcaaatttcttaacccgtaatctttcactgatcacttttccgtttcgtttccaccacaatccatgaagatggccacatgtcgaaaggccgtcatcgccaacgaatgaatggcgaacagctggcggcggtagaacccttcgccggccgacgaagaatgcctttggcctgtctattttccatctccgctgctctttcgctccgtctctttcttctaagcgttcaattcctttcgtttccgctgcaaaggcacaaacaattcgcttttcctccctttttcatttaaccctttcccttcgctttaaccccctcaaataacaaatccaaaatatcactcgttgtttttttcgatttgaacaactgttaatggatgaacaaatcatttatttgcaaacggaatgagaacgaattgcttaactcgcttgtcattttaaaaggctaacaaaaaagcagtgttggcaaagaaatctctgtttatctggcaactctgttgctggatcagttttttgaggagaagcaagtcgatttcgaatattgtaaaatagttagcctgtattagttttcagttctctactcgaaaagtatgggggatacaacccngaaagataattaattaactgt

SEQ ID NO: 21844 - DNA, 1531 bp, Heterodera glycines
  unsure (1)..(1531): unsure at all n locations
ttgatccaccagtgcccgtcatcgatgcctcgcaaaatttctcaatgaccgcacgatntgccttctccttccagctgctctgagttgatgatggcgtcggttatcatccgcgacactgcgccggtgccagcaaaaggcggcggttgaccccattgaaaattgccgtttgtgggggtgggagccgaagtggaggaggtgtgctgggggtcaccaaatcngatgtccatatcgattctcgccctccacgagccgctccaccaacctttccaacttttcgagccgttcgatgattgggttcagtgtgggattccctgaaccttctaacaacttttcaagccggtcaagacgggcgagaatgtcctctccctcactcaaatttggggaattttgccgacgttttttgggcattggggattgaattatttggagaatgaattatttggagaatgaattatttggagaatgaattatttggagaatgaattataatttttatgtatcatttgtcagttattcttttgtctctaccattttttattataatgattaaaacatttagtttatgatttataaattttcttattgctagtcgtaattgaaaaactttttcatagaatttatgctctaaatttttaaattaaattctgaataaaaagctgattagtggtatcaaacgtctccttatcctgattgactgattttttttttgtaaaatttttgctattttggtaaatcaattaagaccttatatttcaaagctaaatacctaatgatttattttttctgtaataattgtcattatcattttagcatttttatttgatttattcaaacgtttgtcgtcctgtccagtgcaagaagaaaatttcattcatgctctttactttttaatattttatttttagttttgatttcaattttctaattaaatcagctaatgataatttttgtccaacttttatttaataagaattttttattactaaatgaatgtaacattattattaagagatgctccaattagtgatgtttctttttattaattgtaaatactttttgctctatatttcgttatcaagcatctcaataatttttgattttcaaaccgatgacccaaacatttcatatttattaaatcaacagatgtatatctatggcctataatattttcctttcaaatttattaaaatttaatgtttaatatttttataatttcgaaattacactaattatttgaaaattattcattatgatattttaaacttctagaaatttttaatttaatttaacattttgactatcaattttaattttgttttcttaatttatttcattttgaatttaatttaatttaatttgctgttgaacttattaaattattgtaattattttcaattgaaattttattttctttattttattatatatcattttgaaatataaataattttttgctaatattcatatctttcgatagccaaagggtttttataatttctgcattaaggtaaaatatatcaaattattaggt

SEQ ID NO: 21845 - DNA, 1478 bp, Heterodera glycines
gcaaaaagcagtcttttaaaaaatgttttttctgtttttcttttttaatgatgacaaaatagattttgtgtgttttattaacataaagaaatagaaattaatgctttctattgcatttgttaagtgaaaagtaatttgtttttgctattaaaaatattcatttggaaatgaatgctcttaacacttttgtaaagaaaaagaattgtttttgtatatgcaaagtcaatggaaatgatcttacacttagttttgatattgtattgaaaaagttttggttcgagaaattgtttgaccttgaaatggagtttttttgttttttttgtaattaaagcggatgtcaattatgcctcttttaatggatacggttttaattggatggatttatcgcacttattgtttgttttgacaaaaataagtttcttttaacgatataaggtcagtttatttgttctttttttgtatgtagatgtttatgtaaaagaaattattaaaatgtaagagaacaagtatttataatgaaaaggattttctacgcaaattgtatttcataatagaaatacgtttttaaaattccaaaattatgctgaacaggtctgaattaagtcccgtgattgacatgccgatgactccgtaaaattgagttcattgtttggaatagtgaaggattgagtcctcggtgattggaatggcggagaactgagtcctcggttattacgatgccgaagaatccgtgaaaagtgaaggattgagtcccagtgattggaatgctggtgggattgagtcccgggaataggaatgatggagaattgagtcccagtgattggaatgctggttagttgagtcccagttattggaatgtcgcagaattgagtcccggtgattggaatatcgcagaattgagtcccagtgattggaatgccgaaggaccaggtgaggttaggtcccagtgattggaatgcaagagaattgagtcccagtgattgaaatgcaagagagttgagtcccagtgattgaaatgctggagggttgagtcccagtgattgaaatgcaggaggatgagtcacggttattggaatgcataaaaactgagtccgggtgattgaaacgcaggagaatagagtcccagtgattgaagtcttggagatttgagtccctgtgattgaaatgcaagagaattgagtcccagtgattggaatgcaggagaattgagtctcggtggttgcgataccgaagaatcaggtgaggttcggtcccagcgattggaatgatggtgagttgagtcccggtgattggaatgctggagaattgagtcccagtgactggaatgtcggagagctgagtcccggtgattggaatgcaggagaacagagtcccagtgactggaatgctggtgggattgagtcccgggaataggaatgatggagaattgagtcccagtgattggaatgctggttagttgagtcccagttattggaatg

SEQ ID NO: 21846 - DNA, 1782 bp, Heterodera glycines
agtcgtacagggccacgaacacactgggcggagtatgcgcttccgctctcttcgcccccttccgcgccttcgcctcctccgctctcttccgtccctccgtctaactgctgatgtgccattgccattgaaaaaggcaatcccccgtcgacggcactattccacggcattttaagcttttatgtctgagacaatttgaatgaattttggctacttattggccattgtttctctggtcgaatcggcaaaaaagaaaatggaaaacagaaatagaaacaaatcttcgccaaccaatttcccctcggggctttctttttgctttgaatggttaaatagattcagtggcttgagcagcagcagagggggaaagaagaggtcactctctctctctcttctctctctcccactctctctctctctctcttctttctctcccactctctctctcccactctatctatttctctctcactctctcttctggctctttctctctctctctctctctatctatctctatctctttctcttgttttttttctgttctccccgttcttccccaatcttttctcatctctttctcactttcactttctccctctgttttttgtctcctgctcccttgtcttttcctttctctctttctctatctccccctctctcctaactccctttcacttttgaatgtttcattttctctgctgttaaaatgggaaaaacgaatgaacagcaataaatatatgcagagcaaggattcgtacttggatgccaagtacgtacttggatttcggcttttgtgcatggaaaattttaactgtacttatttacaagattttatttggaaatcggtatttttgcatttgaattagagttgagcgggaccgggaaatttgacaagaaccgggaccagaaaagtcgggaccgggaccaagtttttcgaccgggaccgcgaaaaaacccgggaccgggaccaaccgggacttttcccaagtgaaaatttttttgaaaaaaattgaaaatttaagtgcactttattacgaaaattggcaatattcaaaaatgtacccataaaattttgtatttatgttttgggggacgagttcgaggaaaatttttaaaaattttgttttcagggggggttcttggaattttctgagtcccaaaattctgtattttttaaataaatttacaatcttttaaattttttgcttttaaatcgctgtttttgtggcaatgttttttcaaaaaacttttttggaacagtgggaggggcggggtccggcagtgccgataggcgccgccggaaaaattttgaaattttgagcgaatttgttaacagaatttgtcaaaaaatgaccaaatatttggttaatttatgggtttttaggctattaaaaatgaaaaaaataataattttaaattaaaatattttttattaattaaattcaattaaaataatggtaaagaaaatataaaaaaattttctgttccatcagggaattgaaccgaagagacaaataatgaaagtaaaaaggtttagccacttgaccacttatgcacatgaaaagatgctataaatgaaaataaataatttaatttatttttatcaaaaatttctgatccctcaccaattcccttctcttttctcacccagacccccattcttaacagtgcttatttagtcccgccgggaccgggactggcaaaatcgggaccgggatttctgtttttccaaaaaccgggaccgggatcgggaccgggacctgaaaaccccgggatttcccg

SEQ ID NO: 21847 - DNA, 2497 bp, Heterodera glycines
tattactctattaaactgtttattgtttttacaggctgcagcgagaaatgtgcgccagggaagcggctgaacagaaacaacatgaatatgaagccaaaatgtacgtacgtttatgtatgggtgtttgagttataataacaatttacaaaaaaaaaatttcttttgattttcctataaatttaagaatttttttttgttgaagtttttttgcatgaaacggcgagggagaattgaacacatcagaatttgaaagcatcctctgatccggaaaacggatgctaattatttgctatattcaaaaagtttataaataatcaaatcagatatgaactttcattgtcagcttcttttttccggcgtacaatgcgagccaaaaatagtatgaaaacaaaattaaggttatccatgaaagaggagatggaaagtgcgcagcgcgagttggaagtagcacaagggcgaattcggcgcctggaagatcaaatttacgagttgaatgaggtggagtcttgcggaaccgcttactattccctcgaatcatttccttttttaaagaatgaggagaggatttttttcgaaatctaaaaacatcttttttgaatggagaaaatgcaccgatagattgagccattactatacaaatacttataatatggtaccaattttgcaggcaaaacgattgttggaagaaaaggagcacgagctacaaacattgaacactgaactggcatcagagagagctgtaaaaaatattttacaattttcaataaaaaaaaatttagttggatacgaaaattaacgtgactcttggaattgggactagattttttgaatcgttatgttttaaaaagaaagaatatattttccgacattgctagcaggcaccgccggtggaattttgaatattttttgggaaatttgtatacaaaagcacggatatatctcgaaaattgagcgagaaaaaacccaggtctcgaaaagattggggtttcctggtcctgttatgtcaagaaaatacaggcccagaccaagatgggtccaggctttttcaaaatctcatgcttataagttcaatttatttaattttttatattatttgtcctcctgacccgattgattccttttttaaattttattaatttgtcaagatgagcgaggaggaacggtcaagactgctcactgaaattgcaatgcaagaatcgcgcgtttccgaaatgcgattcgaagttaaggtgcgttggtgttaattggtcaaatcattaaaatgttaattcaccaaatgttagtccatgatacctatttgcatttcttacaatgagaaaatttaaatattgtataatttggtctgaaactaagcacagtacaactattgtgccaattcttttcgaaaataaatttttcccataaatggacatagaacaaaacggatgagatgaacaaactgaaggcggaggttgaaagtgggaagacaactgcacacatttacaacccgggcaatggtcatttgccgaccgaattcaatgacccggacgatctgacaaacgcccacattggtgggcattttttaaaattaataattgaatttaataaattcgacctggtccttcatctacatctatatttaatattttttgttttttctttaatagaattgagtacattccacgagggagacgtcaacaatgtgatgccacagcgtgaattggatcggaccaacttcactgatcaggacatgtcgttgaagaacaaactcgagggcccgtaattaggggattatactataaaatgatcgctctttcggttacggataggaaggagtcaatttacgaaatttattcattaaattcgaagcatgtgtttatctccgtttgaagcaccgaaaggttcattcgtagaaataaacttagaatctacgaaaacaagaaaaaatttcggaggatgtgataaattaaaaatttcaagaaaaatgggcaaattttttaaaatttggcaccaaattggttgccacaatgatgctaattaaattaattaattatacattattttttaatgttattgtaaaaacacgctcaataaatttcattgttgttttagttgcttacaaaggagttggacaatgcgcgagacgagcgggcgatcactgactttgatgtgctgcacatggaaaacaaggtgttttcctgaacagtgttataatcgctgaattgtttttcatgtgaattttcaaaagtcggtttttcaaattaaaattccaaaaaaattgtagcaaaaattattgattgtttttaaatatggtaataatatatttgttattttgcagaaacaaggccgtgacagatataagactttgcgtcaaattcgcagcggtaggttttattggcattttaaaatttttaaactttcattttatttatcttgaataaatttaaaaaatcaaatctaattttgcaggcaacgaagagagcggagaattgaccaatacgaaaatatgtaatgctca

SEQ ID NO: 21848 - DNA, 2279 bp, Heterodera glycines
aaatgcaatagagccgaaatttcctctcccccccccctctcatccgcccgaaatgcaaaattaaaattttccaagaaaaatgggcaaattttatttctttaaagttttcaaaaaaatttctcctcgctggaccaccattctcccatttgaccatatatatttttttgaaaatttgaaccaaaaatggcaattttggcgaaaaactactaaaaattcctactgctttgccccgggcggtggaaaattttgaaaaataacattggagaaaaaggaaattctaacctgaaggaggacaaaaaattcccgtacttgccaaaatgacccatttgatgctaatcacttttcttattactaatgccaaaaacgcataattttttttgctaataatttttttttattaaaatttctttaaaaaaccatgacaaatttttaaaattttcatttttcttttttgaggaacaaaatcagcaactgattgcctcctcaattgttccatcaacatcgagcagtagcaggaataaaccgccggcattgcagctgaacgaggcggtcagtcactcatttatttatttattttatattttgaaaatttttaattaaaattttactattttttcccatttaagccactactttttgatgatgcacagcaattgttgagcccatatgttcagtgccattttactacacatcagcaaattatgttcaaagtaaaaagtggcaaatgctttggcttggattttcatgccccgggggcatgtcatattattgacgattagagctcgccaattttcaaaaaagccttaggcatggcctgggggattccatgttggccctgctggacctgggttttctgcctggacaaaaacggaggaaaaaaacccaggttttgcatgcctaacctggacctggatttatctttttttaaatatttaacctgcatctggatatcaaaaaggaaaagccaggtccaacaaaatacaggttaccaaaaaaaagagtctgtgtggatccaggaaaaatccaggcctgagctctattgaacaagtgtcacgaaaattgcgatcctatacatcccaacaaaaatttcgaaattttattttttcacttttaatagatctttttatcatttaaaattttacagatgccaaaaatatacacaggttttgtagcggaaaaattttttgaggagacaaatttcacgtatatacctaactcgactttctaaaattggggataaaactgctactaattagtggtagtgggtatgattaattgcctgccatggggacctgaaaattaagaaaaggaagttctaggtactagtgatgctcgagagtctcggtctcgagtctcggtctcgggttttcaagtctcggtctcgattttcgagaccgagacttttttacacccctaatgattgttggcctttggtaaacttctatttttataaattttaggttcttttttgttcaaatttgttaatatatgcgtggtccagcgggttgtgttcttgattttgttccttatttttgcgttggatcagttcccctccaagtattattttttcttctcatttttcaaaattaatgtttttttcgatgggagttcaaacacaattttaacaattaaaatcgtaaaaatgtcatttttggactaaatctattaacaaagtgcactaaaaatttcaaaattttctccggttttgagttttttaaacatttactgactatcaaattatcagtcagacccagtcactttctatcacttatataatgctgtttaggctatcatggattgataaaactatgtttgcacccgattttgggtatagccagcaaatctgttgtgcgccaatatctcataaccaaaattgcatctcccaattttttaaattttaatgccaaaattctgcaaaaaaaaaaaaatactacgcccaaagcaagttcgagtcgggctccacgtgctgcaccatcaccgactttcccccatgggtggtgaaaatggcacagaatcagccgcgcaaattttcgccgaaaatcattcgacaatgcgaggcggtcatcccgctacagtacggcaccaacaaatgcgcatcactgaaggccatgacaccgtatggattgaccagccacattcgaatgtactgattgagaaagaatcgatcagaatgagatcgaagagtgatcgatcagaatgaattgacacaatgataaagctggacagatggatgaaatcgataaatgctaatgaatgattgatattatgtctattaatcc

SEQ ID NO: 21849 - DNA, 993 bp, Heterodera glycines
attaaaaaagaaaatattcgaaaaattgaagcagtccaaaaaatttttacaagaaaagccttcaaaaaatgtgggcttgtccccatgccgtatgaagaaaggctaaatatttgcggaattaagacattggaaattaggcgtaaaattaatgatattacaacaacttttaaaatcataaaaaaacatacacatcttaaaccatctaacttttttgctgttgctaaacgggctattcgcaaaccctttttactacaaaataggatatatattacaaaaacaaaaaataatttttttaatagagttattaattcatggaatttattaccgaaaaatattatggaaataaatgaccccaaaaaattccgagaaatagcaaaaggaataattaagcaataatgcatattttccctattgagaggtgtgattttctttcattgatatttactttttatttaatttgacgtttacctattttgtgattttgacttccgtttatgttttattttgattattcattttattttgtgttttacaccactgttagagtgcgaagcaccttgtggtttgttcgataaataataaatattccggtctacgtcggcggttgggcgggccctcacgtttgggcccccagcatatttttccactataactttataacttttttctttatcacccaaatccaataaatttggtatcattcgaaagcttacatacttagaagctttttctaagctattgcttcgcgattagacaattaccaaaaaagttatacatgaaaattgcaaaaaagttgaaatttttgaaatttttttcttaaaaactttttttaaagccaaaaatctttttgttttttagtaaggctaatagagcatgttaagagctttcgaatgataccaagaatgttggatttggatgccaaagaaaaaagctatcgtggaaaaacatgctggggcccaaacgtgtggggcccaaacgtgagggcctaactga

SEQ ID NO: 21850 - DNA, 2164 bp, Heterodera glycines
tgcccgtacaggtgacttcgtgggatgtgcagttggaggtgccgccctcgcccggacacttatccgactcagtctgaaaccaaatgggaacgattaattgcatggatggcaaatggggcactttctttcactcaccacgtcctccgactctccgagtgtacacggttgaccgttggtgaagaaattggcctttgagacgcatcctccattgcgcacaaagagtttgaagatcaagtcctcctttccgttcttctggaaaccgatgaggggcaggtcagacgtatcagcggtgacagatgaggaatccaagctaaatgggatttgggaagattaattgttgtttcacaaaacaacacaactcacatcagaccgtcgtccacagctttgaagccatcgattcctccgtccttcgtggcacaattgaggctcgacagatgcacaacatttccatccgcacgacagcagccgaagaggaagagaagggcggcaatgaatagaagcggacgagataacatggcgtgattacggtgataaaaaataagatgaaaaatggtcgatggaatgccttttataaagaaaaatgtgtcacaaaatgtcaaaaatttgggagaaaaacaatgagaaaaattgaaattatagcattataaaagaaaggaaatgaatgaagaaaatgcatagactgaaaatcatttattccaattaccatcatttacctattctaagcagaattttttttttctttaatttgaatgaattttcattcagccctcttaattcattctcattatttaatctttgtccatttgtaatttcaaaaaatttattttaagcgttaccgaacacatatacacatattatacaataatccatctctgcaaacacattgtttcaatggcccgcagatcgaatgccaccggcacgaggaagccgcaccgttaccgtccaggtacagtaacactgcactcatcatctgctgaccccaaatgctcactaatcccattctctccccatatttaggcaccgttgcccgtcgcgagattcgccgttaccagagcaccactgaacttctgctgcgcaagttgccgttccagcgtttggtgcgcgaaattgcacaggacaacaacttggagatgcgctttcaggcggtggcctttgcagctctgcaggcagcaaaagcttgttgtttaatcattttactaatttggcatccatttcaggggggttatcgaaggttctttgattcttccggtccccggggttccccagttgaaaagctcaggttccggtcccggtagggcaaccgggaaccgggaaaaacaagcactggtaagaatggtggtcttggtgaaaaattagatatgaaaattagagtaaaagggaaaaatttaaaaatatattaatatattctttaaaagtgacacggacaattgcgcaaatggcctagtggctagtctccctgacctgcccttcttctttcccctggttcaatccctctacagaaagtaaaatatttcgaattttttttttaggctcatggctttcctatcgacaaaatatgattcctcatagttttattttaattgacacatttttatcattttttaaaatgaaaatccgtacaaattgagcctaataatcccaaaaagaagccatttttgttgaaaatctgttaacaaattgcactcaaattttcaaaatttcccccggtgtgatgccagaaggaacgagtgtgggagaaagtgggataaaggacctgagagaaactctaaaagtagcgcccgtagaagttttttggaaaaagcgcgccgaaataaagtgatgtgaaaagcaaatctgaatttctattaatattcgattatttagtccaaaaatggttatttttttaataattgaaataaatttggtttaaaatttttcatttttaatttagctttaactttaggatttattaaataaaaaacaaaataaaaaaaataattttatattattttcactttaaaaaaaattaaaatttgaatttttttaaatttttttgaatttttgaaatttcctcggttggtcccggttcccggtcccgaacaaaaatcgaggtcccggtcccggcttctcaggtcccggcaagtcaccggtcccggttttgcccaaaattcccggtcccggcgca

SEQ ID NO: 21851 - DNA, 1655 bp, Heterodera glycines
  unsure (1)..(1655): unsure at all n locations
tagtttaattcganctgaagctgaatatctnncnaactgtacaatatttctggttgatcagataaagtgccacagagtcaacaggtctgagtcctccttaatcgccttgatactgtgattgggtgggttattgtaagtttgtttgcttttcaagtcatgtttttatttgagatcattaattaccgtcagtttttcatgaaatttcaatttttcgaactgaagctgattaaagaattttaattatttttaatcctttaaaaatttctccaacaaaatgtttctaccaattttcagcaatttacaattgccaattcattcatttttggcttttcttattttatttgccaatattttttccattttttcttttgtcgttattctttcactgctaatgccaaattgtttaatccggtacttttcggttttgtgaccccccccccctgaagttttcaaataaaaagtcatttctatgggaatttggggcgctgatcacgaatatgacatttatttttcaaaattccgaatcccgaacccgaattcgaacacaaattcgaaattaataaattacacggaaatttttaaatcttttcgccataaaatcattaaggcatattatttcttttaaccacttttattaaatattaaaaaaatttatttatcaaatacaaatacaatctttttgaaaatttatataacaaatctattttttagagcgcagataattttttaaataaatttatccaaattttcgtaaatttttccgtttttcaatccttcaaaatttcttccccaaaatgtttcttccattctgaaattctctttctattaattttcaaaattttccaatttccgtgtcactcatttttggattttctttttttatttcccaataaattttcattttttctattttttgttcctccgttattcttttacagcgaattccaaattgtttcttccattttttaattgttacatagcctactccaattttcttacaaatttcgacataatttttgttccattctttgactgaatattttcttttttgtttaaattcatttttcattttaatgaatttttgcacaatttctaatttttcttcatcagtttttgatttatagcatttctttttttggagaccaaattctttaatccatttttgaatatattggcgatttgtccccaatttcttcgctatttttgagttaattttatcccattcttttgttgagtattttcttcctttttgctttattttttcttttattttataaaattttccaattatttctctttttttgagttcatttcgtttttcttcttctttttcttgccatttttctccaaatatttcgccaaatgacttttgttgcaattttttcctttctgatccaattttgtcaattaaaaataaaataattaataatagtagcggaaataatttcatttttgtcgtctggaaattattttattttatttttcttcaattaaatgcaattcattttttgaggcatttaaatgattttttttctgattaaaaaactgaataaatcattatttacttaataaaataaggaaatcctgtttaatttcaaagaaataataataataattttatcttaatgacaaaatgtggggagagagcgagagaa

SEQ ID NO: 21852 - DNA, 898 bp, Heterodera glycines
aaaatttacaaaaaatgtttattttttaaaattgccttgggaaattagccaagacacaaaaaaagtctttccgtcgccccgccggggacaaatgatggcgaaataaacaatgaaaatgccgaccgcggatgggaggaggaaatcctttcgtgttccttttcctttttccttttccctcgtccatcggcggcggagtgacccaattacacaacacatttcacaaacaaacacttggggccctcataaaacacattaaaccaattgtgaagaagcagccacttcttctgtgccggcgggcggcgaaaaattaaatgttttttgcttttgccccattttctgccgaaaaaatcggagttattagtcccaccgaaattgtctgaagacacgaacatttgcaccaaatgttcaatgtttgatggatgccatttttagaaaagcattcacaaaaaatagcaaaagaaaattcaaaaattgtttaaaaaatgcgagcagcaaatgccgtggggccaacgcacgtccgactgacgccggaggggtcgcgacgcattcgcgtgtacagaaacggagacgcgcacttcaagggcattacggtcggtttggtggggggggggactgtgggagtctcgaaattttactgtcatggaccgcgtaaagccgagacccattcaaaagttcacacaatgtgccggattcggccaccaacaaattgactaatgccactctcgtgttaaataatgccgatgccaatagctttccccgtcgtgctcagattgtgctaaatacgcgccaggtacacagcatcgacgcactgttggacatgatcagcgagaaaatcggcttggtgatgggctgcaagcgattgttcacgttggacgggacgccggtgaagtccatggag

SEQ ID NO: 21853 - DNA, 673 bp, Heterodera glycines
gtcggcacaatgtcccttgcccctctcccaaggagtacgtcgctgcctcgggcatgttcacccccgcccgctatggacgcgtgggttccgcagcgctgcaaagcgcttctatgctggcacgctcctcctccaatttctcggccgcttcacgcgaggacccgttggcacagtcaggcgcctccaagcaatcggcgcccgcctcgttggcatttggcacggcacacgcaccgcttcggcactccaggcaatgggggaaaggcaggcaaaatagcgggaatggcacccttgcatcaatcaatcagaatgccaaaggataaaccaacggagaatcgacgaagaaatggaaaaaggacggaatgccaaagaaatcaatggcatttggcagaaatgccaaaaagaaaaacgacgaaaaaatgcaaagaaacttaggcttaggcaatatttgattttaccaacgtcatcataaaaaattgattaaagaaatagacaacggccactgttttaagaagcattgagccgcggcgaacggtcggacgtccgccgcccgcgcaaatgaacggacagaaggacgagaggaggtcactttgagtgggcaaaatttggagtaaaatgtgcaaaaattttgcagtagaaaagtcgacggcaaaaaggcacgcgacggcagcaaaaagcg

SEQ ID NO: 21854 - DNA, 1742 bp, Heterodera glycines
  unsure (1)..(1742): unsure at all n locations
tttgcagaaatttacaaaactttttcaattaataattatttgatttttatttaaaaatatttgaataanatatttaccnaattgcagaaattcaaaacaacaaaattgctcattcaaatttgtagcaaattctcacaaagcaaatatgaagaaatgtatggacgaaattggagtgaaatatcctcattctttacataaatagggctgagaatttaagtcacaaaaaatctcttttaattagaattgcaaaaatggtacattcaaaatttgtaaatttgtaacacattgtaaaaggggacaaatggaaagatttcagagccaatattttttcatgaatgaatctgacaaagttgggcgattgtttcaattccctggggtcgtctttctgtcggatttcaattgtttgtttgtttttggcattttatccactgaaattcaatttttgccgtataaaatgaaaaaaccaaaaagtgcaacaaagtcataaaactccaaaaaaagtagaaaaaataaaaagctcaaatcttaaaataaagcgtgcgataattttaaggtaaaaataaatccatttcgagtcagcagaaaaaagttatttgacttaaattcccatccctagtaataaaaaagaataaatgtattttttaacaacttttaattaataatttatctctcgcaagcattttaaaaactttgcaacgattcatttcttttccaagaattaaaaatgtcattttaaatgattttttaaagaaaatataaaaatgcttacattaaatgactttataaatggaatagtgcattgtgtcaaaatggttgaaaacatcagcaaaatggtaaatttgagcgattttttgtgcaaagaaaaagcaaaaaatttgatagaaaaatgggaagaatttaaaattgaaatggacaaatttaaattttagacaggaattaggcgcatactttaaattacgaatactatgtaaatgtctattttcattttgggagtttaaaaaatgattccttcttttaaaccaagcctggcaaatccatttttaagaatttttgtgacgcgaaaatcacaacgatttctcgagtagccctagtggagatcccccaatcccccaatctcctgattatgggtattttagaccagcttctttggcaaaataaccacaaaatttcagcgaacgaaaattcggaaaaggtgtcctgctagaaaaataaaatataaaattaaaacttcacaacgaatttaaaaatatgtaatcaaaaataattgcagtacaagataaattgcagcgaatattttaatttatatttatttttccgtatgtatttttattattgactactgtttttcctggccaagtttaaaagggaatgtattttacagcatttgaacaaattttttttttaataaatttgacgaatttaatgagtttttgacaaattttattaaaattgaattattttaataacataatgccgacctattaactgtgtggttcacaaatctaaatttaaaaaaatgaataatttattcattaactgaatttgttcaataaaagcagtgctgaatccgaaaatccttccgcatcacataaatcaaacccaatctaatcccaaatttccgccccaacaatctcaaagtgatccaattatttaattaatatttgcaattttctttattaaactanaaactacaacattctcacaaagcctttttttcaaaaaatagataactcgagcccgga

SEQ ID NO: 21855 - DNA, 2260 bp, Heterodera glycines
tttttaattttgaaataattatttttgtatgtactttcctcttcattttgacttccaaataaaattcaaaagcataaaatttggtcatttttggacaaatgcaagtaaaaatttcaaaatttccttggccgcgcctttcggcaccgccggtccccaaaaactcctaatttttttcttaaaaaattggcccaaatcaacaaaaaattcaatttttttacagattttgttaacaaattgcaaagatttttctaggcctcgccaccgccggcccgaaaacggcctaaccgaaaaccgagggtgccggtttttcggttttaaaaatgcatccttaaagatgacatctctttaagcgaataggcactaataactagggccccaattttgaggctctattgtgaccgtttaaaagttgcaacaaaaaaaaaatatcgaaaattcaggcatgagtcgcccgagtagaaatttcgaagatttgttaaaattagaaaatctgtgaaaaattggacaacgccatatagaaaaacggatgcagaaaaaatttattatttcttattattttgttctactgattgatgtaggtagaatttttttgtaatgatttaaattatatattttattggtgatgaataatttttttcattaattttgcctactgattgattttccatgaaaatcaagcaaatgaaatattattatttaaatagtttttttaataatttatttttaaatggtcttaaaaagaatagtttttagaaaaatgaaaattaatatattattactattatgcctattcatcatcaaaaatataattgatcagactgtttctgtgaaaataaagtcaccgaaaggatttgacgaaatatttggcgaaggatgggagaaaaatgcgcatgaaaatgaacttgatcaaactgatcaaaacggaataattggacaaaatgtcgatcgaaagaacacaaataatgttgaaaatattgggcaaaaattattatcgaacaatttgatcaaatttttgttgaaaattttgaaatgaaaaatgaagagagtgaagaaatgtccacaaatgatggtgatgaattggaacaaatgtcagcaaatagtggacaaatttccgatcatttttcaagtgaaattgataaaaagaaaagagaaattgtggaaaaatttgataaaattaaagaaaaagttaagcaaattggaaagaaatattcaacaaaagaatgggagaaaattgaaagaaaaattgcaaaaaaattaggtgcaaataaaatgaaaatttacaaatggaagagcgaacttggaatgatgacgaaaaaaaattattcagttgaagaaaaaagaataatgttaaagcaatttgatcaaatatattcaaaattaaaaataaaattaaatgaaaaattggaaggaaaaagagaaaaatgcaaaaaaataatagcaaaacatttgggcacaaatatcagcagtatttatcattggaagaaacaaagtggaaaaactaagaaaaatcaacaaattgatgatgaaaaaagagaaattgttgaaaaatattttaaaacaaaaaatgaatttatgcaaattgggaaacattcacgaaaggaatggaaagaatttcatgcaaaaattaaacaaatatttggtttgagttatatgacaattgaattatgggccaagaaaattaaaaatcaatcaaatgcttcaaaaggttatggtgcatttaaaatcaaaaatctaatcttttttaattaaatttatattttttcattttaaaattatttatttattttacagagcgaaattttatacaaatgccgaaaaaatggaaattatgaaaacatattatcagatgaaagagcaaaacccaaagttcactgatcccgaaattgctgtttgaagatagccgtccccacattacgcaaatacaaatccgatttaaagaaaatggaaagaaattttaaactttgataaacatattgccaaattttcaacattttaaattcattgtttatcgagatgcttcaattatttgttttttttttttgtaaacgaattttacttttgttgatttgacaaaaaaaaaaattctctattcagatttcttagtaaatttattaattttatgtaaaattaaaaaaaaatcgcggccctaatgataattaattgcatcaaatgcaattttttttttgattttcttaaatttaacacattgcgctaaatacggcactctctctttccttatggaaatgcggggccaggacgt

SEQ ID NO: 21856 - DNA, 1688 bp, Heterodera glycines
ctttaggaagaaaatcgtctgttgaatagcggtgtcggaattgtcttctttaaatatgttggtccgtagacgtagcaatgggtccgaagatgggtgcagatcgatgagtagatatgagtatttttgacgtgttgcttgtcgataagcatccaagaaaaagtcaaattgtcgagggaacagttggacgcccaaattccggatggccaatgcggagtttggagcacgtagtaggacgatgtacatcgaattttgacgaaccactttaagcttacgatcgaacaggtcttgcctgatgaacacgaccccgaaattttggtggtgtgcttttttggtaaatagttctgctaggtagcgttcatctatagagtacaaaaggtcgtcgagaatgatcatcgcgggctttgtcaaagaactaatcatttctgcatccggaactccggcatgaagttgcacgttggttatacgatgctgaagatctgttaatgatggactatactccccataacagaacaaaatccatttgggtgcagggtcgattatatgttccgcttgttcgataagtttgcaaatgaaggtgcttttgccgctcgaactaggcccggacacgagacatccgaatgggagacaaaattttagctctttactctcaaaccgctgcgcgtcaatcataacgagtttattgaacaataatgatataattagggtttttatacaaataaaacatgcgtatcgctttaaacatctttttcttccttgatggtgtctagattagaaataaatttatttgttctgaatttaggtgtattttccattgtgtttgcttcgtccattagttgtacttgtgacagatccattttgtctgtccgtatcatcccatctgttgctttctctcccacatttaattcatccgtccgattggtaagttctgctttctcatcttcgccatttttcgtagtaatgtcgcgcaagtctgagtcaaatctcgcttttttccgctcaacattgtcgatgagagggttttcagtcgttgatgtaacagttgacgacattgccttttctagtggagaatccgagaaaatatagggtactttaaatattcggcgcgaccgtacgcgaaacgcacaaaaacgcggcaggtcatacactcggtcgaatggtacaaatttttcggtgccttttagtcggctcgaatgaatgtagacgccatccttactgatcagatagtccaaatccatattatatcggcattgtctgcaaatggtaccatcatcattgaaaaacactacacgcggagtgtccaatcggtcactgtgaacagtcactccctgagttgtgaccaaaaaattgactgtaggaagtagttgacttgtgagagatttgttatccattttttgggtcaatactttagaaatgatccattaaaatgacgagaatctaacattatactgtccctaataatgggcggggcttaaatacataatttacacactcgtagtgtcatcattatttaaatttagtacactcatatacatccgatgcacactgacgaggatctgtctgacgacggcactgaatcatatacatttcgctctctgatttactacgaaaagaaacaatgctccaaatgtaagaagcttcgtaagtggtacatcgtggaatttcacatgccaaatccgatcattacaaat

SEQ ID NO: 21857 - DNA, 3001 bp, Heterodera glycines
ggggggggaggtggcaaacaccggaagtaccaaaaattttatttgcacaaaaacactttgccatggtccatgggttttacaaaaccattccaatttatgtgttgcctcctctacgtcccgccccttccgccgaaaaaaatttttttttaaataaattattttattttaaataactgtttcgctgtttccgttcatttgtctcggttttttagaccattcgtcgtaacccggacacccaatggatcaccaaacccgtgcagaagcatcgcgagcagcgtggactcacctcggccggccgcaaaagccgtggcctcggcaaagggtggggcaatttttacatttgaaaaaattttcagcgattttttttaatttttgaaaaatttctaggttttaaaacctataatattaataggggattgtgcaataattcatggcataattttgattttttggcattccatttttccctaaatgtatttgatttgccccatttttgcagaatgaagcacacgaagaccattggaggctcgcgcaaaaagtgttggaaacgccaaaacaccgtcgaattccatcgcaagcgttgagcaaattcattcattttgtatggtccattggacagaacggagacattttttgcaccattctgctgttacttttttctttttttgttgagaaataaaaaaatattgttttttacggaaagcgaaagcttaaaaatgaaaaaggggcaaaaaatatgtttttggggttcgttcagttcgagagtctcgaagggaaaactttcggtaatattgtgcttatttgttagttgttgtccggtagggattaaaaaattttcctaggtaacaattccgacccaaaaaatgtcggaattccgtgccatccctatttcaagtgcttttttagtcggaacatccagcaaaaaaattcaaaaaacaaaaataaattaataaataaatttatgtattcgaaagaaaaatcaacaaatgaaattgagagaggagagcatttatgatgagggaaaatgagcatcaaatccgtttccaattggtgaaatccgtccatttctcaaatacaattaggtaataattaattccgcgcaatcatcagacgacattttcaaaaataatcactcattcattccgcacaatcagttggcccgagaatcgtccgtcgagaacactttttcgttgctttgacccgcttcttccgctgctggtggcgacaatggcctaaaattaagtgaactttgaatttgggtgattgagaattatgtatcttttacgggtgcacccaaaaatttcgccgaagaaatttttttttttttaatttctgtggaagaacttccacaaatgatttttcgagagtttcgacatttcaaatttcaagaaaaaaaatattagaaaatttttttacatgacaattccaagggaaaatagcgattttggaaaaaatttcgaaaaaattcgccgggacgtaatttcggggaagaaatatttttaaaatttttttttcgaattttcaagaaaaatatggatttttttttttcggcggcgaaattatgtctcgtcccctcttttacactcacccaatgcattgtttgtcaatatccattataaaatggacactgttgaaattggcatccaaagtgccgtcttcccactgaaccgccgtctccccaattgggcatcgtttcatcacccaattgccggggtgccgtggcactttctccagcgtcagcttctcattcgtccgttcgttcaccaatccaaacagcacaattggtgttgaacccttcattgcgaaattcatttggtagctgactgaagtggtggcacggacaaatttctgaacaattgggaattggataaaaaatgcctccaaatatggcaaaattgcgagaaaaaaaaccctcattaaaaagaaaagttagcaaaaaatggccaaaatgatgacgaaaactcacattttcgtactgttggcagtatatattttttaatttcctgaaaagttgatccttagaggtgttttttgcatttttcttgtgaacatttgccaaaaattgccgaaagatggactaaaaaacgcaaaaatggcgaaatgagaatttagatattcccgaaaacacccaaaaaatggatttattcccgacaacaaaatcaccaaatcaattagtacaccacacctctttgaaattggtgatccattcaagatttgctggttgttgtcgatacaatgtcgacgtcaggcatcgcaatttcttgggacggccatccgttctcggcatgtgtaaccatttggacaaaatttggccggcagaatttgttgcatttggcccatcatcgtcgtcgtcatcagcaagcgcttccggaaacagtccaccattgcattggactgaagtgagtttaagatcgatgagaattgtcggcgatgtaagacgaagcaaagtgtccaaatcggcgccatggtcaactcccaaatggtggacatttgttgctgttggcgtaaaaatgggccaaatttgacggacaaaaacatccaaaattggctggacattgttagtgttggctgatatccggcgaaaattcaaacgcaaattggtgcctctgtcccaaatttgctgattgaggcggagaaattggatgacggccacgtcaatgtacctgaaaagggtggacacgtatctcaaaaacgggttaaaactcaatgtaaaattactcaatctgaaggaagtaaaagcgaattttgcgcggcatcgggcattggatgagtggaaatgtttcgtcggtggaccagaaaatggcaacaattggcttttccgtgacttcgtctcttcgaatgacgatacgtcgccaaattgtcaattccgttttgccatcaaaatgcgcgtccactaaaacatcgaaacggtcggaaagcattgccaatttgagaccaagttgaggacggtcaaaaaacggcagaatgtccatccaaacatcgttgcacacccggctgaaaa

SEQ ID NO: 21858 - DNA, 1263 bp, Heterodera glycines
gggtttattttaaaatgaaattttatgataaaccttatatttcaagaagctatttaattgatttgaatgtttttttcgcggataattagaacaaggaaaatttctttaaatctttaattttctaactcacttctcaaaatttttaataaattccaaatatatattccaaaattcttttgacactttctgaaaataaattctatactcatgtattttccacttattagattttgcaggcttattgctgcatgttctttgacacttcttcaaaataacctatgccctttattcgttcaaaacagcatctttgttgtttcgctttggattgacaagcccgatgataaatagctcgagcgcaaaacgcgtgcatgtttggaaagtatcgttcataccaataattgagggtttatttttaattgaaattttatgataaatcttattatctcagaagctatttaattgattcgaatgtttttatcgcggttaattagagcaacgaaaattggtttgaatcgtgaagtttatcatttctaactcacttctcaaaattgttgataaattgcaaatatatttttccaaaagtctgtggacactttctgaaaataaattctatactcatgtattttccacttattagattttgcaggcttattgctgcatgttctttgacacttcttcaaaataacctatgccctttattcgttcaaaacagcatctttgttgtttcgctttggattgacaagcccgatgataaatagctcgagcgcaaaacgcgtgcatgtttggaaagtatcgttcataccaataattgagggtttatttttaaatgaaattttatgataaaccttattatctcagaagctatttaattgatttgaatgtttttatcgcggttaattagagcaacgaaaattggttgaatcgtgaagtttatcatttctaactcacttctcaaaattgttgataaattgcaaatatatttttccaaaagtctgtggacactttctgaaaataaattctatactcatgtattttccacttattagattttgcaggcttattgctgcatgttctttgacacttcttcaaaataacctatgccctttattcgttcaaaacagcatctttgttgtttctctttggattgacaagcccgatgataaatagctcgagcgcaaaacgcgtgcatgtttggaaagtatcgttcataccaataattgagggtttatttttaatgaaaatttatgataaacctattatctc

SEQ ID NO: 21859 - DNA, 993 bp, Heterodera glycines
aaaaagaggagcataaaagattttccatgataaaaagcaaaaaatttaatgtacgcccaaaggtctaatcgagaaactttgaaaagtttgggctatttaagcaagcatatgattagcctatgagttatgatgaacgacgttgcacctgaatgaccaacgtggagtaataagagtcatgttttgaaaagtcattcttaaaactgcttatttaaaattctggcattttttataaacagtatgagaatatcaattacaaatgttaaggtttgccataattatgggcaattgtaactgttcaaaaattctatgcaaaaaaaaagcaaaatattcaattataaaatgctcatcctagaaatcaatgctctgattatgaaaaaatgtgcttataacaactcaatagttggggccgccttttgtatgacatggaaattttggcagctttgcaaaaaagaggagcataaaagattttccatgataaaaagcaaaaaattaaatgtacgcccaaaggtctaatcgagaaactttgaaaagtttgggctatttaagcaagcatatgattagcctatgagttatgatgaacgacgttgcacctgaatgaccaacgtggagtaataagagtcatgttttgaaaagtcattcttaaaactgcttatttaaaattctggcattttttataaacagtatgagaatatcaattacaaatgtgaaggtttgccataattatgggcaattgtaactgttcaaaaattctatgcagaaaaaaagcaaaatattcaattataaaatgctcatcctagaaatcaatgctctgattatgaaaaaatgtgcttataacaactcaatagttggagccgccttttgtatgacatggaaattttggcagctttgcaaaaaagaggagcataaaagattttccatgataaaaagcaaaaaattaaatgtacgccctaaaggtctaatcgagaaacttgaaaagtttgggctattaagcaa

SEQ ID NO: 21860 - DNA, 1062 bp, Heterodera glycines
aactaattccaggacaattagcatcggcgcaatggttatgagaattcggctgtaattcatattactattgagcagaaaaagagatagccaattttccaaatttttcccaaactaacgcgccgagaaacaaattccagaacaattagtatcggcgtaattattctgagaatgcggttggaattcctattactgttgagcagaaaaagagatagccaattttccaaatttctccaaacaaacgcgccgagaaacaaattccagaacgggtacgtaattattctgagaatgcggttggaattcctattactgttgagcagaaaaagagatagccaattttccaaatttttcccaaacaaacgcgccgagaaacaaattccagaacaattagtatcggcgtaattattctgagaatgcggttgtaatccctattactgttgagcagaaaaagagatagccaattttccaaatttttcccaaacaaacgcgccgagaaacaaattccagaacaattagtatcggcgtaattattctgagaatgcggttggaattcctattactgttgagcagaaaaagagatagccaattttccaaatttttcccaaacaaacgcgccgagaaacaaattccagaacaattagtatcggcgtaattattctgagaatgcggttggaattcctattactgttgagcagaaaaagagatagccaattttccaaatttttcccaaacaaacgcgccgagaaacaaattccagaacaattagtatcggcgtaattattctgagaatgcggttggaattcctattactgttgagcagaaaaagagatagccaattttccaaatttttcccaaacaaacgcgccgagaaacaaattccagaacaattagtatcggcgtaattattctgagaatgcggttggaattcctattactgttgagcagaaaaagagatagccaattttccaaatttctccaaacaaacgcgccgagaaacaaattccagaacaattagtatcggcgtaatgttctgagaatgcggttggaattcctattactgttgag

SEQ ID NO: 21861 - DNA, 2889 bp, Heterodera glycines
ttctttatcagcctgaaaactttaaaaatatttgataacttcctagaaaataatggtcagaagatcataaagctacttttttaacattttttgccttcaccatttttaaactttaaaaatttacatggcatgccaaaaacgaatgtttatcgatattgatatgaacaatgtttaacatggtgttgtttttgagcaggtataagaaattttcattttgatttttttcctaacaaataaattactaatgccgtcgcaattgatttgttattattttattttaagcacaacatttattcttcaatttatatcagctggtccacaaatgggacaatagccaaaataagagactttttaaattgaaaaaataaaaacgagcaaaaatttcattaatagtaatgctaaaaagaaatatgtgttcaaaatcattattcgttattttaatcaaatgccaaaataccgctatcattgtaaattatattctattttatttattttttaactatttaagtaagaaattaaattctaatttacaaaggtaaatattaaaaattcataaaaataaaatttgcttttataaaaagaaaatttaagaaaacataaatcataaaataacagtttgtcaaagtgtaccataaatgcggaataatgaggcataaatccttaatgaggatgatattacaaaaacgaaaataaatcaattaatgattaatcattaagaatatggaaaacccggctaaatgctgactttaaaacttaaagccaaataattaaaaaataaaatcatcgagggaatgtgttacaggaaaatgaatcgttaaaaacatatcaacaaataaaatatattttcaaaaaaaaaatgtcgataaacctggccaattcccgacacgacagtgtcgaccctagtagggacagtacccttgtaaaataactttatttaaatacaaattattaattacattataaacctatattttaaagaaaaaaaatcaactatttgtttcctttttatgaaacgattaaagtatatcgcaaaaatgtttttgtctttttatataaaatttgtaaaacaaaatattctggcaaccgccagtaattgacatccaacagactgcaagaatttttcatataaatttaaaaattgcgataacatgataacttaaacacatttaaattcctttttattcaaatgtgtaattatttatttatttttaataaaaaaactctaaaatattatgccttaaatttctaaataattaccatcgccgaaattaacaaataaatttaattatttaatgcataaaatgaaaaaataaatatcattggacaaaaaagagttacatgatgactgagtttacgaattaattaataaccaaattacaaagtcaggtcgtgagagagcattttcctaacaaaaacccataatatattataaatagaacaaatttaatataattttgttgctatatagaaaatatactttacaaaatttcctgctatttaaaattaaattttttcaccatttacataaacaatgtcaaaagcattaaatgaaaaagtgcaaaaaaataattgaaaaaataattataaacgatggctaaaatgaaagctaaataaaaaaatatataagtaaataaaatgaaataaggttataagatagctaattcgaaaaacaagcaacgaggaattaattgattaatactgtaatgcttaaacacaaaagtttattaaattttttatacatacgataaatattttatcattgtgcaagaattttgatacaaaatttaaatattacaaataattattatttgatatgttaattggctaaaaaaggaatttaaaaaatatcatatacctacttattgctcaaaataattttctgaaaataaaaaaatcttcaaaattgctaatactcaaaataatctctattttttaattatttagctttattgttgtggacccaaaaaaaatattatattttaaacaaggagctaaacgatattaacgacgatttaaaaaaaattaattatacatttctcccaaagaaaaattatattcatcaaaattgtgttcattaccagggatgtattaatatttgcttaaattacgaatttgtatttacatatttattattttaaatattttctaaaaataatctcgcaaaaatcttttttaattattttttgccaaaattgcaattttatgaaaatctgtttataaatagagtcaaattttcccggagtcgactccctaaaaccctattttcttaaaatttgctcaaatcgcaaaatttcatcaatttttggacaaaagctttttaacaatcgcattaaaaattacaaaaattttccccgatggcaccggtctgcaccgccgaaatcccctccgccgtactgttcctcaaaaatttttaaaaaataattcgtaaaaaagtgccatgaaaagccaaaaaaagttattttttatcaatatacgtatttttcaccaagaatattaaaattgactcgtgaacaactgagaaaataaataaataaaaagattaatgtttcttcttttgagattttaaagaaaaaatttagcgaaatccaattcagtgagattttaaaaattgatttacatttcttaattattattttttgaatattatctgaattaaggaaagaatattatttacctcactaaatttaattcaaagaatttgaaattcaactaaatgcacttattaaggaaaaaatcggaacatttttacattttttgcttaaatttgttaacatgatacgctcaaatttccaatttttcctccggcggcgcctatcggcaccgccgtgccccaaaactcctatttcttcatagaaaaatggcccaaaatctcaaaatttgataattttt

SEQ ID NO: 21862 - DNA, 1844 bp, Heterodera glycines
  unsure (1)..(1844): unsure at all n locations
gaaaacatgccaaaagagaaggagaagggaacatnggcagaggcaangacatttcggcgggagcagctctttcctccccccccccccctctcttgtctttcgttttgctcccatgaaattgggtgcacttcatagagaattcttcgggctatcgaatgatatcaagattgttagaaattttgagtggcttaatatatatatttcaatgtgtaatttgatgacgacaactgacatctaactcatcactaacaaatatgatcagctgatttgtgagcaataatcactgaccaaaatcaatggctaataataaacggaatggaaaaacattaaaaatgttaaaataaaaatcaaaaaataaaagaaaataaaaagctaaaaacaaaataatattaatttataatttgaatttttggcacaactttatcttttatgctgaagagcttaaaaatgcattttaatggttatctaaataaaataaattaaaatgtagtttaattttacaaatccaattcaatgaagcgaattaactatatcaatgaaagtttttaaatttaattattttaaataatttttttttacagataatgaatcataacttagctcaaacttgatccaattaatcaatcttggagtttagcgacagctaaaagatctttactatcatatcaacttttaaaaatttagcaaaaatttatcaaacttgttactaaaaaatttcgaaaaaataaactcaataatttgtcccggactttactggatcataaatttttggaatttaaatatcacacttttcttgacataattgaattgctaatcgtcctttttcgaaatttagaaatactgtcaatgcaatccaattaattagatgtttaaaattggttggacgcacaaaaattgaatggacgcattgagaagtgcttattttatgggatttaagagttatggaatctaaatctgacatccatttctacttagattgaaccccgaacccgatcagaaagtcatttcacaaaaaaatgaataaataaatctactaattgggggaaggttttagttcgagatcgaagcgtttgaaaataagggtagaaatctcgggaatttttcattccccattagttcgatttgcctgaaaaaaatgacgttaagtgtcaactttcgctgtcttttgtatgcatagtttttcctcaaaaatcggctcatgaggtgttactttggcgcgactccatttaaagttaagactttttccggcaactttttacctcacttaggagcacaaaacgcacttattttttcaaaaatataaaggaatgctgattttaaatgttattaatttgttttttttattccttcaatttgctcagctattataaatctgtcgaaactgtcttatattggtaagggggtagggtcgggaccgggactttttgggttgaaaaaccgggactttttggctgggaaaaccgggaaaaaacccgggaatttcccggtcccgttcaaaactggtcaaaaccgggacttcggtactcagttgtactcagttatccgtggtttggtcccggtcccgacacaccctatattttgctccaacaaaatgtcagacaaccgaaaagacgcagaggcaaaagcaatgtaaaatgaaaacctcattttcaataaaattttgttttgactccttcaaaaatgctttttacaaaaattttttaaattgaagggatgttggaataatttttcaggccggatagggcttctgcttggggggaagttggtgaagggacggcggtgggtttttgtctttttaaaaaaagaaaaaaatttttttaaaataaaaaaaagaaaccccaaaa

SEQ ID NO: 21863 - DNA, 1162 bp, Heterodera glycines
attcaaagttgcatttttttcaagccctgatagcctaaacagcattaaaattacgaaaaaacagtcttctagtttgttagggtccaccaattctgttatttggaaatttttactatttttcaaaaatttgagcccaattttggacaaaggagcaaatgtcgaggccgtaagtgtcggcgatcgcttagggtctcaggaacttaaaatgttagaagagcaaatactaacattaaaaaaaaaattctgcaatgagaaaacacgaaacacagcttttttcgagggaacgggtcgttttggcgccgccgttttggcgccagcctcagtttttttattataactttttttcttgttgaccaaatctaacaattttggtatcattcgaaagcccttcacaagctctattagccttacaaaaaacaaacaaaaattttagcttctaaaaaagttattaggaaaaaacctcaaaattttcgacttttttgcaatttcatgttataacttttttggtaattgtctaatcgcgaagcaatagcttagaaatatcttctaaacatgttaagctttcgaataataccaagattattggatttggttaacaaataaaaaagttatagtccgaaaacttgggctggcgccaaaacggcggcgccaaaacgatacagacccaatttttagtcccgcatgtccgaatccaatacccattattttcgacatttgtttcgaattagggattaggaattggtcaaaatgaatgcagatattcataatctgcgctttccgaatattttcgcgacttttgaagaaacaaaaattgattaaaaactgaccaaaaattggaccaccaatacaattttgcattccattccagccaaattattcccccacccctttcctaattaatgcattccacatgatattatgtagtattgttatttattttttatccaaaaaagtaaaaaataatcattttcgaaaatttttttgaacttttttccaaatcaaattggtcaatttactttcgaaacatttttaagcaatttttagaactacatctaaaaaacaaattattgcgacacacaaaagttcttcggatttttttataagtaaagacccaacatggtatttacgaaatcaaacttgtgaatcgatagaattactttaa

SEQ ID NO: 21864 - DNA, 1863 bp, Heterodera glycines
taaaatgttaatttgttggtgatgattttgccgtccactcttttgatgggactcagttttctccaccagttttccggaggggatattttttcataaaattttatcaaaatatcacaaatttctcctaatatttttgtgaaatttctttcctataatttttcccctggggcataatagaaataaatatataaaagctaaaaaaacatctaatatttgatgcaatatttcctagaaatttcccctggggcataataggagggactgagttgtcatcggctaaatttgttggccgggcgggcgcggaactgacgaataatgccaatttttcttttcctttttttgttgttgtttctgctgatgtgccgtcccgtcatcctctgctgacgctcagcgagccgtgaaaatgtcagaaagcgtggggagggggcgatgagcgtgccgccaaatgaatggcccctctagggacaaaaaaaggcgggtgccattgtggagaaaaagccgggggcggcgaatcccaaacaacaaaaaaggaaggcattctgcgggtttatcccctcacccagggcactccttaggctttatcccctccctctccgcccccgcctccttggctggggcacaatgtgccaatgtttttctttagcagcagcaattagccctccggcttttccctcggctcccatttgcgctggaaggggtggccgaccggctggcggcatgccaatgcttgtcagtcgactggcacaacaaatgggcacgagtgggggtggcataattagttaaatgcactcagggggaaacgggcggggggggaaagcattggaataattaattaatgctttctctgacattaagtgcgagggaaaatggaaaaaatgtaattttttttattcagagcagattttgagaatttattcaacataaaagaattttaattaaaaaaacaaaggaatttttttaactttaagcggaaaataaaaagaaattttctcattaataaaaaatagctttttaatagataaaattaattaaaaaatgacagaatcataatttaattaaataactacggtaaaaaaaattttttgaaaatgatgtttaaaaaattaatgccataatgcttgatcattgaaaacaaatttaaaaaaaacataaaagaatttgaaaaatcgagccaaaatatgctgaaatggaaaatcataaatttttctaacacatttaccagttgaaaaacttttatggtgtccacaggcggatttaaaatgtgccaccgaatgcgtttcataaaatgccaattttaagatttttcgagaaaaactcgtcataatttttcttaaaaaacagccaaattaaataatcttggtatgctaagatagctctcgaattgctctattagcatgaaaagtttcaaaaaatttcattgcgattcacaaagttgtgagcaaaaacgttcaaaaaattgcaataacattttgaaaaatgaatggaaattttctgtaaggaaacgcccatagtggtatttttttattgaaaattttatctttttagtgtattagaattttattaaaatgttaaattatttgtaaaattaagaattttgccgatttttttcttccctaaaaaatgggtcagagaatcagaaataatttcttgaaaagcgagtcattatatgaaattaaaggtgaatttttgtaaaatggagtggacaaattcagaaaaacattttagacattttttattcaatttagaccattagtaatgttaagacttaatagtacagaacatcttttttagaaataggaattcctgactcactttgtccggacgcatttaacgcgacacacaatcaatttttgttttctcgat

SEQ ID NO: 21865 - DNA, 2341 bp, Heterodera glycines
  unsure (1)..(2341): unsure at all n locations
atcattgggccggacaaaggcaaaagagaacgaaaagcagaatagcgaggagaaagcggaggaggtaaagagaaggatttcatcaaccaaagcacaaaacacagaaacaaacaaatgctattcgagactctcgacttgagaaagtctcggctttttgggccttggtatcactttcttggattaacatccgttctcgaatattgtcacagctccctgagaaggaccgagtcgttctgttgcacggcacaacgcgctatggtcgcattggcatcgcgtggtatttcgtgctgctccactcgcacaaaccgccgccggtgctggacggagctccaaggctggaaattgatgagcatgggctgattctgttctgtggctggggccgggagccgcccaacgatgtaatcaaagcgatcaacacgaagtacgggcttcaattcgcgttacgaaaagccaaatgaactatctcggatcacccccaaacgcaacgaagcgaattcggccattccattcattggcattgacattttattgatcagaaaactacaatttttttaccatgcttttcaatgaaataaatgtttgaacttacaaaggaacatatcgaactgttagtgtccaaatcactttaaaaccacttttatcgtgtagagcatagtcgatttgctattgtaaattttcggcttttttggctccggcgccaaatcatgccgataagcaatgagtaaaaaaattttttcttgtttttaaaaagggataaatctgtaaatatctaaaaattactataaagtttggaaatttttcgtaaatagtttaaaaaaactcaaaaatttttaaattaatgtctattaacattaaaacgaagaatttcggggctaaaaaagaaattttcgtgcatttttcatcgaaacactttccttcattttggcccctgttgcttttgctcctacagcactttcagctcctacaggctattctcgatcagccattacaacacccttgtcagaaaataaatgaatttacctaattattttatttaaaaatgaccaacaaaaatatacattttattgaagcaaaaatatttcattataaatcaattaaaattacgcatttaatagcatttcattctgcacattttcgtcaaattcctcagattcatttaacaaatgctttaattgatcaatcctaaaaaatcaaaaaattaatttaaaaattattttaagcacttttttatacattttgtgaagcttttgtgcacttgtaaagaaggaactcattaaaaaatgtttagggcgcggtgaattcgaatgattctgctgataaattggcaccaatccattcaaattttcattctctgtggtaaattctcttttcagtgaaaggccaaggagccaaaaagtgcaaaatgatttttccctaaatttgaaaatttaaaaaaaagaatcgagagttaattaaatttatcactttaatatgtagcaaatggttttttgttcaaattttgggatctgatgataattgtccaattgggcttggactgaattgacccatcccaacaaattttgccgaagtcggcttttctgataggcacagtttgatgagtacgaatcgaagtcgaagccgaccgattgtgagcaaacaatcagcgcaaaatgctcaaatttttcttcataatttatctctttaaaaatcctttcccaattttgaggattctccgccaaaatttcacttgctgaaaagtaattttttataaattaattttaattaaattaaattaaattttcgaccaatttttaattcttcgataattgtcctcattgtgaaaggattgacattaaatgcagcattttgttctggaaaactcggcgtaattattgtcatcgaactttgaagtgattgtcccaaaaaaatggggggccaaaaacgcccgacaattttgttcaatttgttaggagttaattgcttcagcataattggaacatttggccaatcccttgatttaaaaaaacgaattaaaaaaattatgcttaataatatttttaccatttggcataaatttcgaagaattgaaaaagtaaaaatgatacgggtgaatttgggaacaaaacgcaaatttgagttgccattattgacaaagtgatgccattgaaaaagccaaataatcccgaataaattaagcgagctttaaggcaaattataacatgctaaatgaataaatttaattttcaataaaaaaaaattacttttcgcccaaactttcacaattttcagcaatgatgaaagcatgctttcactttgcaccaatgcaatgtgaaatttggccgattgnatagcctaaaaagat

SEQ ID NO: 21866 - DNA, 1976 bp, Heterodera glycines
tttttaattctttaaaatttttacttttttaaattaggaaatttaaaaaaaattaaattgatttctcatttattcttttaaaattttttggcaacatattaatgaaattctatacatttagcattttaggcgggtttttaattttttttttttctaaaaccattatttttcataggattgggccaacaaatgtgagggcgatgcgcccgtgttgccctgtcaggatgtgaatgcgcccgacctgtacattccgttgatggcgttcatcacctatgtgctggtgtctggttttgtcttcggagttcagaaaaggtatatatatatatatatattttttttttttgcaattcggtttcgtttaaatttgttaattttgaaaataaaaaaaaaatttctggtacaattggcgaaatcgcggggatacacccatcactttttgccacaaagatctgtacattgaacatttttaaatcaaaaggttgcgattttcattgaaatcggtgctcaagcgattgcgcaaatttttcattataaaaaattaaaagaaaattacggttttttcaaaaaaaaaaaattcggacatgaaacgataagggggggacaaacgtagtgcacccaggcgttatatcgatagacatggaaaaaaaaaatttttttaaacttaaacaaaaattgataaaatttaaaaaaacgatatattttcatctgcaaacatgtttcatttcatggcgacatatagtaaattattttagattccctaaatttataaagcatatctaaccaattaccacaaccaaaagtttttttttcaaaaaaaattttctctttttttttgcaggttcagccccgaaaagcttggcatgctgaccacaaatgcgttgttctatttgttccttgagaatggcattgtgttcgtgatgaaatacgcgttgaacatttcgcagagtttgaacatttggcacgcactgtcctacagttcctacaaattcaccgggtctgattttttggcatttttaaaataaatttatttttccccactttttaggatggttttgtgccttttgctctatttaattggcggtcgaaaagtgtattattgtgcactaatttacttcatattggcaactgtgtttttcctggtaactggatttgaacctggactcaccagaaatgcaaacccaaagaaattttttatttttatttttttgaaattggaataaaaatagagttaatgccattttgcttgctgtttttgaaaattatttttttttattcaattccgaacgaaacaattttttgatttagcaaatctcttatccagctccttataatttaaatttcaaaatttttcaatccattgatttcatcttcaaaaaaaatctaaaaatttaattttaatggtgccaaattcagttgcgcagtctgaagacgtttatcctggacatgggctggagcccgcacagcgggcgcaagcggaagctgtacctgttgttgtccatcaccgcgttccagtcgctgatcatgtggttgttgaccaggtacgtgttgttgtttttgtgtttgtttctcctcctcccccctcccacagtctaattaaacataaaaattgaaatttaaaggaataaaattttaaaaaattacaagaaaatcagacccaataaaaatgacaaaatttgagtatttataaacgacatttgatttattcgcaaaattcagtaatccacctacaattttttggcatttttttaattttaattttctacccctcctatacgcgaaaaacgggtacaccccaaaatctcgccgggacaaaatctcaccgcagaaatttcaaaaaaaattttttcaaacagaaatttttcaaggaaaaaattcttagaaaattttttataagaaaatttcaaaaaaaaattatttgttaagttttttttttgaaaatttttcgaaaaaacagtaatttatcattaaatttcaaa

SEQ ID NO: 21867 - DNA, 2140 bp, Heterodera glycines
  unsure (1)..(2140): unsure at all n locations
tggagaggacagacacaaatacagtaataaaaagtcaccctaaaatttcaaaaaatgtcgaaattcccaccaaaaaaaattttattgttttttttgatatgataaatgaaaatgttacgacacaccagacactattttgctgcaaaagttttgtttgtctaaaattgataaatttcaaataattctcttcgaaattcccttccaaaaaaaattttttttttcagatcgagaaggccgtcgtttcccagcgtctcaccaagtctccgtcagcattggttgcttcttcatggggatggtaatgaattagtgtttcaatttttgactcaattttatccctcaggtctggcaacatggagcgtatcatgaagtcccaagcgtatgccaaagcgcgcgacccgtcccaggaattctatgccaagatgaagaagacgtttgaagtgaacccacgccatccggtggtccgggaactgctccgccgggtccaggaagatgcggaaggtgaaattttggcaaatattttttcaattttgtaacattaccacaatttttcttggtacacagatccgattgctgtctccaccgcccacttgttgttcgagaccgcaacactgcgttccggctactcgctggacgaccaagttggcttcgcggagcgcattgagggcgtaagttttttgggaactgtgcaatagcaatcaaatagacagacggacggtaccaaggggacgagggtccccacagggaggtaaatttaggagaaaaaaaacgaaaaacctataggcctatccaaattttttttctcttttgtgaacccaaaagccaaaaaaacccgtacgccgtcagggaacttgataatttgagcgaaaaatccaattttcatccattcatttattcagattttgcgcaagacaatggacctgagcgaaaccgccgaagtggaggaagaaattgagccgctggaagaggaagagcccgaaaagaaggaggaggaaggaaaggaagaagacggaggagaggaagatcaacagaaggaggaggaggatgaggaaaagaaaattgttgtggagggagaggaggaggaggaagcggcggcgcgagacgaactctgaagagagggagaggccgcaaaatgacgagcttttttttggagggggtattatgccttagggcgcgaaagaaatgatgatctgttgttgtttgtttttttctttttgactgattgttgcatttgatggatgttgtgatttatttgtggggtttagccggccgttattcgttcgttgattattatttattatttggacaaatttgacacacccaccacacactttgtttcccattttgagcaaaaaccgagaaaagagctttatcattggacaatgttcatgtttctgtattttatgcctgtgggcaatttgtgtggccagtggatttccacgaatttaaaaatttgcataattttatgaaaggtcttggcaaatacctttcccagtagagctgcaacctggacccaggcctgggtttttcccgggtccaggtccatgccatttttcgtcaacctggatttttgttctgaaaatataggctatgacacgcctgggtttttttgtccagcaggaaatccagttttttcgaaatgtcgagctcttaaaaaaatttccatcggtaggattaaagacaataaaagctctcatactgtgcattctttgctctatttggtgtaatttttggcccatttgctatttttgttgttgacaagcgtttttgtttttccataaaaatgcttttcctaattcccttaattgtctcttcctttctgtccctgcatttctttttgtcataaattatttttggctgcaataaatttcgctgacttctctaataggtatgttgttcgggaccaaaagttttccgaatttcgaccccgattttctcgctgtcgagtccgaatctcggacgacaaattaattctttgattaggtgaatcgaccgttaaaagaatgggggatgcgcgaaagcgtcgagccgtgaatttccccnnnnnnccctgtcgggggcaagggtcattttcattgcaaaatttctcgcataatataggcatactgtatttgttcatttttacccccatgaaaaaaatggg

SEQ ID NO: 21868 - DNA, 958 bp, Heterodera glycines
  unsure (1)..(958): unsure at all n locations
tagtttcgggaaacanccagtgagaaaattgataatgttttcgggattcacattggcattggcataattgtgatcattttgggggaggtgaatgttattgatgtcgttatagagtgcgccgtcatgttctaacttaactttgtttcgttttgttttaattttttctgctggtccatattatataatttaaatagccttaatttagtttataaactcattaaattataaaataaaaattcgttagaaaaaagagtgaaacaaattttggtaaaatataatgtgagttatgaattcttttttatatgcaaccacgcgaaaacggccacgcgaaaacgtacctcacgcgaaaacggccacgcgaaaacgtcctggcccgttcggatgataccaaatttatcaggattcgatcgttttaaaaaaaagttagaagtgtcaaatctttgaatttttcgaattttgaaccgagccgagccaaaaataggtttaaaccaaattccgcaacttccgggaaacccaaaaccgggctcaaaatcccggagctttagggacttcgggttcttacacacagcgtccgggaaatgagctcctgtgccagaaaagatttgcatgtgtggctcagtggtttttgtaagatagtaaagggacaaagggtggtggttcgagtccgttgtgcaacatgaatattttcatttatttttgtccaaaatattaaaaaatcacgatatttgggaattatttttgaggtttttgccaaccaaattggataatcttggtatctttcgaaagctcttgataatgagaagctttttctaagcaaatgctaagcgatttggtgtaccagagaaaagttatgaggctttaaaattttgtttttttataacttttgaaatagagcattaacaaaaataaatgcagcattaatcgatgcagaatttttttctctaatgatatgcaaaat

SEQ ID NO: 21869 - DNA, 1650 bp, Heterodera glycines
caaatgataatgataaactacaaccgcttctttgtttccgattcaaagcttaattttttcacttgtgtatataaaaatgcataatgcataataatgccaccataaaaatggacttcttatacactacaggacatcgccagattaaagccacagatacaattactaagatttgaaacaaaagcgttcattctaacctcctcgtgcgacttctattgcttgcccactatctcattgcttttcccgttttccttttatgctggtattctttgataaattttcttaagagaagaggacatatttctcagcgtgatgccaatgagatgatggatgatttgcgaaattatcaattaccaaaaaattcatcaattatttttccaagtttatcaataaagaaatgattaacgcacaaatattcaatttttttcacatgatcccctttcagccttgatgaagatcaaaactaaatttaggagtgcttttcgttcttttgaaaaattaaggttacgtgacaaacgcatatgggccaagcttttccaacaacgttaattggattgttatgaggagagttgacgatccaccactcggatagagccaactgcaaatctctctgtgctcattacgaaaaattgtcaacgtgcaatcctgtctcatggtgaattcacgaagaaaaaacaaaattgcaatcacatcaagaccattttggagtttgtgtctcatcatcttcaacaataaaatgcatttttaatggatttaaaaaaaagtaaaggacatgctcaatctttttttttaaagctcacaacaaatgaatcatttttctctctctctctctctatcaatttttcttggccttcttggttgcaatctcatcaacatcatttttttcttttggcacatcactgtcatcattccctgggcacttcttgaaaaggttgacaatccaatcaaatccagtgtacgtctgattgttcgcctagggcgtggtttgtcaaatacataataaatatcaacaaaaaaccttaatgttaacttttgcgatcagcttcacagcaatcaaatcgtccaagtgtttcgcaaggctttccggctccttctccttggcgagcaattcagcagctttcattcccaaaaactcttcggcaacactcgaaaacatggtgacacgttgagcaatgtctgcttgttcaacatcctgcagcagaagacggacaaacaccgtgtggatgggggcaatcgctttttggccgcaagcctcacacatgttatcatcggacaattttcggcggcaaatgagccccttggaacggaatgggcatgcctaaaaacagaaaaattaataatttaattaattaatttaatttggactttgtaaacacggtactgcatatttgtcacttttcccaaaacataaaaaacgccggccgaattgaagttgaccacatcgctgatgtgtttcggttcaactgaatccaactcctcttgctgtcgtgtcccttgctccgggagttgaaagcgtttaagagaattcattgcaggaagatcggaaaaaacgaaggaggatggaattttttaaaaaatggaacacaaatgatttttatttaaaaaaactgtggttaaatagcaaaaaaaattgaggcggaaaaaagaaactaa

SEQ ID NO: 21870 - DNA, 1554 bp, Heterodera glycines
agttcgaaaaccgagaccgaatattttctcgagtgacccttggctcccgaaaatagagacccgagattttagaaaatgatcccgagatcgagaccccccaaaaaacagattttctcgaatgggaaaatggctcccgaaaatagagacccgagattttagaaaatgatcccgagatcgagaccccccaaaaaacagattttctcgaatgggaaaatggctcccgaaaatagagacccgagattttagaaaatgatcccgagatcgagaccccccaaaaaacagattttctcgaatgggaaaatggctcccgaaaatagagacccgagattttagaaaatgatcccgagatcgagacccccccaaaaagccgagaattttttttttaattgaaaattgactcgctcatctctccctaaatagtataatggcaaaaatggtagtcgggcatgggagttgatcttcttctgtgcactttttgatcaccggcgcaattccccgattccgttccccgcaaaaaaggcacgacggcgaaaataccccgccaaactcacaacaaaatattgagggtaaacaatcaactgccgagaatcgaaaatgatactgatgatgatgattaatgtttgggatgttacaacgcaaaaatttatttatttatttatttgggcatttcaaaagtgtgaaaattaacggggcaatcgcgtccctccctataaaaacggcacggagggcggcactttgcaccaaaaaaaaaaatttttttttttttttattacaaatatttatgattaattgtaggtactacacctaaatatatttttgtttttaatctttgtttttgttgggtatgtgtttattattttgtacgcttaacggaccaaaaaaaaaaaaaaattgtattttcttcataactttttctttacagtaatgttgcaaccaaatttgacaaagtggcaaattttaataaaaaaaaaaaaatttcactaaaatttccaaaatttttccacgcctagccgtccaatagattattttatgctttttgccaaattttccaaaaaatacatagtagtcatttttgggccaaattcaattaataaatgtgctaaatgctattatgtatttatttcatccgaggttcaccgaatttttgaaaaaataaaattttgcaaaaaaaattttggggctaaaagcagaaaaaacttttttggattttcttccaccttcgaaatttaatgataccaagttttgttggatttggttgacaaaaagtgatttgccaaaatcctctacgatttggccttcccagattttgttttaaaagagaaaaaaacggaaattaatttaaaaatggccaaattaattaacggcaatgaaattgcgcaacaatttttggacgaagtggcccagggaatcagccgaattcgagaacagaacagcgacttcaacgttggcttggccattgttcaggtcagtcagtgtggctatgagtttggcacgtcccccgcaactcatgccaatgatcactattcactcatttttcctgaataattcattgat

SEQ ID NO: 21871 - DNA, 2768 bp, Heterodera glycines
ctgtattgttggcagttttttttaaacgagatgcaatttttattttaagatcaaaatctagctaaatcaattttaaacagtacctttcattcaaaaaactgtacttcattttggcccattttttctcacaattttcatctgataatggctcttctgaaaaaatttgaatcaaagagtgcacgagttaaaggtgtgttaatcagttaaaaacacaattcataatttttatacaaatttttgtccaggcatttccttccatcccacgcgtccgtgggtgttggcctctctgcacagcggagtcatccaactttgggactaccgactgtgtgtgctcattgacaaggtttttcaatggaaagctaacaaattctgggcatttacgacccttttataatggagggggagggtgatggaaaagccaaaagtggtgctaaatagggtaattaatttgttttgttcttttctaaaagaagcaaaacccctttgggttcttcgaaattccacgcttccccctcatttataaaagtgccatttaacttctcgtggttggagaataagtactcgcatcaataaatgtctaattcattcgcattcagtttgacgaacatgatggacctgtccggggctgtgacttccattcgcagcagcccattttcgtgtcgggtggcgacgactataaaatcaaggttaatacttttactctctgcacattaattagtcaacctcataacagttaatcctgggattttttcaattctattgaaacaatgtaattcagaggcttacaattactttattttcttgaaaatcctaaaaaaaattgacgggttcgtttcaaagcaattttggtgccaaaaagtatgggaatgaatgtaaatgcccattttaattgtaacactgactaaattatccatttcggagtttctcagtccgttccatgtccaatgttcaggtgtggaactacaggcagcgcaagtgcattttcaccctgctcggccacttggactacattcggaccaccttcttccacaagcagcacccgtggattatcagcgcatccgacgaccaaacggtgcgcatttggaattggcagtcgcgcaattccatcgccattctcacaggttttttgagaggaggggacattttttgtatttgaaaagggccattccaatcttttggtacttttctagtttaccggagcaattccacatacattttcaaatgcctataaatgtgtttttgaaattaatgaaaataaatccatacaaatttcgaattctatgcttcctgtaccaagggtaccctcattggcaagatgcccatgaggatatcatccatataaattttataatttaattttgttcgagttcgggtcaggggttcgaaattggcaaaaatgggtgctatattcgtgatcagcgacctcaaaaaccccttaaagcttattttcattaatttttattaagtattaacagcataattatggcgaataaaagtatattcacgattttttgtcaaaaaatttaataagaaatgggcaaaatgttcaacctcgggtgggaatcgaacccactcatgcaccctttccgtgggcagatttttttgaaaaacaaaagggtcccaaaaaaattactcaaaaaaagtgaaaaaattttcaaaattgttctccttgcaagtagcgccgaagattgcatttaccatttttactctcttttaaattggatttatggatttatcccctaattgaattgttgcaattaaattttcctgcccccgccccggggctaacatcgaacacattagcggggttgggggcggcggcgatgggcggcacccatttaccgccaccactcattttcctagactttggtataagtcttaaaaaaagtgcatgatgtgcctgggcaaagtgagcaccatgacgcgtgtgaccatgggctgtgtgcacgaatttcattgcaggtggcgaaggggctaattccgatcaatttagaacccatggtccccgatttcgaacaagtctaaaagtcgattttactggtctaaatcccggaagttttgcgcttgctgatcatcgaattcgaaatccgttccgatcaattttgaacacctgcgaatccccaaaattggagcatttaaattacagtttacgcgtctattcaatgtgtagattttcagcaatttttttttgatgaaaaaatgggaatttttttgtccctttttcctgtaggtgttatttagaggtaattgtggagcccggatttgttgtcaaaatcaggttagctttgatcagtgtcgtccctcagtctgtttctctctctctctagctaggtaatctggacaggaaaagcggttatgtgcaattttttcgaaaataatgagaattaggtatataccgtatttaatcgattagaacccccctctcgaatagagccccccccccccttcagagaggggttgaacaattgagccccctccaaaaaaaattttccaaaaagaattcaaattttctgcccattggtattataggtagggccataacttttttaaaccttaacgaaatttttcaaaattttgcagcctaatagaggacacagggcttgccaatgataccatgattgttggattttgttgacaaagaaaaaaacttttttatgctgactctaaatcagaaatcggatctcaaatgatagaatattgatgatatatgatacagacatatcaacgaaatacatatatgacaattcaaatgatcaatcggataaatg

SEQ ID NO: 21872 - DNA, 2492 bp, Heterodera glycines
aaatctgatttttttgagcccggtgttcttttgaataatttttgatggccgtcatagccttaatttcaaaatggacgtattcacatgccatgtgaatgtagattagcaaaaagacattcgtcttgatatgtgaaattaattcagccaaagctcctaattagaatatgaaaatggtgatgaatttattaagcctttttacattaaatattttgccaaattgtttaataattgctcattttgattttgctcactatcacagaagtgccttactgaattaatttcgtattttatgatttcattttctttagcttcacttttctcctctatgtatgaagagattgcgatcatatttatagtcaaaaatttaatcaatttattttgtattaaattcggttaaaattacacaaatcttttatttttcttatttcttttaaaaaagactccatccaaacaatcttaaacatttttcgtaagccgaatcaaatttaagaaactcatgtaaacttttcactcatattaattctcttattaatcttgcaaaaaatgtgcaattttagcaaaaaatcagctaataaacaagccaaattttacataattcccggctgtgtgttatcgctggatactaatagtcaaggttaggctttatttttttatatgctattatgtgaaaatgttttggcataataagctttttttcattcagagaatatataacgcgcaagatttagttgcacaatagtcggctaaccacaattatcattacaagcgcttggaattatatgtaataaaaattgcaaaattggatataaatatttttaaaaatgccgaaatatgctaaatatattcaaaaactcaaaaatatgtacctaatgtaaataaatgatttttgattttttagaaaaaaatatattagaaaagcatgaaatagggcaagcgcaaaatgccacgaagttaccgaagatcttcgaataacattttgtgtgttttaaaaaatttgtttttatacgactttttgaaaatgccattttatgggtacattttccaattttttgtattttttcttaaggaatttctaaaaattcataaaacttcaaaatataaaaaataaaaatatttaataaaaattgcaaaattggggtattgttttgatcatttaagaaaaatttccataaataatcttcaaaaatagccatattatttgaaataaatttggttttaattgaaataattataattatcttaatttattatatattaaattaaatttttactttaacatttgcctatataaatgaaaaacaaaagaaaagtattatttataatattttcagttgaaaaaatacccttactaatcaaaaaagcattcaactaaatgaattgaaaatgggacatcaattataaaagctttaaataaaatttttgaaatcattcaattttttgtgcatttcatttagtgatttttccttcatttctgttcccaaatcccactctcaaagcaattcgttttactctcaaccgtctaacatggacaagtgggctgcacttgtgtaagttaattgggtgggggaggggttaattgcccctagaatgaggcaatcaaagcaaaacccgaaaaatactgatcaccaaaacggtttaaatgcgtttaattgatctaaattaaaacaaaaaaaaacacgaaaatgagggtttttaatcggtgttaaatgggaaaccgaactagtcctaaacgaatcgagaaacacaggccaaatatagactatctgtccactttcagtctgttgatcgccctgatcaacgcgctggacagcgctgttgttcgacaacagcgcgccgccaacgcggacgcatcgaaaccggaaccgaacaacgaaaagccaggtaaattaaaatgaatttaataaaaaaaatttaatttattaatttgatttaggaaatgtggactgggacaaaggaaattcggacaaaagccagggagcgggtacggaaggaaagaacccggatgagccaacggaaagccagaaagtggaagaggatggaccaaatccgaagaatccaaaggaaagccaggaagtggaagaggatgaaccaaatccgaagaagccaaaggaaagccaggaagtggaagaggatggaccaaatccggaggagccaaagaagccgggaacgcgggaagcggaaggaacctggaggaaaaaaggccaaggcggaggcggaaagaaaacgggtggaaagggagggaagaacgcgaaaaaaaggggaaagagagcgcccgatgagccggcaccaaagtcgccgaaaatgccggataaatttgacctaaaactgccaagtatgcataaaacactgatcgtcctggggtcagatccaatcttctgacatggcatgttcggttacatttgttgtctgcatttttttgtagtttttaaatgaaaggtgcaaaaatatttaattttgtataatataagcaaaaagccaaattatttctctat

SEQ ID NO: 21873 - DNA, 1257 bp, Heterodera glycines
ctgaaaagcattagtaatagccagtagagaccggcgcgggacgggatcccgcgcgggattttgccggatcccagtccgcaatctcgcattttttggaaaatgcaagattttcgggattaatcccgcgggatcccgtcccgcaaatgtttgtttcgacagtaagtttgtttttaaaaaagatgattctatatggtataaatatcgttaaatttttacaattaaatgataagcacaggctcttatacattgtgcgattttcaaattttgctagagcctgcggatttgcatcttggcactcaaaccctgcattagtatgcagattttcccagattcgagaatcttaaataagaaatttttgtattcttgactacaatccagcaagagaagtctgggtaatacagaaaaatagggatgaaaaaatccgagggtttcacccccggtcaccgtaccgcgcccctggcgccaaccctactgtaccgacctgtcaccgccacgccgaccaaatacatcagtgtgggactcgagcagaaaacggcgccgctcaaactaatatccgatttccaaatgccaaatctaagaaaagtcggaaattttcgcatttgtatgggattggaatgtttccaaaatgcaatcttcattgctcaacacaccttataagcccagagtaaaacgcaaaatcactaaaatctggcttttttccttttttgggaccaatcatcaccaccattaccgcatttagcagaaaatgatgagtaataatttttaaaaactcgctgaatttcgttaaaatattcaaaaaaaattttacaagtactaatcccagcttcacacgtccctggttttctgcaggcgatgcctgttggattcagaaatggattttattagaattttttcttttttggttatttattgggaactgccagatttgcgcctcaacatttgcgcctcaacatttgcgcttccaacatttgcgcctggaacatttgcgcctccacttttgcgccccccacattagcgcctccacttttgcgcctccatttttgcgcctcccacatttgcgcctccacttttgcgcccccacattagcgcctccacttttgcgcctccatttttgcgcctcccacatttgcgcctccacttttgcgcctccatttttgcgccctcccaatttgcgcctccacttttgcgctccatttttgcgctcccacatttgcgcctccacttttgcgcctccatttttgcgcctcccaaatttgc

SEQ ID NO: 21874 - DNA, 1295 bp, Heterodera glycines
ccggcgctgttgaagacagcgtggcgagtgggcccggtgctgagcagtccgatcagcagaaatgccaacgacacggccaccatggcacaggcagacaccaaaaacagcaaatggacctgacgggggcgaatttgattttgatgagtcgtattttgtgaaatttttgtttaaaaaaatggggtatgtattcactgggaaagttaggggccaaaggctccacagcccatgctattttatgcggccgaaccgcaattccaaaagagaattagcacattttttgcatttttttcaattttaaacatcataaacaatttaatttttttttggttattttttgccaaaaaacaggatatttagaaaaataaaaaatagaaattttgtaaaaaaaaaatatgatgaataattaagtgttttcagaaaattttccttcttttttgatgatttgtttaaataaatttttctgggggagggggaacctagcgcacccaacacatgcacacacacacacagaccttgtccaaccacggcaaattgctgacgcgcagtgcgcgacgcgcctgctcaacagaggcagtgaatgcccatgccatcattgtggcgaacaacagcacgccgaacaggcagcagaggaaggcgcacaacgaagtgaacggcgtgcgggccaagcaaccgccgccactgtcgccgggcaaccgaagcggaggcggcggcggatgccgcggtggcgagtggttgagcggatggggcggcagggaagggaaatgcggtggcggttgcccatgctgagccaattcgggcctaaatttttgtgtcattttgtccccagttttttttttttttgctaaaaacctaaactcatagttttcggaaaaaaatcgtcaaatttttgtaaaagtcgaccaaataaacaatctttgtatcatttattatccacactcataaattacgaaggttttcatcgtgttacaaaaaaaaattattacaaaaattgtaataaaatttttatagtccataacttttttctaatatgatcaaatttttgaaattttgcaagtaaatggaaaatcatattggctatcgaatgatgccaaaaatgttgaatttggttgtttattaaaacttcttttaccaaaaatttgttatttcaaagatccataaaatttggcaagcctttcaacaatttctttgtaagcactttttgatcggtcgagcatttctgtccacttttgaaaacctataaaaaaatgggcactggtaaagaattgtggtccctaatttaacttttttttattttg

SEQ ID NO: 21875 - DNA, 1231 bp, Heterodera glycines
  unsure (1)..(1231): unsure at all n locations
ctttttcaaaatttctttcctattttttcaaaaatttttaaaaattcaatntatataaaatttanttctnatcataacaataccataaaattttnnaaatcnttctcttattataaaanttatnccatccaaacactttttnnantttnctnattcaacaatttataatnactcntnnnaatttttttaanaaaatctnaatnnnccatnanataaataacaaatancccttacaaaatatacataattnnttttttaatttnncnnattctcnnaaanaaaattcatttaaaaaattttgaaaaaatgcattttggaggtgaatttaaaaaatcataaaagttcacaaactcaaaataaaaatcataaataatgcttattaaaaagcccagagttttctccttagaataacatatccaaattaataataatttgtttgaccgatttttaaaaaatccgtaaacaaatcaattcacagctatgcaaagacttattttttacaccccaataaatgccttttataacttttagagactaaattcactccgtcaaatttatcagtagagaccggatttttatgtgctaaaaatcctgaaatatgtaataaaatatgtgctaaaaaatgctgaaatatgtgctaaaaacccccaaaaatgccaaaatatgtgctaaaatatgttttaaaaattgaaaaaataagtgtgtttttgcataaaaattcccaaaaatctcattctttatcatttttagcccatacaacgcaaatcaaatacatttcgaagtgtttggggtaaaattgtctttttttgataaatcatttctataaattgaaagttccagcagagaacttcgaaatccaatgacgaattaatgaattcgagatttcattagtttctacaatcgaagaaaaaattttttaatttgaaaattatgttaataattatgaaaaaagtcgatttttaggggtgtatttttcaattttcttgtatttttattgcaatttttctcaaaaatgccaaaatatgtgcaaaatatgtgccaaaccccaaaatatgtgctaacatattttatgtgacaaaacgccaaaatatgtgtttttatgtttttataagtcgctctaaatcaaaaattgttcggagataatgctatttttgggcttctctcgccataactaagccgcaaaaaaaatatgtaaaaacataaaaatccggtctctagttattattaacat

SEQ ID NO: 21876 - DNA, 1397 bp, Heterodera glycines
aactgaactagtaccgatgttgagtatttggtttgacggaattcgactgacaaaggaaggtccccaggtgtccgtgggatttccaaatgaaatttggtgggtggatagagcacccatgggttcttaagaaaagtgtttttattttctgcgaaatgagtctgagtgccgagttatgacgtgccaaactttttttatcgcaataaattaaataaatatttgcactgttttgtgttattcggtggtgcggaggttgtgctcctgccttccctttttgccctcgctggttcgaatccctcatatgttaatttattttccccgttttatttttgattttatgcaaattaatggccattgaaatcaattccatcgggtcaaaaatttttattcctcctttttcattcaattttattcattttcacacaaatggtaatcattaaaaaaatggttaaagcataaatataattcacaataagcacaccgtaataaaataaaacattcacaatttaatttctgacacatgtcattttttggcacttcaaagcagtatttaacgggatggcaaaaatttggcagaggctcgtccccgtaataacccgattttctccaggcaaaattaatccatccatgaaaacgttctgcttgaaactgattatggattaacgattgtaatttaacaatgttatccctgtcgtgcaaatttattttcacatcataaatcattacaaattccgttatttttctcgtaaattgcttccaaattctaaaactattttttattttatttttggcaacaaaactaccggaaaatgtaaacatctaatggttggcatattccagttgcatgttttgggatttgcttcacttttaatttaacattatccgggagtcgaaaatcattccaaccattccaactatccaccaacaataatgattgttctccagggcgtaaaactgggaccaaaacattgtgaacccaatcgatcattaaatttttggtcataatatggcttgtatttggaacagcaaaaacatttttggccttaatttttagcaaattaaaaattaataaaataatttaaacctgaaaaattcctttttgaggaaattttccttgtctttcagcaataacaatatatagtggtgacaaaagcatgccatcagctgtaatgattggcatgatcgtatagctatgtgttgtgcttgaaaccgactgcacaacacattccacaagcttggttccaattggagccaacgaccttttttgatgcagctcgagctcgaagcccgattgatcggcatttaaaacatctcgaacaaaaacattttcagacacaaattctctgacatcatccacaaatttgatcagattctgatttgatttttttcagggttaaaaa

SEQ ID NO: 21877 - DNA, 1768 bp, Heterodera glycines
atcattgctgatgagcgtggcaaccgtcagagttttgggtagagtaaaaaattagagtccgttggttatttatctaagtcattaattttagtcattgtgagtctgtttcggaaccgatcacaattggaaactgttgcaacgaaatgcacagctatgaacacattcagcgcatttttgcggccatgtgggacaaggataagttccaggcccattacaacaactgccgacattggagtgacggattttggtggaaagtgtaagaaaattaattgtaaaaaataataataaattttattgatacggaaaataatttaaaaagacgttttctctaaaactaattaattctcagttttttgtgaaaattaattaaataacattttcagtggttttttaaaaagcaaaaaaattcactgatttttaaattgatatatgctaattttctaaaaatttaactgagtttgggttggaaaatctaagttttaatatgaatttttaatgtcttaattaaccttaattgcttaaagacaccctgatgagtaccaaaagaaaaaggcagccgaagaaaaaatgggcgcgagaccgttggatgtgaagagttaaatggcaaaattaatcatgtgttttgagagaataatgaaatctttcgattttattcaaaatttattttggtatttgtcacaaataatcatatttacacagaaaaaatattgaaagatatcaaaataaaatattatttattaatttaatttatattccaaatgaatgggttaaataaataatcaaaaatttattatttttcaatcaaattttcgcataaataaaaaaaatggaaaaaataaaaaattatgttatttaaacagctattaatggacttttccccataaccatcttaacaaaaataaaataaattaaaatttgaaaattaagggagcgaatcaaatgcactttcgtttttgcaataaattcatataaacaatgtctatgtgcttaaaaatacgatttatttgaatacgtaaattccattttgatgaaacgatgaaattcatgagttttttcgctatttaagcaggtcatacaataaaagcatgcaatgaaaaaactctgtttattgattacatttaaactttaataattgttttcctcattttatttattaatgacaagaaagcacaaagaaagggaatttaatgtgttaatgtaattttttttcttaaattaatattgaatacaaattatttttttaatgtttaattaataataatttgaaattaaattttttgaaatcttttttagatttttaacttttctacaatgggaaaatgctcttcaaaattagtcaaatttttattttgctttttacgattaatactaattgggtcattggagcattacctgattcaactcaatgtgtagcaagcacaacaatcagcaaacaatttacgaacatttagacatttttcatttgaaattattttaatggagaattggtgtcggacatagacaccattgatggtttatatccgggtgtcaatttactcgcataacttgtatcaagaacgccaaaacaggtaacataattaaattaaatgaataaaaacataaattttgatttttcaatgtttgcaggtggtatcattcaacttcatgatgcgtatcatattccgcaattcacaactgctagacagtttgattaccctttggtctatcgacaccgacaaacatctatgcccaagtatggcaattcattaattgaaaaattaacaaagaa

SEQ ID NO: 21878 - DNA, 2130 bp, Heterodera glycines
  unsure (1)..(2130): unsure at all n locations
ttctgtaaaatgaaaaaaagtcaaacattgcaacaaaaaaaaaaaaaacacatgcctcagaaattacgagtgaacagttggtggtgttggcaaaagtgaatgtgaatgaagcaggttgcttttatatacactttaggcgcgcagttaaaatccaaaaatcgcatccctactaataaatgaaaaattttctcaaaaatttgtctccaaaatttattaattttcttggcaaattttgatattaaaaaataatataactacgatttggcataagtttgttcattttataattttgtcattttacacccctaaatttgatgtttatttgtgcctattttgcatttttttagtgtctatttttgggttttttttagaacctaaagcctgttttccagaaaactcattcttgcatttgaccgagagactcgaatgataataacatttttagggtttgataaggcacatctattcattaatttacagattttgacaaataatctcgcaacactaacattttcagtttgactcttaaaagttgcttttattacctatatttttgtaatttatttcaacacacaaatttttgttacagattcgtgtacaattatttaaagaaaacagcgctttctgttcttttctcgcttcaaaatgtctctttttcttcttcgtgctttgcctcttttcttccttttctctctgtgcttcgctgcctctcccttcaattttcgcgcaaatcattcgcttggtgccgaaaccactcaacagattgtgcccaccgtggcgactgaaacgaccgacggaccgaagcctacggaaaatgttccccttatgttggagaatgacaatgtcaccgaagttgccaaagttgaaggacggaatgccagtgacagcgaaattgaaatgagggaggaccaaggtttgcaaaaggaatgtaaaaaatgggttttcattttcaacggattcggaatggatttccttaggtttttaatttgggatggatttaatcgattatttcaaagtgtgattcgctttaaatatgtgtcatttgtttagcctttgccaacatcactgctcattcctccgacaatgcttcgcttactgagagttgtggcttcttttgccgaaacggtactgccaacaaagcccgaaaaacccaattattttctgcgtttagctaaatattccatacaaaaccatttttggcctaaaaaataatgcattccggacagtgtcctctaaaattctgtcagatttgctccggttctgccaccaaaaattccttcgtttttcagtgcctttattcgtcggcttcatcttgaccctcgtctgcgtttctctgctcctcattctttccattgttttgtaccgttattttacgcggcgcacttacgccgacgagtgaaaagacagcgaatggacgcaaagaaacgatgattcttcttaaaatgtcatttcattttgttgagccatcaatcaatttgttgcttttcccttttgttggcctcctttttgaggcctttggatttattttttgatcattttttgctgaattacaatacaacactatgatttgaataacgtttctccttttgatgaataaaattattgtcttgcaaaagatggttccctaacagcggaatttgaaaggtccaattcaggaaaaggctcgaaagtcaatagataattccttaaagtcatttggtgattagtggtttggtccccccccccccccctctaaatttgtctgtttatttccccgtcgttttggttccgctattgtgtcattggtggagatgattctgcgcaatttgatcaatatgatcgtctgtcattaaccacattaatatttattgctatgatccccataaaaagaaatttcttttatttagtaaaaaatggcttttttgatttggattcagttttgatctgacagtaacataatttaaaaaccatttaccaatggagcaaatccaacaataatttaataattttcgagggtgaaattttccgagaatcggaactaagtttaacctcgagcggacttggtaccgaaactcaagataaaaacgggggcacgagattagctcgagtcccanaaacggaaacttttctcgagccaagactcgagaaccc

SEQ ID NO: 21879 - DNA, 1521 bp, Heterodera glycines
accatccaagcacttcaatgcatttgttctgttcagtaatccagccatcaattttgtagtttttaatacacttttctcttccgttgcctgcgtgttggattgtcaacccctcattcttggctctccaatccaaatatttgatcgccttaatcaaaataagaaagttttttggtaacatttaccatatttaccagtatactcgctctgtcgtttctctcatacccagcctcaggcacatagccaactgattttccttcatgaacattgcgcgaaaaatgttcatacaggcgctaatatttgggaaagactttaattttttttaaactgtcagcctcacctagctattgtgcagctgataggcaaaacgtcatatccgttagtcacgtcccgcaataaggttttacgaaatttgagaatggatttgattagaatttcagtgtcgttttcacaatagttgcgcagttcttcgggaagaaagaatggcttttgtcgattcgcttcatacctatttttgtttcaaatattttttcaagctatttaaataccattgatcgaatttttctaattttgactgcttcattgatccaggaaaatagtcgtctcttggaggaagctgcggcaatcgaatggtataattttctcttaaaaatatagctgattaactacaattggtagaaccaaagcccgacctccgattgaagccataaggaaagaagggtttgtccgggcagtcaaggtcaaatgtgcctttcagtccatcaagccgtattggtaggagcaggcatgagtcacgccaaataagaagcgaattcccacgcgaatgttggaggcgaaattcaaaaatttttagcccattcattacaacatcaggtctccttctggtctctccgagataacgaagaacgaaatggccatcaaatctggacgcgttgtgtgccttaaatggaaatacattggtgcctgttgctctattattacccaaatatatgtgttaaattcttcactccacgccctcattatccattctacaaagttggcaaccggatcatcgccttcagcttcgctcctttacaagcagtgtccaggataaaataaatcgcaacaaaaagaaaactgaccaatatttgctccgttccattaatccatcctcattcatacatatttcacattgctcaattgcacattgaacagaatcagcacaatcggagcaggtcacacgtgcggacaggaagttgactttatggatttgttgaccaccagccgtcatcggctctaggcgcgtttccgtgtcccaacagacgatacggtagcgctgtttttccaacggtataagtatttttttaatgtaacaaccggtatctttgccatgatacacctagaaaaggagggatggtttgcgcagttagtgttcatgtgacgccgaccttgcaacgtgtacaatacttggtgaaacatttgtgcggcctttttggatccagctgatagacacgccagcaacagttgcaccgctttagtagtgag

SEQ ID NO: 21880 - DNA, 2880 bp, Heterodera glycines
agatttttttcttgaaaaatttctaagttagcaatttttttttttaaattttctcgggggggaaacgattcggggggcgtattattcagataaaaaatgaataataattaattttattattattatgaatattattcagataaaagtgtggttatctctcaaattaaattcaaattaaaattgaaatatgtttttttttgtaatacttttattatataggaattttgaaattttcactttcataaaattctttttttattatttgtatatataaattaatcactgaccttatttatccacgattttgttggtgcgttaatggttgatgctgcaatttattgttgttgctcacttggagagcagccgctgcaattttttttggcgcaagtgtcacaaagccaacaattggaacggggattttgaccgggggcggtgtgggaagaataaccacgaactgcttgttattgttgtcgttggttgttttgagcatgacatttttgttggagctgctcccattgttgtttctgatcggcgcagtgatcaaacgcttttgcgtgtgttgcggacgatgacggttgattctggtgttaaaaaagtgaaaccgatggcctaattaatgcacaattaattagtctaatttacgcgtacaatcaatgaccatcctcatttgtcagtttctttggccataactttttttgttcctcggacaataccgacattcttggtatcaaacgaaagtgtgaagtctcgggaaaaaagttatcacgaacttatttcattgagataagaaaaagaaaaactagtgcatatttttgtctcccatttttgatttggtacttaaaatttaaatgaaataaggttcattaattctggcttgagaatcaatcaagttatgaaatataaaaaattttccataattttttttatttttgtttcccataataatttatttgtaatttgcctttccatacacattatgtcggcgtgtgttcaattttctttccgctttttgtgttgcaaatgttgttagcttctcgcagtaaaagcaatttagcataaaaataaataaaaatgccataaatagtttgaaaatcatttctaatattgttttataatttaacgtaagtgaatttttgcttgcaaattttctctgtcgaaaaatgaattgggtcatttcccgggaacaaaaaaaaaacttttgcgccgccattttattaaaaaaacacaatgacctctttaatgacccagtggtaatttattatccttcgctaagaaagtgttgaaaacaggggaaaacaattggtattacttacaaagttccccttttttaatttattaaaataccaggagggacccttttggtttgcaagaattttttgtgataataaattgtgaaaattgttaaagagaacattcagggtcgctaattacaaacctgaatcaatttttgactaattactaattacaaacaggaactcgaacaaaaattcaattttttgtatcgaaaaaaacatccggtacactttttatgactaagattaagaataaataacattggttagtgatcaaaaagtcaattgcaccaccatgatcgtatcactccttcagggtgatccgaaaaccaaaaaatggattgaaatcgggaaaactttgaaaaaatattatttttcaatgtacttacaaccgctaacctcaccaccacagcctcctaaatagataaaaataaaataaaatttgaattttaaaatttaaataggcacctccgccacttccgccacaattaatgataattgggccgccccacctctcccgccaccggatctcaaatcctcattttgaaataataaattcaaaatttggatttgtaaaatgtatttttttcgccaaattttgaaatattaaaaaaattttttattggcattagttttgttatctaattacatttttctgtgctctcatttttgttaattgtccccgttaatttcccttccagttattttttaatagagattagttaattatgttcgtctgttctgctggtgttttaattgctttttgctgttttttcaattttttgattttgctaatggaattgtgaattatttgattttgggtactaatttaaaaaaatattattttataatgttatttaaatgtaattcataaaatgaaaataaatatttaagcttaatataattttatatttcaataaaattaatatatgaaaaggaaattaataacagaactaagaaaagataatgcaaataacgaaaattataatgggaaaataatcaaatataacaaacaataacatcctccaaaattacatctacgaaactgaagcaaatttctttttccactttcttagcgtttcatagccaattttcaattgctttgcaattattccatcgctgactttggatttctttctttgattaaaatattgcttcaacttttttaatttctcctcatcagaatgtcttttgcatgcttaaaaataataattaataaaaatctaattatttcccttacttttataatattttggcaccaattcttttttccatcttcgaaatgctttttctgaaattcccaattccttcgtaaattctttttgtttgcctttacataaccttttaaagtcatcaaatctttcaaagaattctttctttttctcattataaaaactatctttcattcttttaaattcaattttatttaaattcattttttttttccatttatatattttttcgcgatatgtgcctaataattttccaattttcctctcaattttggtgccagttttccattggtattttcctttttgcttcaacttttcaaaagttgcttcaaatttttgaatcttttctctttttt

SEQ ID NO: 21881 - DNA, 2231 bp, Heterodera glycines
aatcgcaaccatcagtaaaatgagtcaataaatcaatcacaaaatcgaaaaagcataatatttgaaattaaaatgattaaaaaaataataatgatttaaaatttgaaaatcgaattcgaacaatttataaaacccttaattattatggctaatttgtcagagtatggatgaggagaaattctggcaaagtcgggcgccggaaccaatccaattcgaagtgcaagttaaaaattgcgtgtgctcacaatgaatgattttctatgataattcttggcgccaagcaggaataacttttattcaggcttctgaccttgttctatcaaattttttagccataacgtgttttacgtgaaattttcttggacacgagaaaattaatcaaactgatactaaataatttggtttttaaattttatgttttcatataaaattaacttaattagaattattttatttgtgtgtccgtttcaactatgaaactttgcaagtgtctaacaaaaatgcgacacaaaagtgaagcaagtgtgtgaaaatgagataataaaataattaataataaaatttaaaaaaatgaaaataatttcataaaaataatcacaaatatttttcgcattttttgtgtcgttttaacattcttttggatttttcgcccctaaaacagggtgtccctatttggcactttgcccttattttcgccactctttcggcatttttgaaaaatttcttaccgaaaatggaattaaaaaatgcaccaataaggaccgaccccttgaaaatgtttcaataagttggaaaaagtacaaaaattttcaacctatgaaaaaataagccgaaaaatcgaattttctataaaaaatttttttttttttggtttttattcaaaaaatgatggaattaatgatttgttcaattttagctgaaaattatgtcactattttggactttttgtcactatttcgtcatttccctcactattctagttaatttcgaggttttttgtaactaaaaaacgcggccctagtgatcaatgaagacccagaaaaatgccaaaatagggacgcccctattttaggggcgaaaagtccaaaagaatgttaaaacgaagaattttcgcgttaaaaatgtgtttttcgtacttttctcactgaattaaaaccgcagaaaaaataaataaaaatttaaaaatccgctcccttttcattattgttacgtaaaaatatttttgattatttttatgaaattattctgttatctcttttttcgcatctgtttcgttttcgcttcttcttccgtcgccatttccgagagaagcgtttgaaaaagccattgctattcagcagtaggaggttaaagaaaacaaaaaatcataaggattttttagaggcctgcggtgctccgataggcgccagattttaatgaatttgttaataaaatttgaaatttttaaaggctaaaaataaagcaaattattctcgacttcaaatgcgtcatctccccacctcctttttagtcatttcttcattaattcacaacgaggaaattacgaattaattaacaaattaaattccgaataaatactttcttcaatttcgctgcgattataaaacggaggcggacggagaggagaaatcagaggaaatgccattgatggttttctctttttattgctttatttatttagcaaaattttttagaaaatttaaataagttttggcaaaatgtcccccttttcctctttctcctttccatcgtcgctttggtgcttctccttgccgcttctcccgccgcttccttcgctttctatcccgtaccttggcctttgacgacgacgccgtcggcagaagatgacgaagcgttttacgataattatgacgacgaatgaggagaaaagcaaaaaggaaccaaaaagcatggataattagttaattacaataattgatggcgaattaattaaagcgtaataaaaaagtttaacaaattttgactgaaaaaccccgcggtcgcggattcaaattgcgtagatcgctcgtcagcgccccacccgtgggtccactgcgtttcggcgctggcgtttcggcgccagcatgttttggctataactttcttctatctaatccaaatccaacattgttgatatcattcgaaagcttaacatgtttagaagcttgttctaagcgaatgcttcgattagacaattaacaaaaaagttatacatgaaaatttcgaaaagt

SEQ ID NO: 21882 - DNA, 1722 bp, Heterodera glycines
  unsure (1)..(1722): unsure at all n locations
tccgccgttgcattttgtgacgctaatacatttctcggcgtggacttttctgatcaaacaattncttggattttgtccaggcccctggggccttattcccgtcttgcggttaatttcttaaccgcggttaaaataagtaaaccatggttaagaaattaaaccgcgattctcgtcttcccttttttaaccatggttaacgcttaaccacggtttatttaaccgcggttaaggggccgcttaaccgcggttaataaaaaactatgaaataaataccaattacggaacaaaattatggaaaaacttttaggtaattaaaaatggtatacataattaaagaattcataaatacgctcccaaccctggtgcattggctcttaaataaatgtaaatatttcagtatttttataacaattttgtaaaattttccacatttttaaaaaccttccttataaaaatgctgtaaaacgaacaatacatctcatggacaaaactaaattttccaaaaatataccttcctaaaatggaaaattaaaaaaaaattatccactaaaatatatttcaaaattttcggtatcgaaaaattaactttgtattttaaatgatcatgagtaatgaatgatggaatgaatgtgtgatatgatatttgatgtttaaaataattaatatttgctatatttcaatgtttttttagaaagtcctgattttaggtcccaaaatctgttttttttttaaaccaaatgtccggatttgaaaattttaagttgagggcctgtaaaaaatacccttgttttttatgtgctaaaaacctctctaattttgggtattgcttagagaaatatgtgatttttatgcatctcatataataactagggttttttaggcacaaaaaatcacgaaataaaatttgcaaaataggtattaaataggcaaataatcacaaaaataggcaaataaaatttaacactttttaggtagcaaaacactaaaaacataatcaaaaattccacaagaaataacaaataatattttagggatcaatttttgggagttttttttaaaatttttaatacaaaaataataattattattttttaataggatattttacgaaatgacttatcgcactcagcacgagttgatgactatctatgataatggttgaaatgacctattttcggacaataaatctggaaaagtgccgagttgggaggtcaacaatggtcagtgtgcagcacagcaatgctgtcttaggtgctaggtcatttcgcgacaagtgcaagaataaaaatcaataaaattgggcacttcgcgacagtgcaaaaatggtgtaaaaatggggcacttcgcgacagtgcaaaaatggtgtaaaaatggggcacttcgcgacagtgcaaaaatggtgtaaaaatggggcacttcgcgacagtgcaaaaatgggcacttcgcgaaacgtgcaaatttaaccgaaagagaccgggcctcatcagtacggtgtctctttgggttaatttatttaaattaattattatttgtgtttcggccctaaaccgtatacacacaaagccacagcaatcaagcaaagcaaaataaattttattaagcaaactaaatattttatattgggttttaatttaatcttttaactaattatatttgaatatgattaatcaacgtaatttgttagaagcatactttaaatttattttgagtttgcaaggctcc

SEQ ID NO: 21883 - DNA, 1229 bp, Heterodera glycines
  unsure (1)..(1229): unsure at all n locations
ctttaccctggtgtaaattaataaagtatttgcaatttccggtttccctcttcaaaacgttgaacaaaaaatgtttatgactctaggcgggagaatatcttcacctgataatnaattcagcgattcagtataattcgatccggtgactggcttattaaaattagtcaaaacctgtccctgangcatatcgattccaaattagtccggattttttccaataatatttcataatttttgaaaaatttttctgacttaattttacgtcttgggaacgtattggcgcactactgctacattctgtagccgaagaataatctgccgatgattcaaacacgttttcacttttctttttacgtgatgctcttattaatcgtaactgctgacgcttattctcttgttctacggctgtttctatttttggtattttatgaattcccatatatggagcaacgtttggtattgcagaactcgggtttccttctatgatcactttctgtggtttattttccatcagctctttgagttgacgtctccgtttgtatagccaagagtgtcgtttcattttaatatcagctccgattgttttatcattcaaatttttatgtatatttgagtctaatgatgttttttcatcttgtataggatcgcctcggctacccatactcttcactatgttcataagcgcaatgtattcggtttccggaaccatgaccattttctttgtgtgcttcattatgctgttattttttcaagcaagtgttgagctaaaacgctgagaacaggcacaagaatagcaccaagggcaattccgctcccttgttgaagtttttgccgagctgagttctcactgcgagcgcgtgctatggccctgtaatagtccgcgtattgtgacaacctcgcttctggcttggatttaaacaaaaattaaattttaaaatatttgcgcaaatttccacaagggcaagtatttgttctgctgatgctccctgtagtagctcgttttttcgtttatcagacctagtgtccgcaagctttttaaaaaaatctatattttccctaacgtaaggactaaattgatacattttggattttttctacattcatgtatttatatagacaatgcggttattgtaatacgttattcgctcggtaaatagatttctctgcgttcgtccgggaatattttgctagtaagacgttcattttcctgtgcattaggatgcatattt

SEQ ID NO: 21884 - DNA, 1224 bp, Heterodera glycines
attatttcaaaccattagttttaaaaataagtttatttccctatattatttttaattaaattatcttttaccgaaccaaggctttgttaaaatgctctgataattagtgagcgcttttttgtgtgtccggtggtgcccataggcgccgcctggggatttttggaagttctagtcaaggattaaatggcacgcgatgaattttgagtgctacagtcaggaaagaattgatttaccataatttagagcccaacaaaattcaaagagcgctgattcattggatttttggcgtattgacacattgatacttcttacttacaataattaattgtgccaaatttctggctcctctcgcgaactatcagtctcggccagcactaatgtgggcaaatttttggaatttaaactttcgagagtcagcagaaaaacaatcatttttagggtttataagttttttttaaattttattttattttcgcgcgctgctgaaagagtaacagaaagaaaataaaacaaactttgataacaaaaaaaaaatttcgcaaacaattttttggcttttattttatgctcatcatttccaaattttgcacaattttttgcattatttttgcgaaattcggccgattcatctcacttttgttcagcacccaattgttgtacaaaattcgccattccttcagcaatttttccatttgtttccatttttgggtttgccccatcttggcaaggtcaattctgagcagattccattcgattgtgtgcatacagtcaaaagtcgcataatcccaatccttgtttcggaacatttttttgatttcattttttaaaatgggcacaatttgattcatttctgttttgtagaaaatggaaaattttggtaaaatgaattccataaatacggtgtgaaacattaggcacaacattaacacataataaggcattttaagcgaagtgaaaaattcgaaattcattttaaaggaattttaactcgaaaaaaaaagttatgcccaaaaatgttcgaaaacccggttccttgggtactttaggccataactttgctcaaccttgaccaaattttttggaatttagttgaactaatagagaaagttagggctatcgaatgatactaagaatgtttaatttggttgactatgacaaaagttatgggcagctttttgttgaaaatttccatttgatggtttttatataacgactcagcaccgt

SEQ ID NO: 21885 - DNA, 819 bp, Heterodera glycines
actgacaacagaggaatacggtagtgtttttgtttatctatctatacagtatctaaggaaaaaagttcaaaatttgattattagcttaaagttgaaaatgaaaatagccaatagtgaatttttttgcaatgaaagagggcgacaaattgggaggacttttatagcagagtcaaacaaatgccacacattcctcacataccaaatgccacaccaaaagtttagactttccgtaatattgtataataacagtaaatacattaataaataaataaataaataaattaattaattaatacttcaaaacacctcagcaaactaaattatgacagaaaaagaatacataaattcataaaacatatgttttgtcacaagtgctttgtcaaaagaaaatatttaatttcaatgatttacattcgcaaaatggcgaataatgggcacgaatttagtgaaaggtaataaagatatttaaaatgattaatctcattatcattactccaaagataatttgggtgggggggcaatatatctaattccagcacattttttttgaaattattggtcacaaaaaaattaaaaaccttttttccacctattttggtgttatttccataatttagggttgcgaccccgacgtcggggttggaaaagtcggggttcggggtcggggttgacaaatcgttcggggtcggggtcggggtttttcaatttttgacttatgccatatagtcaaaaaactttatatatttttgctccttaaatatttattattcattaataattttatgtgcttttttatttcataattatttttatatagaa

SEQ ID NO: 21886 - DNA, 1409 bp, Heterodera glycines
ggggggggcgtccatatcagcccatcccaaccatcccaaccatagcatggaacacacaataaaacagtggccgagggaaacaaaaaacaaaacagtaaatgggggaccgcccaaatgcgggaaaattgggggacaatcggcggaaatttccattttcactcccccaacacagcagcaccattcattgttgccagccttcggctaattatttttggaaattctccgacaattaatgggcccaccgtaaagcaatgaatacggtagcaaagtcagaaatagcaggaacattaattccttgaaaatgatcacttttaaatattttaaaggcacaaaattatgccaacaatggccgttggttattacggtaggctttgcccggggcgccatttaagggaaaacatttgtttgtcactgatgaatgcccgcaaatgcgccaattgaaacaaatgcgcgcatttgatgggtacggtaatgaattgcccgagggcaccactcaaatgcccgcggacgaatcagtccgaaaggtgtctcaatttggggatgtttttcctcactttcactaccaccatcacacatcatcctccatattcatatgctacatcatctccattcttcaatcttcatcttcatcttcatcatattcgtccaatttgtccgttgtcccccgcggtgattcccccccccccttctctgatggagggcatggaaaaggaaaggttgcttcgggcaaaatgtcttatttttgccatttatgtaagtgcacttccacgacatcgcgcgaaatttggacatttggggaaaggggaggaagaggagggcacaggggtgcaatggcaaaatacaaagcaaaaatacattaaaaaagcaaaaaactgagggagaaaagtgagggagaaaagtgagggagaaaagtgagggagaaaagtgagggagaaaagtgagggagaaaagtgagggagaaaagtgagggagaaaagtgagggagaaaagtgagggagaaaagtgagggagaaaagtgagggagaaaagtgagggagaaaagtgagggagaaaagtgagggagaaaagtgagggagaaaagtgagggagaaaagtgagggagaaaagtgagggagaaaagtgagggagaaaagtgagggagaaaagtgagggagaaaagtgagggagaaaagtgagggagaaaagtgagggagaaaagtgagggagaaaagtgagggagaaaagtgagggagaaaagtgagggagaaaagtgagggagaaaagtgagggagaaaagtgagggagaaaagtgagggagaaaagtgagggagaaaagtgagggagaaaagtgacgcagaaaagtgagggagaagtgattcccctcaaggaccaaatgaattccctctgctaatttttatttttatttgacc

SEQ ID NO: 21887 - DNA, 1427 bp, Heterodera glycines
atactttaatcataaaatttaatacatttaaaataggatcaaaaatagtttttttatttcttttattcgttcggttcaactccataaaaacattttggtataaatttgcatgtatcggtgacatcaattggatgtttcaacacttttggaggccaattcttcaactaaaccaaagaaaatttttagaaatatttaagagaattttcctttttcgataaaatccgaataaccaatattatatatacgataaaaaaaatgttctgacctatttatgccaataaattcgaggtttttaggtcatatttagaggaatgaaccctcctactctgtccaggcatttgcgcccctgaaattttacgcctatgtccaaaacagattctaacaaaaaaattttcaagcccaaattgcctaaacgatcttaaaattaagaaaagagagttttcttgtttattaggagaattaattctctattaaataatgctttttcaaaaatttactaacaatcaaattatcataaacaatcattttctatcacttatataatgatgttaggctatcagggactgaaaaaacttaaaatttgaacccgattttggacatggagctaatttctggacagcaaatgtccgtgtcgcatttgtggggtaaccaaacctacgtattttgccagattttatgtcacttataaatccatcacttgccttagccagccgctcttctcctataagttttgcggcgaaagttctcacaaaatgaatgcaattgtttttgatcacatcatatttgaacatgccgaatttggcttccgtataatctccgttttccatgtaaaaatcactcaattgatcaaaaattttttgaacttcccatatgcttttcttggtagtcccaatttcaattaattttctaattaaacaaaaaaaattttgagtgccaaatttgtttaaaaacgaacattcctctctcggggtcactacgcctacgaattttgtctgaaattaatgcgccatcctgattgccaaaatgaaattctaaatattattgaattaatttaatttttctgtttaaatgaaataatttttaattgaatttaattgtgtattatataattaccgatgccataaaccttcagggcatgatgttgaattcccattgcctcggcaattgcgccaatttttaggcgaattggaaacttaaagaatccattccttagtgatttaatctgaaaaacttaaaaaacgaattactcttgggttttgggtcagactcttggcttttttttgggggggggggttgaagtcaaaaattcgatttttaggggttttttttttttgaaatcccaattatgggtgtagatgcggtggtgtcacagtcctaataattatgcttcacattatcgcataaaacttcatttttcttattaaatt

SEQ ID NO: 21888 - DNA, 1844 bp, Heterodera glycines
  unsure (1)..(1844): unsure at all n locations
tttttgaatttagtttatgggcagaactgatgagcaaggaaatttggtatacggcgactttgctaattggcgaacaattgaagtaattaaaataatttgtatttttaattgggtaattaactaattggttgtttattaggggaacccaaacattcgccgaggggtcggaagagatggaaaaggattcaccgaagacgagtcggaaaaagcctaaaaattaacaataataaaaatttaaaaatttaattttagaattaattggttccttagccaacagcaaattgatcaaattttggccttctctgctccgcaacctggcgtaattacttgattactttaattgaaattttgaaatggatttgaatgtaaaacgcataaattggcgttagcgaataaaattacattctttggctactttttaaaacaataaaagaaaattttttttatgaaaacaaatagaatttttccagttttataaatttttatttccggttaaaatttaattttatttttatgggcaaaagttaaattgatatattttgctcataaaccaaacgattttaacttttaaaattacccaaatcaaaatctcagttgacacatttcgtttcggcacatattagtgccagaatttattataaaccggattttaaaaagaacgacgtttaaaagaggatgtcattttcccaatcggtacagaatttcttcatagactctttcgggttggcgcctcgtttttttaacctcaaatttttcaggtttgcccaatcagaatcgaattccgctggatggaggtgtacaaattggcattttttacataaaaattttcatatttatttaaaatatttattttttaaatcaattttttccatttttaggtcacccatggcaacgtgcatctgtttgtcggcggcgccacgcagttgccgaacggcaccgatgaagcggacggggacatgtcggagcagacacgggccgcaaatgacccaatatttttcaatctccattcattcgttgattatgtaaaaaaatgggaaaaatttatttaataaattttttaaattttgaaggaattaagttttctaaaatttttggtccattaaaattggaggcactctctttttttcagatctgggagatgtggcgtcaatccagacaaacgcgcgaaagtcgagaaagggactacccaatggacaattcggtaaattatttatttattaaaaataatttaaatttaatatcatttaattaaatgaaaaaaaaaatttaaatttttttattaatattattccatttaaccctatcataattttttttctttttgtattgttattaatatttttatattaaaatagaatttttaaaataaatttggataattatttattatagattttaaaatattactttgttaaaaatttttctaattttaattatttctcatcattggtttttccatttaaaaagaaattaataaacagtttgatctttttcacatttttctttgcctttaagcaatgctcgagccctcaacattttggctcagcaccgatgcgaccatttcaggtaattaggcccaaatgtacaaaaaattacccaaatttacctaaatatttttaaaatttgaaaatttcttaagccgtggcaaaaccgtgacggcctgaacaacaaatacacggacaacatgtatgaatatgcgccacggccgagctgtcagatgngccctaattgtggatccaagtcactaaaaatattattattttttttaaatccctaaaaataactataaaaaaaaaatttcgaaaatccgtaaattaaaaaaaaaatcacattttgattattga

SEQ ID NO: 21889 - DNA, 1569 bp, Heterodera glycines
  unsure (1)..(1569): unsure at all n locations
attttgattatgnattagatatttgttttgtgaccgctctcatggccagcaaccccattgtgcggccaaagttcggcctggtggaaattgcacaggatttgttaatggttgtcaataataatttgcttatttacgaattaattaattcattatacctttttaatgactaaattttcaggtaatttaactttgtaggatttgaaattttgcaagaaaatatacaattacctaattaattatgaacattctgagccattcttacaaattccaattaatgaataaatatattttagtaattaaaagtctttcccaaataatacgatgaatatttattaaattaattatacccatagttatcgatattataattattatgtcgttgttaataggcatttaaaattcaaaatatattaatgataattttcaggtgaagatgtttgtcataatggcatctgccaaaataaccgatgtgttcagacgactgacactgtaaaatatttcattaaatatttattcatttcagtttttattattatttatttcagtcaagcacgccatggccaatgccaccgacggatgtgacaacaccaaatccaattcggccagtacaagtgggtcattttactattttttaataattagtatttaaaaatattaaattttataaaatttagtcctgttacaatgagcacgaatgctgttctgtatggtcacaaaagggtgaatgtcaacgcaatccgggcttcatgaattcctggtgtaaggccagctgtcagcaagtaaaaatcgaaattcaaatatttaatttaaaaaattaattataaaaattagaattgcaaaatataattttataaaattaaataatatttaaatttccttacgcttttatttcaaatacttaagttgcttaattcagtgtcaacctgactatgatctttaccaaggtaattttttactgtttaatttatgtatgataattaagggtttggttttttcttaatactctacccattaaatcgctaattattgtgctgctgctgctgctgcttaattaattaatatctttcatttttgtaagaatgtgatgatcgtcatccgaattgccaaagttggaccagccaagggcaatgccaacagaacaaattttggatggtaaatatttaagcaaataattataattgtttattaaatttacaaaaaattttaattgtcagtttaaattttaaaggcagaaaattgtcgtcaatcatgtggaaaatgccgcgtttcacgtcaacaggtgtgcagcggagggcacgacagtcagcaaaatcagggtaaattcaaaatctcaaaaaagaaacataatgccaaaaaaattaatatacttaaatataatcatagaattaaaaatatttttttaaatatttcaattccgtaaaatagaaaagcataaaaaatataataaaaaaataaataaatgtaaatgaataacataacaaatttatttaaattgcataaaatagaaaggcattaaaatatgatagaattaagaggtgtaaataaataatatactaattttttataaac

SEQ ID NO: 21890 - DNA, 2666 bp, Heterodera glycines
tgttttttcgctgtcttctccccattatttggcttttctttttcgctctctccgcccctcggcggatgccttttttttcctttgcaaattcgcataaaaaatggccaactgacagacatttgggagagaaccgaaaaattaagaaaataattcagccaaaatctgtggaaattctaaaatatatgataaataaatatagtgaaaagaattaaatcattccaatttatagtaaaaaaaatgttaaaattatttttaaatgtttttttgttgtgttttgcctcaaatgaattttaacgcgggaaaaaacgaagtcactaaaaaggacgaaggacgaaaagccaaccaaagacagaagaaaaggggaaaatcaaagcaaaaagtgtaaattataggaaaaaaggtaaaataaaaattggcaaataaaaaacggatgtactgatcagaagagtaattgcttattaattgttcgtttttctcttcattttgcgctctttcaatccattagaaaatgaccgttttaataggctaattaaattcggaattaaggaattaacttcatactgcgagatgaacagaatccgacttccggttttttgggacacgaattccatccctccaataaatacctttaaatgtcttctttcagttcaaatcaaaactatcgaaatgtttacgttttttgcgccagttcaattttttaatttaatgataatttacaaaaaatttttaaatatttaattaattttttcttttgttcagcaattttttaaaattttctttggcatttgcgctaatttatttttaatattaaatcgttgccatggcgcggaatgaatcgtcggatggccgtgaaacttttctcccttctcttttccttttgccatccattaaagtcaatctaaattttgattatttgacttaatgaatttcaatttatgcgaaaggttcctgcaaattgtgtccaaaaaggtataaaaaattgaactaaatgaatggaatttcgtacaaatttaaaattgaaatgccaataacagaatgaaaacattggcatttctccttaattactccttaattgtccccttccccagggacttctcctcctcctcctcctctccctgcttcttctgctcatcctctgtttggtcgttctgttcggcttcttcctcttctgtcgcttttccttttcgttctgttccgtctcctctttctcttctgcctccttttcccccatttttgtgcttattttcgctcttttcgccttttacactttttttgccattggaacggcactttttgaggtgcttaagcactgttcagcaaaaaaacagcagaaccgtcgtttgccacaagctcatcgtctgcgccctctgctcttcgtgacggtcagtgctaatttgagcaattagttaatcaattaataattaattaattagtttatcaccccctcccttttagtgtgccgtttcccttctcggctttcccccacttttgctgctctcccttttgtgccgtcacttttccctttcccccttttgctcctcttcgtcccttccctcttccttttcctcccctttttctctcctttcctcttgtttttcctcctcttcctcttctcctttcttccctgtctttctctctcttctgatcacttcttttgttccgcttcgccctctcctccagcgtcaattgcacaaaatgagaaaggacgccgtttggactcagtttatgtgccaaaatggttggtccgaaattgtttattaaaaaatactcatttaaattaccgtaagaaataataattcggctgttttatacccaaatgcaattttccttctcaaaaagtgtctcttttaatttaaaccagggatgggatccgtccttgaatggcaaggacgtccttgaaattgggccctctttcttgaaaataaaaaatgtccttgtatgcaaggacgtccttgaaaatgagcatttggaaaagtttaaaaaaaatcaaagaaatttgaaaaatctttgtaattttcaacaatattttgattaaattatggcattatgtcatttaaaaatgtaatttttgagaatttttgaaattttatggcattaagtcactagtcactatttttcttaaaaaattagccaaaaatcgcaaattttggtcatttttggacaaaaatctgtaaacaactcgcattaaaaattacaaatttttccggacccccctatcctcaaaaaattttttaaaaagcgcgccgtaaaaaaaacccattttataaacaaaaaaagtcgtcgcatggcttaaaatcgcaaaaattaggcagtttttggtgaaaatctgttaacaaattgcattcaaattttaaaaatttttccccggcggcgcctgtcggcaccgccggaccccccccccccccctgtcccacaaaatttttggaaaaagcgcgccacaaaaaaagcgtttttaaagcagaaaaaagtcgtcgtaaatgaagaaaatgataagtgaaaacaaaaaaatgttggaaaaaaacaattccggtgaaaaatacaagccatttgaataaatattaaccatttttcattgcatataataaaaattttaaatgtccttgaatttcatgaattttccccactatgtccttgcaaatcggcatacccgtccttggaagccgacc

SEQ ID NO: 21891 - DNA, 2164 bp, Heterodera glycines
tatgagtaattttctaaatttaccttgtaacatgtgttgtccatatgtttccaaagactaattaagcatggcaaatacaaaatctataattataattgtttaaatctttttatttatttgttttttaatttacctcactaataatgccaaaaaccatgtataaagcgccgaccaaaaaatgtttacgttgttccaacggaatctgatcagtgtcatagctggcacagttgtacaaacgattgtacagttcgggtttgaagaagaacatttccattttaatagttttttattcaatgcgaaaatcaaaaagaaatttataaccttttaaaattataggcacagaaaaaaggttcctaaagactaaaattttctatctactaactctaaatgatttcttatccatttgacttcggaaaatgcatttaatgaaatttcatcaagtcaggccaatgtttctaggctttgacaatggctaaaataattacagttcaaaattgaaattcagaaattactaaacattaattttcagtacatttaatgagtataatcagcggacagatgttttagatggtgttgccatagggaatcattttaaagcctaataaaattcagtttgaaagtgtcaattatcagttatgccaatgtctctaggcatttcacaatggctaaaataattacagttcatttgaaaattaatttaattgctttattagcggtaatcagcggactataataaattgaatttgtcgaaaaatgttttttcgctcaaataacaaataaaatgaaaaaaaaaaatttttttgaacagaatgtctgctttgatctgatgaatgaaagatggaagaaaagccaatctgatgatcccacaattaacttactcatttgaatctaatcatttagaaattttagcagattttataatgaaaatagaaatttaatttatccactggttttatgtgtttatacagctgacaagggatgtgatatcgaaattacaaaattttggctccgaggcttaaaataggggcacaaagaacccagaattcgaacaaattaagaatattaaaatccaaaaaattcaataaacatgtatgaaatagaaaaaaattattgaaataaatttttatttaaaatattcaagaaaaaataaacggttcattttaaaaagcaagaagtcgttcaaaatcggaatgaaccttctacaatggtctccgaaaatgcgatgtagggcttttgtaataccattcgaatcggggataccgggcgttgtaaaatttaaaagttatttcaaccaaatatttaaattttaccttaacaccatgccaaaataaacattttttcttagcaaactcacttccaaattggtcaaaaatcataatctggtataaataattttttgatcagggtttccgacccccgacaatttaacctcccccaccgacccgacccccgaaatcttgttgttgattaatcaaaaaaaaaaaacagttttgcaaatgtttttgtaaaacaacataataaattgagccaaaattttctaatttaaaattaaatgtatgccttaaattagagaccggacggaccggggcctctccgggattttgccgggactcccggccctggtcccgttttttggacaaaccaccgcgaccgggagtcttggaaaaacgtgtcccggccccgggccgctgttcccgaatccggcatccatttcgaccaattttgaatccggacccaaattcgaagaaaaagtcgaaaattcaaattttttcggttcgtatttttagtctaaaaataatttaaatgttcttttttgttgaagcaatgacgactttcagtttttccgtgtatttaaataaagtgtgagccaaaatgtgcaagttgagtttccaaaaccgctttttagggaaaaaaggcttcattatgaatctgatcatgattaggtccgatctctttcaattgaactgaatccccttttaccaactaaaaaatatgcataaatttcattgattttattgtacgtatagttttgtatatcaatgatttaaatttttgatgatgataattttgataacaaataaaattgatttgaatatataaattataatttgaatttcatcgaggagctgtaagtgaaaaaacgtcctcatggattttgcgatga

SEQ ID NO: 21892 - DNA, 901 bp, Heterodera glycines
atgttttaggttgcatagcttttaaatttttaacactttcggagtccccagtcccccgaattagtggcggggttcggggggcaaaaagtcgggggccggggacctcggggggcgacgtgtcgggggtcgggtcggggaatagtcccaaaaatgtcgggggtcggggtcggggtcggggggctcggggtcggggcttaaccctagtttaaatttgcatttatataaaattcatttcttattttttaatattaacggggctgcaatttttaggtgctaaaaatcgagaaatcggggtacctaaatagttgcttaaaaactgcttaaatagttgctgagttgctaaaaaattggaaaaaatgtcaataaatgtataaatttttcgaaatcgattcattctttatccctttcggtagaacaattgtaaatcaaacacatttcaagattttcaggcaaaaagttttcatttgtccgccaaatcatgcccaggattttttctttttgaaaagtttattcttagggggtgtattttttgaagaaaaaaaattttagtttgtttcttaggaatgcatttttattttttttaatacacttttctacaacaattttttgttcataagcaaaaatagttaaaaaaatagtttttaaaaaattttatgactcaaaccagttggcaattgacaaaaataccaaaatagttgaaaaaatcgctctaattcgaaaactattcggagaaaatgtgattttcgtgcttctcggatcaagaactatccgcaaaaaataggtgaaaggcgaaaaacggaatcccggatttcgtgaattttaatttttttaaaataaatttattaatttttatattcatttaaatattttaccctttctttttggttttttggcaccgttt

SEQ ID NO: 21893 - DNA, 1497 bp, Heterodera glycines
tttattttgtatttttcagtcccgtcatttgagtcctaatggtataagaaatttcagttccgtctcgaagattgacttatttttcggaattttgatcacaaaatgtcaaattttaccttaaaaagtgtaaaaagtcatgaaaaaagtcaaaaaaacgcaaaaaagtcataaaaatcccaaaaagtgtaaaaaagtcaaaaaaaaagtcacaaaaaaatgcatgttagaagcttcaaacaaagtgtagaacacttttgaagtcattttaaggtcatttagtgtcagcaaaaaaaaagtcatttgacttaaattcccatccctattcatagcatatgcgcagaaaaatatatgcaaaatcatacaatttagagcctttgtaattatgtttatggaaaattagaaactttttataaattctttgttcatgaaattgaaatatttgtttttgtgtgaatactgaatgaaattcaaaagcataaatttggtcttttttgaacaaaacttttaacaaaaaagaggaagagacagaggaagagaaggaggaacagaaagaggaagagagagagagagggggagaaaagggaagaggaacaggagaagaagatgaagataacggggaaaagaaaggggaagaagaacaggagtggaagaggaagagaatgggaaagtgaatgaagaaaatgggaagaggaaaagaatagagcaagataaagggaagagaaaggggaaaagaggaagtggaagaggaacaagaaatggaagggaagatgaacaaaagaggaagatgatgaataaaaggcgaacacaaagaggaagacgaacagaaggcgaagagaagggaagaggaactggagaaaaaggaaggggaagaggaacagaagggaagatgaagtggaagaggaacagaagggaagaagaaacgaaaggggagaggaatggaagaggaagaggaacaaaaggcgaagacaaagaggaagataaacagaaggtgaagaggaacaaatgagaagaggaatagaagaggaacaaaaggcgaagagaaagagaaggggaagaggaacagaataggaagagcaataaaaggtgaagagtatgaggaagaggaaaaggaggggaggaggaaggggaaaaggaagagaaggcgaagaggaactgaacaaatggcgaagaggaagaagaagagaaaggggaagaggatcaggaggagaagaggaacaaaaggcaaagagaaagagaacaggaggtgaatagaagggaaaaagaggaagggaaagggaagaggaacaggaggagaagagggaaagaaaagggaagagaaagggggagaggaacaggaggagaagagaaacagaagacgaagaggaatagaaggcgaagaggaagagaaaggggaagacggacaggataagaagaggaagagaattgaagagaagcagaagtggaacaaaatgcaaagagaaaaagaacatgagggggatagaagggaaaaagaggaag

SEQ ID NO: 21894 - DNA, 1135 bp, Heterodera glycines
tattatttttgaccctaaaatcttattttcggccttggtgtttatattttgaaaaattaccgatcggaaccatggttttgaggggccggcgggtgccgataggcgccgccggaaagtttttcgtaatttttaatgaattttattaagaaaatttgttcaaaatctcaaaaattttcaatatttcccgccttcatggatgaatttttttaaacgctcggaatccacaatcccccgaattagtgtcggggggtcggggagcaaaaagtcgggggtcggggacctcgggggacgacatgtcggggtcgggtcggggaataggtccaaaaaacgtctcgggtcgggtcgggggctcggggtcgaggcttaaccctacttcaattcattaattattttccctcccccccccccccctctcattttgccattctcaacagtgatgattaattttatccgcacaggcgatttctcaaaaatgtctttatcttccctctgtgatcactcatctctcccttcctcctactctctccaaaatgcacagtctttcctccccgtcgatcgggtttcgcgtcgccgtcggccccacgacggagatgaccgtctgcaccggcaccgtcgcggggaaatggggcccgacttgtgccagcgaaaaattgaccaattcattcgtttccaaatgcgacaaaatttgttggcactgacggagcaattgaaattggccaaaaagtaaagtggcattaatgggacactgctaattgatgttagcataatccaacgcacaatttgtcaggaactgaagaggatagcgcccgcgttggctgaaaatccgctgaatttgcccaattttggcgttccgtattcattgaatcggcaaaagcggtggaatttgactaaactcagcgcggcacaactgaacacgcccgaggcaaaaaagcacaatttagaagaatttgtttggatttattttcagagtcaagagaacgattcgcgggtttaaattgtttggcaaaaagcgaatccaatgagaaaagggacagtcaatggccgttttgagcgcttttggcccggaccgattggccgatttggggaggaaaatgtggccaagttgagcacttttgatgcggaaaatgaaatcaac

SEQ ID NO: 21895 - DNA, 967 bp, Heterodera glycines
gattggccgatttgggagaaaaatgtgcccaagttgagcacttttgatgcggaaaatgaaatcaacagagtgtccaagtcggcacgaggagcgaacagcacggcacagctgatgcagtaagggaaacagcagacaaaatgccaaaccgacgcaaataaacaatttttatttcaggaaagggataaagcctaaaaagcgatcaaatcgacggaccaaaagtgtggcggatgagcagcaggtggagcggtggttggacttgttccagcacccgcgactattccgtggttaatccctccccgacggtttccgacggtacgcgtcccccgccggtgcacaattattacgcattcaaaacacaaagtgccagcagacatcagctgaacagcggctggcaggacaagcggattttcaaagggatgacgaaagaggattacgagaagggggacgatgggcgaaggattggcaggacaatgccaaatgggaggcactgagcagacgacagattgggtgggcacaatggagggtggcacaaaggaattggggacggacaactgattaatgggaatagacagttgatcaatggggatggacaattgatcaatggggatgtacaactaattaatgagaatggataactgattaaattcgggttacggattttcgtaattgaatccattacgtccagccgtggtgggaatatggtgcttatttggacgaattgcagtgaataattgactaattggaaatgatagaatttggaaatatcagtgaacttttttgggtggcgccgctgagccagcaattataattaaaatttttaaatcaaatcattttgtcattaaagactgtgcttgcaaaatgggccgtcccccgttgtgcaaaaggaggcgaaagatttgcgattgaggcggacattgaagaacataacgaattgcctgaaagaattgacgaggacgaaaatgaaaat

SEQ ID NO: 21896 - DNA, 1777 bp, Heterodera glycines
ctatgggggatggccaccatccccataccgtttgctagagtgatggccaccatccccataccgtttgctagagggatgaccaccatccccataccgtttgctagagggatggccaccatccccataccgtttgctagagggattgccaccatccccataccgtttgctagagggatggccaccatccccataccgtttgctagagggatggccaaacaatccacataatactgtttaggtggatggtacccataaccaatcccatccccatagacactcttatggggatggatcacatccccttaaacactcttatggggatgggatcgtccccttagacactcttatggggatggatcccatccctttaaacactcttatggggatggctcccatcactttaaacactcttatggggatggctcccatcccgttaaacactcttatggggatggagctgatagtcaatacagtcatctttatgtatgtatagatatagagtatattttatatagtaaaattacattttttcaagagtatctgcatggatgtccatgtcatgggcattctttgtgcaataacagccacattcatatagtccataaccaatcttctttttacagcttttacattttataaatgcattttttttacatctttggttgtgacatcgcttgtaatgtccatcagaagccctgaaattaattaaaacgtatggtaaattttattgcttttttaaaaatttatttgttgcccaattttccgaattaatcgatttgttttaattttgaatatttaaattaatttaccattttgcatattctccttcccaatgacacttgtgaccacaatcaatgatggcgtatcccatttcttcgagcacattgtttttgcattttggcgcaaagaaacataaatcattcgtttcaaattgccctttcttgcgcttttgttttgaaaggccttaaatacagtaagaaatttatgaattaattattgcttcgattttcactttattataaatttacgtattttttaatattgttatttaagcaattttattaccctttatagatatgtctaattctatagcacgatcttgtgtcatttcatcaaatgcattttgttcggtaggatcctcagcaccagtctcagatgacatttcatcataaattgttgagatagcatcacttataaatataggttcaatataaaaatattgtcaacaaattacagtataaatcttctgaagcaatggagcatcggttcgcaatgatccgtcctattgaagatcttgggttttagctatcagatgaacttggaggtagtataatttctaattgattttcaaaattaattgttccaacacttcctgcagcattgcatcatggatgatcctctaactaaatttaaccaccatatattcaatttgaatcggtccgcgacagtaataccatattgttttttagtagcaatcatagcagatgccttgtcatttgggttagcttcgtatttgtgcaaaaaatacagatatagagattcatcatttattatcaactttgaattattggcaattgattgtaattctaccacctctcccctcggttggttgctgtaattttgagattatttggtataatatgaatatgtttaaattaaataatacattattttggtaattaataataaacaagtcctaatcgattttgagtcaattatttattgtcacttaaaaggctgtatacatatacattttgtagttcgaggctgactttag

SEQ ID NO: 21897 - DNA, 554 bp, Heterodera glycines
gtggtcgaacagctgaaaaaattattgaaacattaactttgaaaaaattctgaatcatcctcaaaactcacctccgtgccggtgccttgctgaacactgtcgggcatgctgtagattttgttgtgcatcgtagaacggcagccgccctccaaagtgatgcgcaggacacgaaaattggttccgccgaggtccagtgccaggaattcgcccttttcttcgccaacagcaatcgcgcggatgtacgtcggaagcattttgacgcaagctgtcggagctgaaaatgggagagggaggggaaggaaggggtaaaaatggtcaaaattctccaccggtcactggatcaaggcctttttggtagtccatctcgatctttgccataatgtcgcgcagctgattgtcgtccagcgccaggcacttgcacagctccttcacctggttaaaaaaaattgactgtgttgaaaaaaacatggacaaaaatggacacctcgggcgtgggattatgctgatgggtggtcgccattagcagcaaaatatgattaaggtaggtaggcaat

SEQ ID NO: 21898 - DNA, 997 bp, Heterodera glycines
gtgccggtgtgtgaaagatggtcggcatcagacagcacgagggcatcgacgagtaaaacagcggactcttcgcccgtttgcttggcttctgaagggcgatggtctctctcccgtccaatcattggtcattcattcgttcattgtcacctgttggtcccgccgctccagcagaaagcgtcccgaggcaccgctccaccgactttgcactttccaaatgttttcctccggctccaacactcggaagttggcctgctgctgtggtttcatcgctccgccggtgcctttctccgttcggtttggctccgtcctttgctgccccacaacgatttcttccaccagcgcgtattcgtccaagtccacttcgtaacattgagtttttgcaaatatctgttcattaggagcggggggggggtagggtgagattttggcttcgacggtcgcttttccttcgcttggccacctgtttgatgatatcccgcgcggtgttgttgatgcttgtcctcaaaatggcgtacgggtggttgtcggaaatgttgtggacacacaccaaaaaggtttcgcccatcgatttggcgcgcggatgcattccttggggaaagaaagacgcatggccaagcggttaaaccctctgctgcttttgtttgaattattcactcgcctggctccaaacgttctcctccgccgcccgtgctcgtccccgacggttcgaccacgtcgatggatcttccgtgcagttggctgctcgactgcgatttgttcggctgttgttgatctccgccggcgctttgcccgaccgatttgcgcggaggcgccgttccgccgaaagacattgtcgagacggacggagcaccgctcagtccgccgctactgctcggctgagaacccttaatgatagaggagaaaaggccgggacgaccgcaagcatcctaaaaaagaaagaaagacattgaatggggttgggtggtgggtggagggagtaaactttggcatttaatgc

SEQ ID NO: 21899 - DNA, 2447 bp, Heterodera glycines
  unsure (1)..(2447): unsure at all n locations
tatatacactcaaatttgaatacttttcaaagcctacacaaaatccccttaaaattttactttccatttggatgatttntaaggcagtaaatttttaaaattttctcggggggtgtaaatactgctgttacatgtacaacatcactaattattattccctaactgttatgcattttccttaaatgatgtgatggatgtcgaatgtatcaggtgttcgtctgccactgaagcggacgcttggttcgaggccatccattcgtgtgccgacactctgctcactcaggcgttggcacaagtcaatttgatcctcggacaaagtccgcaagtgctccgcatgggttggatggcggagcaggtcgtgccaaatggccagtgaatgaatgtgtctgctttatgcttggcttttcctaccgtcttcctttattttaggacgccgccattggttggagggccgtttttgtggcattgactgtcaacgaccttctcctctacgagtccgtccctgcggtcaaacaagtcagcacaaaaacaaattgcacactttatacacattaattgttgtgccaattccaccgctttttaggaatgggccaacccatcgttcactcggccgctcatcgccacgcgagtggtgaaaaccctcccgttctgaactgtttttataccaatttcaggtgcagaccactgcccgcagtttccctgtcatcatgggtctctccgacattatctctttctcgacccgaaccggcacccaagagggcgtacggacgcatttgttccgtttagaaacgcaccgggaattggcctcgtgggtcaaagtaatgccaatgccgttgacacttcgtgtcgaaattacggcgagttaaacgctctgatttaggccatcatccaaaacacttacgtcgcttgcgaagcgattcagcaggtgagtgcgccgtgcgtttggaatgaccagcagtgcgagctgagcatccaactcgaccggggcatcaaactgagcaccaccggcgacggccaaatgctgtggcagtaccctttcgaggccattcgcgcgaccggcgacgatgggcagcaatttttgtggatggattttggggaaccaattggtgaacaggtgagcgaacgaacggaacagcacgagaccctaaccaaaacgaagaaattgaaaattgtttttatggaatgatcatcctcaaaaactattaactaacaaaaaaaaatttttttttttttttgcttttccttggcaattttcgtactgctgaacaattgaaattcaaaataatgagttgaggggaatgaaatgcattcatttaatccttaaggaggtcgatttgctttgttcccccaaggcggtggtgttcatccttcacagttttcttgccacaaaagtctaccaattgtgtctgtacgcatgagaaattaatggacgaatctctcctgcttgtctttcttttttattgttctgttcgtctagtcacacaatacacagcttttttaaacctttattttccgaaataaatgaaaaaacaacaaaataataattgtaaattgtttcaacccaacttcggggctccgtatgcatctggcattcgttctattgtgtaccgatggtcacgaacatactgaaaatggttgtcccggttaatgggacaaaaatagtttgggacttaccattatcggaacgccgggtattttgcgaatcctttgacgcaaatccttgtcgcaagtggccacaatgtaacacttgtgctgaaaatatatgagtataatttaacgacagtcaaaacaatgaaactcattgtcagatgattacctgtgttacgcgttgaacgatgcaatcgtcggcataaatgcccttgtgggtgcattggagtcgctggaagcggttgtcctttatgatttttagcgcaagtttgaaccgtcgtcccattttctccaattcgcccagcacacagtccgaaatatacggcaccactttagcatacagacagtccatgaacccctacaaaaatgtttcttttaaacgtgtgaatcgaaagtaaaaaaaattatgaccgtcataatgtcgattcggttttttatagaaaaattgacaaaatttgtgtcgataatgacgtggaaggggggcccgagttgtgtgttgtatttgagaaacatcgctgccgaaatcttagggctatcatttcgctttttttggtcactaatcccaccccataactcacgcttccttgattttaactgcattttcatcttctttgggaggttttttcacgcggatttcatcttttctgaattattaccagcattaattagcaatcattaagaaaaattcaaatcctaacattctgtcatcggttggcttaatcagtttctgaagcttattgcggaatttctgagtcagaaggtgtcgcccctnataaatttgaattctttaaaaatgaatt

SEQ ID NO: 21900 - DNA, 2357 bp, Heterodera glycines
aattaatcaacaataacaacaagatatccatcaacaaactttgaaatttttatgataactaatgttaatattttaaagacggaaaaactatcgaaaaaaatccaaaaaaatatttttatatttttaattcaataattttatacatttcattaagaaaaaacctttttaaatataataaatcggacaaatataatattttctgactttttaattattagaattcatgaaaactgggtaatcataaaaatattactctccgttttaaattcacagagtcattaaaaaaggaaaaattttaatcaaaattttgaggaaaatcacttgacttcttagacagcaatttaattaaatcttcctaatttttgttatatggcaattggtttagatctttgacgtgtcgaccaatttttttaaatttgcttccaattaaggctgctccttaattaattgggtataaaattatgtatttaaatattaaaaattaatttagaaaaatataaatttacctaagttaataacaaatttctccaaggttttacacataacttaggctaaaaaaaattattacatgaaggaccaaataaatttttatggttttttccgtttcatttttacatatccgtggatttttgaatgaaattcttattttgagctatttttgtttctataaatcgcatcccatttataaaaaaatgcatttttcaaggacttcccttttcaaggacaaatccattttttagcccaacctgaaagattttttcgttccttcgggctctccttggatttcggacgttgttctttcggtggacacagaaaattaaagcacgaattctcgacactgatcacgcaaattagcagaaacagaagaaacaaaaaaatatttttgagaaaattcatatttaaggaaaaaataaataattaaaaaaaaattttttttcaatattttattaatttttatttgaaataaatcatgcgaggctttttatttagtcgtttgtttggctagccattaatgtggcaaaaaattgtttttgcacgaatttcctgcacatttatggggttggcaaaagcttacaaataatttttattattattattaataaaattgtaaatatgctgcgacaagtgattgactttaaccatatttttttatactctttgtcaaatttaattttatacaatataattagaaaagtaaagttaaattaaatcaaattaatataaaatatataaatttaaaaaaaccaaattattaaaaagagatatttctaaaaattaactttgttttggtttatgatttttttcccattctttcttaaagaaataaataaataaatttttataatttaaaaaatcatataaaatcgaatcattgaatcaaaataattggaggtatcatagttttgactttttttttctccacatattcttaattaataaattattttataattttgtcggctttaatacgtttttaataaaaaaaattttaaaaaatgtcattaaaattattatttttaaatttgtttattaaaattcaaaaattctttaaaatgatatccacttttttctagttgcatataattgaaccttctaacaaattcttttttaccgcaaaacctccattgttaagtgggaattaaatttgattacaaattgcacagtttttaagtggtggcggcggcaccaacaaaatgcaattttggattttcaccaacaaaaagtggtcatccaatccaaaagcaataaaaaaccagcatttctggttgaaaacggatgagatgacctctgacattgagtacatccatagaaaatgaaatgaaacacgtataaatatgatggctatttgctcatttgaattacatttaatacaaaactatctttttttatattctacattattttttaaaaaatatttatggaaattttgcttaaaatccttaaaattaattgttcaaacatgcgtaaattactttttaatgtgtgttataagtgaaagttcaacaatttttaaaatatattttttattttgcagaaaatatatcgtaaacatcatggatatttgctcattttaattacgtttattaaaaaaaaatcattttttatttatttttcattttattaaaaaaatatttgtggaaatttggtctttaaaattaattgttaaaacttcaataaaatggcaattaaattttttattagtcaaaattgaataatttttaatatgttttttcattgtttaatgatttatttttttttaaaaattcaaaaatatgatgactattaagctcattttaattacataaatataaaaaaaaagaaaaataatacttttaacaatcattttttatcctaat

SEQ ID NO: 21901 - DNA, 2363 bp, Heterodera glycines
  unsure (1)..(2363): unsure at all n locations
atatattaattattattttttatttttccctttgactcctattttcttcactaatttttcactcagaccccattcttaccagtgcttgtttttcccggttcccggttgccctaccgggaccgggaccgggacctgagattttcaaaacccgggaccgggaaccgggacctcggaggaccgggaattcccggcccggtcccggtcccgctctagtctagtttaaactcgttgcgcttcctccacggcataggcggaccggaccaggggcggagggactggcttgcattgttatgaatttatggatagatttttcttggattttcttgacgaatgttgagagacccttcatatactataagtgtgttcttgtttatcggtcgttattataagcgttcagtgaggaaactccttgtgtatataataaagagagtaactagggtgctcaattggctatggtgtgtatgcgagggttggtcatatatgtcgctcaatcgatactttagaacaggagttgtattactgagatgttttatggcgctatcggccaggggtagtaatgcaccttgtactcacatcctcatgttgagagttgtataataacgagataggccgttttctgagaagatctattcttagccatggagccttttgcgaaccgaccgttgggctgtctcgaacgtgaatattaatggtttctcggggaaaacgctcatgacggaaatctgtttgcaatggagagaaatgtttttccgatatctagtattcttatatctcagtccaagatttaagcggacattcgcaccggtcacccgatattcttctgaggtttcccctataaactcaggaagaaggctggattaatgagcttagtaattttctgagaatactattttaagatatgaaactttttccacgcccgttttgaacgacttcgtatttcacttttttttccccccccccccccctttttttttttttttttttttttttttttcttttttttttccccccccccccccccccccccccccccccaaaaaaaaaaaatccgtggtggttttccccccgaaaaaccgaaaaatcccaaatcccaatccattcggaattttcgtcggggggtcccgtccgtctccttcgccaatcacctccccctcaattttgctttctttatttgggatcgccatttttttattccactccccccanttcactctcattcatttgcccttcttttttttgtttgctttttgatgggatttcgcgcagtgaaaagggcaaaaagggaaaatgaaaagggaaaaaaggaggggggaaatgaagaaagtgaagagagagggcgaaggaagggccaatttataatggcaaattgacactggcaaagcaaaggggggacagataaaagcacaaaagaccctaggactgggccaacaaatgcaaatgagaatataacccctacaaataaatacaaatcgaacaattaaacaataagttttaaataacttttttgctggtcaaacctaacaacaatcatagaatcattagaaagttttttgcaagttttattaacctcttctaattattaatttcaaaaactagaaataaacatcgactttctgagtttttgcggttttcataacgttaactttttttgagcttcttattacaatatttaactttcgatgatacaattttgttagtttttttatgaaaaggaaaaaaatttatggcttcttaaatttggcagggacggagttggcccctttcattcgtccttgggctgaaaatgaaagtgtttttatttcaagaagtacttggaaattggtaatatgccgatgggtgtaaaacatacttcagttgtttttatatactttaatatttactaataaattatgaataatttcttcacttttcaaaatgttttccgtcggcacaaccgaaggcaatgcttaataaatgttttccttttctgtccttgcaaatccatggcagcttaattcagaagagttcatcttgttttattgtgcttatttatgtattaattctgtgctttatcacctcccattattcttttgcacttttcgccgctggcgaagtgcgggcgaaaaaacggacatgtcccgccccggggcggcggcggaagcgaaattcggcagaaaattctttcccttttccctttcttccgaacaattgaactcatttcaacgcccaagggcagcaaaaggggagaagcagcagcagaaaatatagggaaaagcataagcaaatcaccaaaagaaagcattgtttaaattttggccaaatattcgtccatttgtcctcccttatgcactgtgcgtaattggacaattggacgacacgtgtcg

SEQ ID NO: 21902 - DNA, 689 bp, Heterodera glycines
ttttctcatctttcttttccatcaatcatttccacaaatgtttacaaattgtgccaactttcagaatgggtgtttgatacatgccgaaatgttaaactgatcattagcctcttcttcttgctgctcctgcttaactggaggaggcagaatgccgacagcgactaagaattcataattgggatgttttgccgacggtcaaacgcattgctcccatttagtctgattttcgtacgaccctgaaacttttttctttccctacacaaagattttcccttagattgatatatgataattaaaagctatttcgtcactatttttctacaatatttcgacataacactgacctgaaaagaagataaccttttcctgaaattgtattattgaataaatgataccatattattttatttttttaacaagttcattattataaaagatgaaaactggtccttactgcaatacttttttaaaacattaaactattaattttcaatttaacacaaatgacagatagatagcctcactttatacatttaataaaccaatttccatttttttttgtctcttataattttctaggaaatatttccaatcacaatttttttttatcaatttcatcacttgtgtgtcaactattttcaactaaaattatctcatattagtatctaattgagaattgtcgggctctg

SEQ ID NO: 21903 - DNA, 1265 bp, Heterodera glycines
ttccatttcacatatttttatttttttcatattgcatttttattttattttcaaaactttatttgcttttatcagcaatgattgtccgaaaatgccaaacataactgttttataaaatgacttaggcaccgatagcttcataaaacatacactggcaaggagaagagataagtaaatgcctacagaaattattatgaaaattgataaataaaaaaattatgataacttttggataaaggaaaatccaatgaatgccactttatatgctcaataagttgttctccgctctctcactctctgcaatgaaggaagcatttttgaaaagaaaatttctcccaacggaattaattgtcgaattaattaattttctgccaccaaaaatgcgttggacaaccaccagagtttcggcaaaattcgacacattcgtcttacagaagcaagccaactggcacataacgtttttattcattgtatgagtgattaataaattaaaatattttattcaaaacatgatttctgactgaatcttcacgggacagcagggctggacgtaattgcggattacggaaattacagcatttttttgtagtttagggttacgagtttccgtaattgaaaacaagttatgtccagccctgctagacaggtatctcgaccggagctgatcaagtatttttggtcccaccggcattgtggtgtttctcggtctcccttttttggtcccgtaattccccgtcccgaattttgcctaaaattccggtatccttcagcagctcgtatttaggctgtcttatttgatgaagccgttgaacgtttgcagaaatgtactggcaatttatccggcgcgagtcttttccatctgatgcactgtaatttttacaataaaaactataatttcattaaaataaatattttaatgaattatttcacaaaatttagtaaatttccaattaatttttattacagtgcttttgcttggattcaaactctatcgaccgtgctttgtggcctcgaataatggaactgatcccggcacatttaaaaatgattttatccgctctgactttgccgttcttcacaatgcgcccactgcttataatatcgaatttttccgcattgacatggccattgctcgcgaagagcttcttgcttctagtgacatctacttttttcagagttgtccggaaagtgtgtgagctattaattgggggataggtccgagctgatcgagagtgtcggccgagagttctcgactcgagcaaagt

SEQ ID NO: 21904 - DNA, 2304 bp, Heterodera glycines
tgatatactgtttgattgagtgattgattgattgcctttggattaatgatttgattgcttgataattgattgatttattaattgattaattaattaagtgattgttttattgattaaatgattgttttattgattgattgattgattggaatacccgcgcgcatcaacgcggaccgattcagcctcatataaacggccaccacatgaaatgcactcgcggtcagcagcggttgctgctgcggccagctgttgcgatggaagcggatgaacaaccagcgaacccatcagaaaatcgccgccaccttcaattcagacaactttttacatgtttataaaaaagatattttgaaaaataatttttaaaaaatcttaaaaaactttttaaaaaagccaaaacaataaaaaaaattgtggaataaaacttattaaattgaattaattaattagggtagagggaggacccagacgcctaccccgaaaatttaggctattttttgaaatataccgtggcccctatcctcgaaaacttattatccgacccctacactcaaaaatgtagccatttttcagggtataccccgacccgggcgctccgcatctggacaaaccctgactcccccgacttttttttacccccgaaagttcgggcgggggcccaccccgaatttaatcataaaatttttttttgaattttaccgccaagtgctgcggactgatgatggtggccaaccatgtgatgatgatgttgctgatggtattgcatcggtgctgctgcttcaatgccgccagtgataaacgctgaaaatgctgttgaaaaattagcagaatactcaatttcttaaattatataaatgaattgatttaaatgatttaaaaatggataattataataattaattcaccctgttgtccagcaaaaagtgggccaaaatggccataggcattgagcgaatcgagcgaagctgagcccccaagcattgacgaaggctgaccaaaataggatgaactgcaaaaaatatgatttaatataaagaaaatttttttatttatattgaaaattaaaaaaggacgtaaaaattaataattttttaaaaatataatatacaaaacatagataaataaataaatacgaatttcaaaaacatattttctatttcttaaatttttttaataatttcaaaaaaatattttaatttcttagattatttaaaagtgcattaaaatataaaaaaatgaaaataacatgaatttaaaacatatttcaaactttgtaaaaaattaaaatttgcaaaaaaataaataaataaataaatgatttttactcagaaaaatacgaatgcaacggttcaatgtaatattgtggtgtttgactgttccatgagttgctgctgttgtgcagctgctgctgtgcatagaacgtgccggtgttgttgttcattgtgttgttgttggcggggttcgccatgtacacattcattggcggagggttggttgacggaggtggcgaaaaattcactaaaatttaagaaaaaaaattttgggtttttttctaaactataaaatattttttacagcccccccccccccgtaagtaagaaattgcaaatttctatatattttattaatatatttttaattggagtgaaatgggcgaaagtttgatctcgaaaagtgagtattttgtcccatgctgtacaaattaattaattttatctaaattttacatgtcccaattgaattggtgttgttgttgctgttactgctcgtgctgaccacggacaattgggtagtggtgtttgtgttactgttatggttgttgttgttgttgttcaacagttgccgtgtgtactcctcgtaaaggcgcactgtgttcagctccatctgcgggtgtccgccaagtgatgaaattccgcttgaaatgcctccggcgttgggcacttcaaatattttagagaaattggtgacaattacagtatataatgagggagggatttgaaaacttggtaattacccaaaagtatcacttttaaaataaagattttttaaaaataaaaaatgtctcggggatcctaacccaaatttgtataccctaataaaaaagtggattttactaattaataataatattaaaaaaaaataacccagaaatcacaaaaacctaatgtactttgctgaaagagatttgtggaccctgatgatgctgtcgatgttgttgctgaacatgaggaatccatctgctgactgaccggtggaccgttcgcaattaagatctaaaacaaaaattttcagaaaattataaattca

SEQ ID NO: 21905 - DNA, 1944 bp, Heterodera glycines
caaaacagcacaaaccaacagcagtagtagagaagccactcacaaatcgagagacggggaatttgttgagggagaggggggagggaaagggacaaggggaaaagctcattgtcaaaagaatggaagcggacgccgccgcctgaggaaagggcccagcagcgccaccaatacgggacgggccaacaaattgagagtggtcacgaaaagtggacaaaaaacaagaattcattgtgataccgcttgagtatcaatcaaatgattaatcagcagggggtcatttctcacagcccaattaaaaaaaaaattttgctgctaattgattgcgatatccgccgctttttgtcactctcggattgtcaattaattgagtgccattgctgctgcccaccttgtctgccaacaatttcggccacatgctcactggacggcacttccactgactcggtgttgtgccgtgggccgaaccgggccaacagctgctggtgtgccaacgagccgggcggcggactgagtgcaattggcggaagcgatggcatggctgacgacaatgcggcggcgccgctgctgttggtgtcggatgccatgccgagaacagaggacgcatcagtgccatcgatggtcggcgattgttggaagaacctagcggaggaagcagcgaatgaggggggaccaattaatttcgaaaatggcacagatgccgagaccgaaagtgccaaaacccaccatgccccgggcgttgtggtggtcattgtctgctgctgcggatgctgttgttgcggttggcatgtgccgaattcgatgccgttttttgttattgtctgtttggtcgccgctgtcgccattgtagttggaaaaagtggatgccgcttgcgcagcagaggctgcggcatgccaatgtccaacagatctgcgcaaccgccgccggcaccggcggcaccactgcccatcgctgttgaacagaacaagcgtgccggaggctgaatggggcagctcatcatcattgtgatctcaagaggaggtgagaggtgctgctgagaaagggatggaagaattttaaaacattttactgtgacaacgattgaaatttgataaaacaaaaacacataaaatacatataaacattttggtcatgcgattgaaaaacaacaaataacgggaatgaatatgtaattgatttgaaaaattgggacaaacaaattaaaggggaaccaatttcttcagttaatggcgcgacgattttgggggtgggagaggcgaggggagggggggggggtcaagttgaaattttcgagaattaaggtatttatacataataatggggggtaggtgggatatttgggacacagattttgggtgtacagtgtacaattaattatctgtgtatctttcatcctacaactcttctgctgctgtgggcattcccccccccctttcagtagcccaattttgttgtttccccgcgggcaaataaataattcatttgtgtgtgtgtgtgccaatggcattcgccttccttccccagggggttgtttggctgagtgagtgagagggggggggggggggtgggagcccttacggcttcgttggcttctctattttcctccatcaacggcaaaagcataaggcaaaatttttaaccaaatttgggattctcaatgcgaactgctgtgtgtgaacatcattgtcttctcacagcagagcaacccaattttctagctggtaaataaatgtatggggaagggaggggaggggagggagtgaatttcttcctcctttctggaaggagggagggatgaatgtgatgttggtggatgaataattgcggttggaagaggatgatgagtccctttttgggcaccaccagcaatgggagggagggatgaccccgacgaagggggagggatgagcaattaagcactggggtggtgggggaaggtaggggga

SEQ ID NO: 21906 - DNA, 1842 bp, Heterodera glycines
tgtggagttctaaccctttcactaccccatttgcatcgtctccttaaaatttgaattgaaaattttttgggaaaacttagtacaccataaaattttgaaaaattgctagaaaattccctatttttttcttgtaaatttttccgcggggccgggaaatgaagatatccaaatgtacacataacaaattataaaaaaaaacaataataataattcaggtgagtttcgcattcgcgctgatgttgacgcgttcattcgaactgctagcaaatacgatgacagcaggttgaattttctttaaaaacattttttgagaaatttcattataatttggttttctgtttttttcgattgttgcatttgccccgcctgcactgcaccattcggctggactgggcctgtcttggtgaccaacatgaccaccattcggtgcagccgtgtgcacctgataaactgcctgagtactccagcaacattgtgagttattttacacctaaaactttttttttttgtcaaaatggctagaatttttaaaattttactatgggaaggcccctgaaaaaaaattgcgggcttcaaaattggcgatattttttttccttaaatgctttatttcttgggccaacaaataaacggatgtaatcaaaccgatgaccgattgtgcgcagattggttagcacgtcttttgaaaaattttgaattttttttttaagagattgccctaattttcgcaaaaaatttcccatttttcaagggccacgactccttccgtgccttccgctccgcttacgtcaattcggaggtgcgctttgagaccaactcgtgggaacagctgaaccggcagtgtccacaaattttgctgtacgccaacacgttcaaatgcctggactttctgatgcgcactctgatgacggtcaatcggccggtgaagcggggcccactgttcaaaagtacacaggccaaacgctatcagctgagcagacacttcaggttgggagcagttcttttctagcaattttttcaaatttgatgggaaaatccaagggtgggatttaagcaaaaatttaaatttccgaaactccgagtaaataagcggacgagccgactttaaacttatttattttatctcaattacaaccaaacatttaattttgacaccaaaatggcaaaaaacaatgatgttttttgggctaaaaacggctataaatttttactttttttagacgaaaattttaaggcgccccaacttcggatttcccctccgattttttttttttgcgggcctggatgcaataatctgcaattgttctgcttcgttctcgctgtcactacaatttaagaaaacttgagaattttttgtttaagaattctcaaattgaaattttttttttccattaattttttttgttagaattagcaacttttattttcagacgttaattaataatccatacttttgtttttcaggaatgtccaattgatggcgtcgatgccccgctttctgatctcttattggatgtcattttcctcctcccatggctttcgtgtgatcagtgactcgttgcaattcgcttgcgactttttgctacaaatccatcccgatcagtcaaatgttagacgagggttgggaaaaacctaaattttaaataaattttttaaattttaggacggcctcatccgcagggtcaggacagcgtggaaaattctgcacacgtcggccgagttggacaatgcccaaattcacctgtacggggaccagcgaccgccgggcgtggaggaggacctgatgaacagctccacctcgacgggcagcgcgaattcgtcctttttcgtcggactgtcccg

SEQ ID NO: 21907 - DNA, 1117 bp, Heterodera glycines
attagcccagaaaagtggctctcttttttgagagaaatttgcatcgacaaatgctctgcagcatgagcagagggcggagagcatggccattttaatgttcagagatttttaaattcacgattagcccagaaaagtggctcctcttttttgagagaaattttgcatcgaacaaatgctctgcagcatgagtagaggggcggagagcaatggccattttattgttccgagaatttttaaatttcaagattaggccagaaaagtggctcctcttttttgagagaaattttgcatcgaacaaatgctctgcagcatgagtagaggggcggagagcaatggccattttattgttccgagaatttttaaatttcaagattaggccagaaaagtggctcctcttttttgagagaaattttgcatcgaacaaatgctctgcagcatgagtagaggggcggagagcaatggccattttattgttccgagaatttttaaatttcaagattaggccagaaaagtggctcctcttttttgagagaaattttgcatcgaacaaatgctctgcagcatgagcagaggggcggagagcaatggccattttattgttccgagaatttttaaatttcaagattaggccagaaaagtggctcctcttttttgagagaaattttgcatcgaacaaatgctctgcagcatgagtagaggggcggagagcaatggccattttattgttccgagaatttttaaatttcaagattaggccagaaaagtggctcctcttttttgagagaaattttgcatcgaacaaatgctctgcagcatgagtagaggggcggagagcaatggccattttattgttccgagaatttttaaatttcacgattaggccagaaaagtggctcctcttttttgagagaaattttgcatcgaacaaatgctctgcagcatgagtagaggggcggagagcaatggccattttattgttccgagaatttttaaatttcaagattaggccagaaaagtggctcctcttttttgagagaattttgcatcgaacaatgctctgcagcatgagtagaggggcggagagcaatgggcattttattgttccgagaatttttaa

SEQ ID NO: 21908 - DNA, 2002 bp, Heterodera glycines
gtggcacggtcattttggttttattgtggatatcaagtggaaatcgaactgaggcaaataatgaggaagaaggaaatgaaggcgatggtttttcgaccgagaaagtgggacaaaaatacaattggcacagaaatcgaaattggcacgattacacaatgcatagtgatttggagagaaacgatggacgctgaactgttggcagttctaacaaaagttgaagaaatatgttatgaactgctttgtatttgggttgtccccaaaggagtgccaattcacgttatgaagaaaaggtttccggccattgttcgagtgccagaagaagaaaatattgacaatttattgacaaaattggaacaaattggaatgccaattgagaaaaagggcgaacaaagatggcacgagacagcttcaacaaacgcacctagagtgaattggaaccaattgggagacggtcacagagtgcaggccgcgggaagccattcatacaattcgtttgtggcgccacatttttcatcatatttgccaacaacaacaactaaaatgttcttcccaactccggaaatgccaaaaaaaggtgaaaattttggaaaaatccaatcagaaaaatttgatccctttgtggtattgggagtaaaacgaaagtctcaatctccagaatcaaattatgaagaagaagacatttttgaaggccctttgtgcacaaaacgaaccaaattttgggtaaattcgaaatgtgaaactacaaacacggagccgttgggggtcaaaacatttttcaaaaatgaaaataaggaaatttatcagccacattggaaaccaattgttttaagttcaccttcaggcaaaaaaggagctttctttttcgggaaaaattttgttttttccaattttcatccgtcttcttttatgatggatggctttaaatgggataatgtggaacaaaaatattgctttgaaaaggcctcgtattttggttattttaatttggcaaaaatgatcaaattcaaaaatgggatcacagaacccagtgaattcaaaaaatttacagacaaagacatggaccaatataagtcgcttgaagaaaatcccaaatcttttgatcagtatgaatggaatagagttcgagaaggtgtcattcgccctattttatgggcaaaattcacacaaaacgaaaaatttggtcaaatgttgtgggaaactggaaagtttccattatatgaagcctcagtcaatcttagctggggcatcggaattgacattagagaaagacagctaattttttcaaacatggaccaaggatttaaaggcaaaaatatgtgcggtcgtctgttagaagacattcgccaaaaacttaacccaatgggtacggtaaaccaaaaaaggcccacaaatcaaataaatgaaaaagatttagaccaaattttgaaaaagattgaaaacgacaggaaaatctctgttttcaaaactgaaaatattttgagacaatgtactcggattaaagaagttgtcaaagaaaattgggacatgaatgtatttatccaagggagcatatacaatggccttggaagaaaagaaagtgatttggatttagttatgataaactcaaaaggaataccgaatgattggacaaaaaacgacagttgccaattttttgacaaattgcggaaaaagttaagagaatcgggaatggcattaacccggactctgataatcccttcccgaaatgtctccattttggaaatcacaattaattctgatgaccaagaaataaatgctcaaattagttgcaataatttgattggattgattaattcgaaatggttggcatgttgtgtgcagttggatgtacgatttaaaactttatattttgccattttggaatgggctgacttttttgaaattcaccaaagtgctaatggaggcggcactttaaattcttatggttggacatcacttttaattttttatttgatgaaaattcctaaccccgttttaccaaatt

SEQ ID NO: 21909 - DNA, 1742 bp, Heterodera glycines
ttaaaaatttcccccctgtttttagcccatcaaagcgctgaaggagatgggcctgcgcaccgttttggtcaacccaaatgttgtcactgtgcaaacaacgaaaggttttgcggaccgtgtctatttcttgcccatcatcaaggaatatgtgaccgaagtatcggacaggacaaatgggcccatcctttgaaatttgattgaattgtaggtgatcaaaaaggaacgtcccaccggaattttgtgcacttttggaggccaaacggcgctgaactgtgccgtcgatttgcacaacactggcgtactgtcggaatacggtacttttacaattaattggctttacagtattcaaatatttcgtcatagtaatccccatattggcaattcattaccatacttcatattaaatgttccaaaaaaaaaattttgggtgccaaaatctttttttttattttattaattttttttcttgaggtgtcactgttctcggcacgtcgattgagacgattatgcgcacggaggacagagaattgttcaaggcatgtccaaaagacttttgaaaaattaaaattaaaaaatataaaaccatttttaaaaattttgttttttaaggaatttgtgctgaaaattggcgaaaaagtagccgattgtcgtgcagcgaacacaattgaggaggctgaaaaggcagctgaacaggcgaggaaccaaaaacaaattcatccccctccctcgagaaatattttcgaaagaaaaaaataaataaattttctaaaaaaattttctatttgtttgtaagcaaagaaattaaaaaccgaagaaaaattcttttaaatataaatttttttttgaaaattcttaaaaaataacgaaattgatgggggtttaaaaatcgtataaaaaatgttaagaaaattttagtttttatagcttcttacgatagtctgcaaataggaaaaaaatctttgaaaaaatctgatttcctgtcattgtttttttttaaatcccattttttgttatatgtcctcattttttccaacagattggctatcccgtgttggtccgtgccgcgtacgccctcggtggacttggttccggttttgccgagacgcgtgacgaacttatggcaattgcacgccaagcacttgcccattcaaaacaagtgctgatcgacaaaagttttcaaggctggaaagaggtgagaggaggcgattgaattattatatttttaatgggaggccaaaaaaaaaggttttttttttgccaaattcactcaaaaaaacttaataattcactatctagttttaaaaatcgccaaaaaattgcaaaatataatgactcatttacctttccattttcattttcagattgaatatgaagtggtccgggatgcctatgacaattgcattacggtgtgtaacatggaaaatgttgacccgctgggcattcatacgggcggtaataaaataacaaaattaaaaataaaattttaatatttttttcaattttgattcagatagtgtggtggttgccccatcccaaacgctgaacaacgaggagtattttcgaatgcgacagacggcactgaaagtgatccgtggactcggcatcatcggcgagtgcaacattcaatacgcgttgaaccccaacaaaatggaggttggcttttcatgctcacaatcagccaaatccaatgggtctctctctctttttttgttgattatactgaaaatagtgcaaaaaaaatt

SEQ ID NO: 21910 - DNA, 1118 bp, Heterodera glycines
aacgatggcaaaagcggagacggtaaaacacagagaactttagacggattattcgtcttggtaaataaatgactaattgtaaattaaattaagatgtgccaaatcccaccaaacagtgccaaaagcaacgcgaagggacgtcgccgttgacgaaggaagcgagtccgacgagttcggcccggtcggggagcgtttcgctgaacattccgtcctcaattccgacgcgtaacaccgcattggctgagaacacgaatggcaaagtgggttaaggcttcatgcgctttttgggcttgcttttttcaattgctggatgattttttgagtctaacgcggggaaggaaaacaaaatgtgtggttctgtgggtaaatttgtatgctttttgttaattaggttccacttttttaaacaattttacaaccaaggaacaaatctttttatttcattcaaaaataaatctaaataaatttgagttttgattgtcacaattttggtttgccaggaatttgaagaaacaaactttcgagtatttccaagattttttaattttttcatgcaagtttatcattttgttgttgtttttgagttctcttcgtctcataatacggagggttcgcccacgagagagtcgaacaattccaacccttcccaagcgttgagtgacgtcaccatccatttggactacgcacgactcaaagcggagcaccgaaagctgaagaaatattttgaggtatcattaactaattgataagcatcgtcgtataaaattttcagtgactaattaacatttcattttgaatcccattttaaaattaatttttgttttttatttttagagtgcgtgtgaaagtcgctacaaaacgccgccggtgcgcgagacggtcaggcgactaaaccgtgctgagcccgtcgcgctggacctgtacaggttgcacagcgagaagatggaattgttgcgggaagcgcttgaggaatgcgactgggacggaataataacggttggttggactggaggaggggggggggctggttcatatttaggtagtaaaaatagcatttcatcctattttcattattgtcacatttttgactaaatgatatacaatcagaattcatgaac

SEQ ID NO: 21911 - DNA, 1481 bp, Heterodera glycines
cgcttgaggatgggacggggacggaataataacggttggttggaccggaggagggggggggctgttcaatattttaggtagtaaaaaatagcattttcatccctatttttcatttattgctcacattttttgactaaaatggttatacaaatcagaaattcaatgaaacgatgggttagaaaagcttttggcatacaaaaaatatggtacaccccgaaatttggccgtcgaaacgtcgccggggcataatgccgcagcaaaaaatttttttttttttaaattcagagaaacaaaaaaatttcaagtttttttgttttgtttttgaaaatttttgtttttagtaatacttagtttttcaaaaaaaaaatttcttaaatctttaaaatttttattttattattttttgcggcgactgcaataaaataattttacatttttctctcttccggtgggatggataccgaacgactgtattcatttttttcgtgtttattattgctaatccataacctttgccaggtgctgctgttcttcaaacgcacactgtccaatgcgttgttccgccagtgcctaatggagcatccgaaagcggcacgccattacgtcacttatctgcgcgagtgcggtgacagtgccgaattggcggacaccctttttggtagcgtatcgcaatttttggggcacttctcccttttcctccacttttattagaattcccaaaaaatattgaaaaaattttcagcgatttcaactaggatgatttactaaaaaaaatttcaacaaaaatttccagaaaatagctgaaaaattttccaattttttttccttgaaactaaaaatttctgtttgaaaataaatttaatttttcctagggggaactacgggatggaaaatgaaattttgacccctccctccccctcctctactcaaaaatttgtgcctttgcggcatttcgtcattcaaacattggcacttttttgttttcggtcttggccaaacggcggatgcggcgatggtcgaatttgtgtccgcctgcaaatggacggacccgaaacggaagttggaggcgttgcgcaactgtttgctcagcggcttctcccacccgcagttggccaacgagaggcgcagtttggaggaatggatcgcactgcttgaaacccacctgaaaagaccatcataagcttttgaccccctattattccccaaaagtgttgcgtttgctctcattttttgtattttttttttttgatttttggagggtagctatcagtgatggcacggaattccgatttccgatatttttagggtccgaattcgggtttccgaaaaatttttggtcctcggaatgctatccatggtggctatcataaaagaaaacattttaaattctaaattaataatattttaattttcttagaatttaaacgaaaaagaattgaattcgcaaacccaatttcagccttattccctcattttcgctt

SEQ ID NO: 21912 - DNA, 1112 bp, Heterodera glycines
  unsure (1)..(1112): unsure at all n locations
aaaaaaatttattaatataattttgaccaaaatataggatacaaaccaaattagtaccactctaagaccgatttcctacttttgggccttggaataccaaatttcgtcatttttgcttggtcaaaatctcccaatttctgaaacattttaaagactcgaatttcgatttgaattcgatggcctccgcacctcagcgagtgctgtgaatcgtcgccgtccgtcgttgagaaagggtccaatgagataagaatggccaaaacaggttgaggacgattttcgtctttcttcgatggttttgttgtaccaccattactgggaaaaaaacatttagacaaaagtttggttgacattttacaactttggcgagttttccgaaattttcaaggcctccatttcatcacattttgaactgttttctgttgttgttgatgatgttttcttgttgctcaatgcattccattggaaaacattttttccctgactggccaaacgacttttgagcacttcaacacacgaaacgcatcgctcgcaaccatcgccaatgccgtgaaagagcaattgccgaactccgctctctgtgccatctttctgtttaaaaaaaaattttttttttttgatttttaattagaaatcaaaatttttcgagtggacggataaagtaatgggttgggcacattggaacggactcattgactagtaaaccgtatttaatatttgtatattttggtagattttcacagtaaatgctcctacttgaagctcgacatcaatccttttgagaatcctctcaattttggtgtgctttcgaaatgcgaaatgaagtgcatttttggccgcaagttcaggaaaagaaaaattataggttttaggatcatccattgtgaattaatcgacttaaaaaaacaaatttgcaaaaaaaataaaaataaacaaaaccacaccagcgaaaaaagcgcttgtaagtgtggttcagtggtttttgtaagaagtaaagggaaaaaggtggaggttcgaatccgctccacggcagtaacattcttacttattttttgtcaatcaattaaaaaataaataanaaaatgacgttttttgaaaatttttttgaagttttt

SEQ ID NO: 21913 - DNA, 2124 bp, Heterodera glycines
  unsure (1)..(2124): unsure at all n locations
attggtgtcagattcttggtcagcgacttcaaaaaccttttgaacaagttttcgtaatgaagaagtacatcatattatcttttaaaaaataatcaatcataaatttcactcattttttgtgtaatggcgggttttattttttcagaaaatttggactgattaatggtgccattggcgcgctgctcaaccgatcggtcagcgaatcgaaggcccttaaccaacagcatcaaaatgggggcggacactacggaaagctgaaggcccaccaacaatttcctttttcccaatcatttcccgtgaaagaaaactcgaaaaagcaacagcaagcaccaattgctcagtcggagccatcggacacggactttgacgattcactatcagccacatcagcagtggagacgggatcaacaccaatgggaagtggcgcgacgaggacaccgatcggacaaggctcggcggagggcgacacttcgcaacacgaaaaacgaccatttgttgcaatgtataaccaaacacaaaaacaccaaacaaattacgaagcgacaacaatggcaaacagttcaattagaggttcagtgtttgcagttaaaaccaaagctgtccagaatttcgagttaaaaacgccgaaagtgctaatagtcactttagtctttaatttaatgtgatcaattaagatcgtgcacagagctttgggtcgaccactccaaacgcaatgacaaaaagaccaaattcacgtgggaaaagtcattcgaagggaccgacctcacgagaaaacggcgaactgcctacggatgagaagcaaagaacgaatccaaaacccagcgaccgccttcgcattttctctacactcagaccatcaaagcctagtgtaaatatggacaattaggaagacttttaattagcaaatacaaattgcacatattagaacaattaatcattaaaaattgaaaggatacaaaaattataaatgtcgttgagcacattacatgccgacaatgactagctaacaaagtttggacagcccggtttcagaactgacttacgatgatgcacaaacaaaaatgaataaatattttgcggttcaaaatagagttaagcctgactcaatgtttcgttgaaaatttaccccgaagagagtattacccccgacatttttgtttaaatttctccgccatcctcgacaaattctgtcgaggaatttcccccgagtatcgggggacttaactctaatcaaaataagaagcttattaaaagaaccaaaaattgtgtcgaagtgagaaatagcaatacgatctccaaaattccattcggttctgcccttcgacgcactcactcttccttcaaagtcggtggtcttggcgtgtgcggaaggggcactttcgaccttaattcggcctgtcgctgtttttctgcttccgattcgtccgctgagtttgccatttggcctccgtcctttgcgagcagtcctccgcctccccccttttcacacggagtgataacaatggacgggcgtcgttggtgttcgtcgccttcgaacaattcgaatttttcgtccacagttagcgacgcgaggcgcgccattaaatcgaaatcgcaaacgacgggtgccatttcagcgtgttgaatctgaaacaacagaaaaggcattggaaatgctcttgcttttgtgtaccattttcccagaaaaaattgtgaaaattattaggcagcttttgaattaatgggttctcatcaaattggacgacccaaaaaaacgcaaaagcaaacatttcaccacataacagaataattctgggttcttttacatcaggcgtcatgatactaaattctggttgagaaaacgcatttgaccctaacattttggaaatagcaatttttcttacccatccgacgggcggtgagctgggcggtgagatgagaaattgtttctccaacggcggcaacgtcaaatggccggcctcgtcttggtgcgccttccttgtcaatttgatgttcttggcaaagaatgccttcatttttgtcccgttgaaagaatgatgttccaccaacaatttggctgctaaatttgaatacatttggactttgggttttttgataagaaatngtgtgcccaattgaaaggaa

SEQ ID NO: 21914 - DNA, 1485 bp, Heterodera glycines
ccctgggttgatacccctaatcaaaatcaaaataaaaatttattagggaaaagtataaattttttaaattatagaaaggctttaattaatttttagtgaatacgaaaattttttgaaaaaaaaatttcaaaattattttcgagataacaccattctaggggttgccagggtcggggaaaccgaatccgacatctatttcagcctatttcgaatcccgaacccgaattcgaacaaaaagttcaaaattaaaattttttataagtcatgaaaatacatttccaaaggttttcgggtacgctgatcacgaatccgcggcatccatttcgtccaaatccgaaccccagacccgaattcgaacaaaaatttaaattttaaaaattcacatttatgcaaccaaatttcaaatgcacgaaataaataaaaaaacatgcttattggcatggataaaattgcgaaacatgatagttcaaaaacttgcttagtcgacaattttgaaccttataatagaaccaatacacgcaatgtgtatcttttgatcgaaaaagttaagaccttcaaaaaaagtcccaaccaagaggggggaccggtaaattggacaccagaaaattggacactggaaaactggacaccaaattcctcttttaaaaaataaacacaggaattagcttgaaaaataattggtgtggataaatggattaaggtatttagagtcgatcaaacattaaataggcacgatgattgatcaaatgtggcaaaaagaagaaataattaaattattaaagtatcctgtcaactattaagaaataattaaattattaaagtagcctgtcaactattaagaaataattaaattattaaagtagcctgtcaactattaagaaataattaaattattaaagtatccttggtttctttcatataaaaaaatagtttagaaaaattagaataatataaaaccaaaaaaacaaaattaaattattaaagtagcctgtcaagcaaacgagtcacaagaccaaagaattatgcgcttagaacagatgagaaatagaaataatagtcaaagatctgaagaaagtgtgttagagcgacagctacgcttagaacagatgatttgaaagcctgagaattgagtctcagagattgaaatgctggtgggttgagtcccagagattggaatgccggagatttgagtcccacagattgaaatgctggtgggttgagtccccgtgtttggaatgccggagatttgagtcccacagattgaaatgctggtgggttgagtcccagtgattggaaagcctgagaattgagtctcagagattgaaatgctggtggattgagtcccagagattggaatgtcattgaaagttggtgggttgagtcccagtgtttggaatgcgggaaatttgagtcccattgtttggaatgccggagaattgagccccagagattgaattgctggtgggttgagtcccagagattgga

SEQ ID NO: 21915 - DNA, 1782 bp, Heterodera glycines
  unsure (1)..(1782): unsure at all n locations
gacccgttttttttgaaaatccaacacacggtaacaaattacattcaattttcaggaaaaaaaggtcgtcgaccagggcggtggtaccccctccaaggcaaaactataagaccgccctgacctttggaaatattttctttagtttttatagtagaaggcacgtcggtaagattatggggtgtaaaagcataaaattttatataaaaaataacaaaattaagccaattcagcttttgagataaataattttttaaatcacacttgttaagaaatgaataaattggaattgttgtgaaggacttggtaatcgatgaaatcgatgagaaagcgcaataattcattgtagtatgaatagttaaaaattaattggtctttcgataaaatttatataaaattttattgttcttttgagttttattcttttgaatataaaaattaaataggtttgattaagtgaagcatatatatttattttatttctctgcttgatattatagaattaataattcagctaaattttttatattttaaaatttttaactttattaaagaataaattatcaatgtattgatttttattttctggtttttaaatattgtacaattttaacgtaagttggagtcaaataaacatcgaactagagattgtcaattctccgcgtatattttccatctcatttgtcagtcgaatctttcaaaaaagttttgcttgattatattgaaataaattttaaaaattattgttttattttttttttgttaacgtcttttttacaaatattgattctaaaaactaagtaaaattgcaattaaagaaaaaccgaagaaattttattttcgttttttaaagaaaaatgtccttaaataaggctcagtttaggaaaacaattacctttttctattaaagagtattatgaatattcaaactatttacagtatttaaaagacaattttttcatttaaaagaatcgtaaaagtataaccctatagtgtgtatgcttaaattcactccatgaataaaatgaaataaagaaatatgaaattcaagtgccggaagcaataaaggtcgatttaaatcattgtctaagagaataattattgaataagtaatttaataataattattacatcaattaaatataaaattgcaatatgttacctaattcaacactttaaaaaaattggccttttaaattaattccaaacttaacctatagaactgttaaaccgaaatgtttaatctactaaaagatacataaaacctaataaaattacaaaatattacaaacaaacaaaaaattacgactgtcgtgaaattaacatgtttaatttttttttagaaaaattaagggtcttaaaataaaattatattctaaaagagaatgcaatattataaaaaaaaattgcttttggaatcaattagaaaatttaaccaatattaaatttaactttgtttaagaaattgaaatgaatctacataatattttaacttaagtaaaaagttagataatatctaacaaatacttttttaaataaaaaaagctaaatttaccgaaaagtgctcaggcaccccatttaataaatagatgagatagaacattgggggcaacaaaaaacgtgatcacatttcaagatgcgtaatttaaactttagtaaaaaaaattgcggacgtgattgttttaatctaattatttattaatttgtattttccttaatatagataaataanaaatgttatttaattaatccgctttttaaatcgcaaaaaatataaatgcaata

SEQ ID NO: 21916 - DNA, 1824 bp, Heterodera glycines
aaaaatgaccgatgaaatgaccggtggacataacgacccaattggtcgcgtttgcttagagccgcttcgatcacttcgtattgcaaagggcgaaagcgcgaataaccgaaatatttcttcagcaattctaaacttcgttcagagggaacggcgggcgacgaggaattttcatcattgccggggattgccgacgaaagtgccacggcactgtgttcattcgccaaagtcttaattttgaaggaaatcactattttgatggacattttcaatgtaataaaggaaagggtcaaaataaatggcactcgcctgttcacagttagtcggatttgcattgtcattggtcaaatataaatagtctgttgtttcatcataaaaatcatcgtcagaaggcactggaaaactcatctaggaaaagagattcagaaaaagatttgtaaaacagataatattaaacttaattcaagtgttccagccaattcctaccgccaattccctaccggccaattccctaccggccgattccctaccgccaattccctactaaggcatttgggccatttccataccaaaagtgttgaatattgataaacattgagattaaaacacacaagaaaatttattcactgctttttagacagctcgtcaagagctttcggatgataccaaatttatcaagattcgatcgttttaaaaaagttagaagtgtcaaatctctcaatttttcgagttttgaaccctcctaaaaataggttctaaacccatttccgcaactcccggggaacccgaaaccgggctcaaaatcccggagctttagggacttcagattcgtaaagtacctgcttgtatgaaatttgaataattaaaccccggccttacctcctaattttcgggcccctggaagtcctacaaagcgatttgaaatcaattgtaaattcgaaaaaaaattcacgatccaatttaagaatccggagactggataaagctgctaaaatagacaaaacactattttaaaatttttacttcgatttgtgaaaaagtatgaatggtcattgttttaaagctttgtacggttctttttttgttagaagtattttcattttcttctctgcaacattaaacaaaaaatttattgtcttataattcacgagaaacatcaaaatgttgaaaatcccctttctgtttttgaaatttttccgaaaattttcgaaaaattttttggtacggagatggcccaaatgccttagtagggaattggcggtagggaatcggccggtagggaattggcggtagggaattgaccccaaccccgtggaagggtagacagtaaacagccgtgtgctcgctgtgcagcagcattgtgtgtgggaaaagggaagaggtgagaaaaataaagaaggaaatagtgcactgtctgactgtctggttacgcttttgaaaaatttgaccgaaaaccgggacccaaatctgaattactacccaaaatcattgacagaatcaatgactacaaaatctgagctcacaatcagattcataataaatttccttcctactttggcacttattcatacataagccaaggtaattttaacatcaatggcgaatggatgcaagttgattcattcgacgaaaacgatactgttggatgtggcattaattgggccacccgacaggttttttacaccaaaaatggacgacttcacggtttgtaaaaaataataccaacaaattttgttgcataaaagaacactatttttaaagacaatttctcaacatcatcaaatacataatgcccaatatttttttttttccaataccataaaatcc

SEQ ID NO: 21917 - DNA, 1461 bp, Heterodera glycines
cttatttccatctgccgctgctcacctctcttccggccctttattatgcattatttattcacccaccactgctggtgccttccatccatgccaattgtgccgtgccatgaccattcaatgtttggtccgacccgtcccattttcactgctcctcccaatgcttatccaccacagagcatttgtctgtcactgaccaaatttatccaatgccataagcttcccgtcatttccatgcataaaacaaatgccaatttcgtattattttaggaacatttgcatttttatgctgctgtaattctgcaaatgtccgaggaagttgacagacacatcgtggagcgttacaaaattcaaaagagactcgggaaggatgaggagtaatggacgttttttgtgggtggtgaattggtccctttcaggagcgtatggcattgtttggaaggcgattgaccgaaaaacgaacgatacaattgctctgaagaaaatcttcgacgctttccgaaatgctacggacgcacaacatacatttaggtgaacagaaggcgcggaaggacagccattaaataaataaatggaacatgaaaatggaattaactaactacggttttcagagaaataatgtttctgcaggagttcggacggcacccaaacatcatcaaactgttcaacattctcagagcggacaatgacaagtgagtgtttacaataagtgcaccttttgctgattcacccacatttaaaactcaaattgtttttcttttttagggacatttatttggtcttcgagtatatgcaggctgatcttcacaatgtcattaaaaaagttgttccattattagaattgtcatttctttcaatcttttctttgttttattcagatgaccattttgaaagacatacacaaacaatgtttgtccttttgttttgtttttttttctgcatttaatgatctgatcctacaacagatattatgtgccaacttttccgtgccgtcaaatttctgcacagtgggaatgtgttgcatcgagacttgaagccttcaaatgtgcttttggatgccgattgccgagtcaaggtaaagctgtgtccgtttctttcccaccttttgttttagctaacaaattcaattgtcatttagttggccgattttggactcgcgcgttcattcagccaggtcaaattgcaaaatgcgtttctttcgtttgtttgacattttttttcagatggatgattatttggatggcacaaatgtgccggaactgacagtaatttctaaattttttgttgttctcgccgttaaatgtttttttccccaaggaatatgtggccacgcgatggtatcggtctccggaaatccttttgggtgctttttcattttttaattgcaattgcccgtttttttagccgccaaaagatataccaaaggcgtggacatgtggagtttgggctgtattctggcggaaa

SEQ ID NO: 21918 - DNA, 1107 bp, Heterodera glycines
ccccccccccccccacctccctggcctccccgtgctgctttttcctctatgcttcttcacttctattcctccacaaaacgttgccgcctcccgccccccccccccttggcccgcctaaagattctcgaatttcaggaccgccttaatgaaaaattccccctcgcctcccctcccctctcccgtggcgccggggggcctttgttggcgaaaaaatgggggaatagcgggggacacccacccattcattcattcactgtgtcaattttttttgttgttgttccatttgcgctctctgatggactcttccggatctgtgacaagagcatctcggatgtaaaatggagagcttttgggctctatgtgatttttgagtgttgattttcgagaagtgcaaaaatcccgaaaatcttttgaaattgaatggcgcaaattttttaatttttcaaagcaaatgttgcctgggatcatcaacaaaacaatgtacacatatcagccaagcaaagttcattcacaatttttaaattttaaaaaagttttcaaaacttaaaaattttgtctgaatatcgcattaattctgtcgggaattttgaatttgctatttcatctaaacaaaatcaaatcgaatttaaatttttcaatcatttttccattctgtatgaatggcggatagcagtggtcggtggaatcaaaatcttttttcgagattttcaccaccaaaatccctatgtataaagcgttcagaatttgtcactgatcccgggtttttgaaaatgcccggcgctattaatccgccttaataaaccgctgatcaattccaattaattttattttaattacttaataacataattttaaacattgccatttcatttagtgttattttatttgtctattcatttttcgatcaattttgttttttgaaatttgcacattttccactggtaaattcatgttctcctccctcctcctccttctcaaagtgatcaatcattctcaactgattgatcattgtcctttttattccaattaactcatgtgatcatgatcagctgctggtaattcctaactcattactagctagggcttttattttcgggtttttgtcta

SEQ ID NO: 21919 - DNA, 1903 bp, Heterodera glycines
actttgtatgttgtgcacttttctctaccctcgctcgcttcaaggatcgtttttcctctgaaagcgacatactttttgcgcgcgtttcacgttttttgaaggacgaagcagcagatggaagtgaattttggaaaatttggaggaggaagtgaattcgactcgaatttcgccaccagccaaacgggcttgttcgattctggagattatgcagaacataacctgttgtagcaaaaaaggtggtgtgaaatttcagcattggtacaaactttttagctacatcagctcaaaatatgggcatgtcggaagaaattctcacatacaaagacgacatttgtgtttccatgggtgttgatccattgcagtggtggaacaacaatgaaaaaaaatttcctaaactttcaatgattgcgcgtcgttatttgtcacccccatgcacaagcatcaaactgcagctgcgcaccagcaggcgacggtgccgatgcacgaaaatgtgccacattttcatgtgcatgcagatgcacgaaaatgtgccacattttcatgtgcacttgctggtaatgcctaaagtcttggggttggtctcgctcgatgagtcaagaaaagtctcgtttttaaaaagacaaaaaacgaatcgcgtaaaaacgaattggcccaaaaacaaattgggcgtcgtctgtaagcatatctctacaggcaatgaatagaaaagtcgaaattatcggaacatattaagaaataacggaacatattaagaaataataattatctatcgtaaaccactttagaaacacatacattcataaagattacattaaatcaaaacttttggaagtctctaagacatttgactttgagatatctaaatttgataagaatcgtgaaaagaaaagcttgtgaaccttggatacaacagtttttggttttttttaatttaatcaattattattattgattttcttaactgtatcggatcagtgacgtccttcacattgtgtagttcctaatggatgaggtccattctgcaatggaatcactgatttcagatttgaaattcgattgaacacaaatggaaacaccgtttggaatgcttgccgatattccgtactaaagttgaaaattatttttttttaattttaaatattttaaaccttgtaaaatataaaattggtccggttgacgatgcgccaatgttcaaaggaattacactaattgcatgtaaaaaccacgcagtgatcggagacgaaattttgggaattaaaagaatgtaacaaattaatgaaaagaaatagccgccaatattaacagaaatgatgcaaaaaagtgcgcgaaaagtgcgacgattgaacgaatcagcggacggcaaacctattaaaagagttaattagttaaattaatagctcagaaggaagaatttttgtatgctttactattgaaattctttcgagttatgtggttgtgctttcattttttagaaaattttttattaaaacctatatgatacaaaaaacagattagggaatattttcgaagaaaggcggtgatgttcaggtttttctttgttcctagtagctttaacattttatcaccataaatttttatattatggcacgcacgatttaaggacgaattttctaacttttgcatggtttcagttggtgaaaccactggcaaaatgggcctggtgatggcacaatttaattatacacaacagggatggcattccgcggcaccaaaaattttatgaaatcggaattctgagggtaaaaaattttttggaaatcggaaaccgagaattccgacccctaaaatttcggaaatcggaattccgtgccacccctggtacgcaatcttgacggaaccaaatggcatggtccacccgaaattccatcatccctggcaatga

SEQ ID NO: 21920 - DNA, 2316 bp, Heterodera glycines
caatcattttcgccatgccaatcatttggtgggccgttcactgcccgagaatcaaattcgggacattgtggcgatgatggagcaggagccaattgtcaggtggggaaggaaaggaactaattgatcatcgaattttactactaatgaataaatgaattaaaaaaaaattctattaacaaattagccaagttatgtggtaactccccgaatcactaatttcctttgtttttttataatgccctcattaacaaatattaatgctaaaatgcattttttttttctcggctgtgcttatttttgggaaatattacttgaaaatttgctcaagagcaaaaaatattcggcggattcttctgtctaaaataatgtgcctagcacagatgaaaaccgtcgaattactatttttttatcaaactgctaattaattttgaatatgattgatattttttacaattttactataggaaagtgcacgacgtcaaggccacttatgttggtgagaaaagtgcaattacctaatgctattttaatgattcattttcaactatttatcaccgatttcaattatttttgttgaccatttctcaggtgtctccgactcggtgttcaaagccgaaattgaatacgacgggcgggaaataaccaaggcgtatttgcaggagaaatgcaatttgacacaaatgctaaaagtgatcataaaagggtgtgattaaaagtcaaattgcatctttaaggaggtcaatgccttcaaaactgagaaagaattggcagagttcatgatgaaccatggcgaaaaactcgtcgatagagtacgccttttgagcaaaattccgacaatatttgtgtaatttttctttacttcttgccacagatgggcgacgatgttgacctgcttgaggaacgggtacaggaaaagcatccatcggttcggcatttggacttggagcccatgtgattgatcggctaatggccaggcgatggaccatttgcagacgaacctttcgcaaataacggacaaatgtcaaaaaattgcatcaaaattttaattaattaaatatttattttttaaaattctttttggccaatgttcttttcatttgaaggttgtgttggatattcgcataaatttttgagggaaaatgccaaaaatgcctttgctgatgcgtttaactcattgaatcatcggttgtaattcatattatgcttaaaattgtgctgctctaaacgaaaattccacaagaaaatgtcatttttaatttatttttttttaaaaacgtcaaaattcctttttaaatttccaaatcccattcctcaaagaatgtgttgtaaaaagttctcgagaacccgagactgttttatccggcccaagctctcgagcagcacaaatgaaaaagcatttttcgtctgttactatgatttctctgtataaaaatattcgaataaatcacaaaacgcgcgattaatggtcatttttgaaatgcaaatttctgtagatggacgataagaatatttaatctcattgaattatccgtcatttggtcccttacaatttttcattggcattaaatattaaagttgccataataaattggcggtctccccattttccccatggcttcccattagagatcgacttggacctggatttcctgaacttattattttaagtgaccgaaaatgattaaaccaataaatcctggtccagtccaacctggaaatccagacccatgttttttcaaaatgttgctctctacttcccattaaaaaaagaaaaatgcaaaaacgaaaattaatttaatcaatgaatttcattattggctacatttcatcacacaacaatgccgaatcctccgatcagactgattgatcatgctttgccctccgtggccaccgccggcacggcgacggcggagtacgacttgacgaaggcgacgacgtcggcactgttgttcagattcagctccttcttcgtgttgtccgacattttggctgtcagctcctccgtccgcttcaccttctcgtccaaagtcgtctttttgtcttcaattatcaaagtcaactgaaaagggcaaaaaaataaaataaatttacatttaaaatcaaattactgacaattgctttttccaataaataatttcattgctttttcacctctgcgctggcctttttgctgtcctcagaaagtgttgccgttttcgttttcacttcgctttccaattccgcgtcgtttttcgcttttgcctccaaaattttgttgacagccgtcttaattggggtaattaattaataattaattgtttcgatgcttttgttttg

SEQ ID NO: 21921 - DNA, 2971 bp, Heterodera glycines
  unsure (1)..(2971): unsure at all n locations
ttttaataaaattntcttgtaaaagcaaaatattcttagattctaatgcatttattatgcttttcaaagttcttactctttttgtaatccattttaggaatgttttaattttaccgattcatttttaaacatattttaataaatgatttacatacaaaataaatgcttacggtcgtatgaataaccacaaattgctgaccaattcgttggcatcttcttcctccgcttcttcttcctcggcttcttcctccgcttctttttcctcctcttcttccacggcccctcctcccccttcgtctcccctctcttttggtccctccccctccggcgccaactttctctttgacgatggcccgccaatttatggcgactcttccgccgctgcttcgtccactcctcctccaacatttgccgattctgctgaactgcttgaacaactccgtcaaatgtccccctccttgtgccgtcagggattgctcaatcgctttgagcaattggccgatttgttggccgccgggtggaagtaccacgtggccaacacggacggggtcaaggaggcgtggacacgctttgaggacttctacgaggacgtgtgctcgtacacggaaggtactcgcgaaaaggaacccctttgggcatattaataatgaatttacaattttgtgcttttttaaaataattcaattatagcaaattgtctggctttctaatagttcatattttattaatctttattgtttttaatccacattttttaatttttcctctctttcccaaacattaattaaaaatcatttttttcacctttttcctcatttatgaattttatataattatttaaattattatataaaataaaattttcctcccaaaatattcacaggttctcctcttcctcttctctttgtgtttctccgttttccccctttttgacacttatgaaaaagtacctttctcactttttggttgttccctcaccaccaaaaacgtttctttctttctcaccattcttaccaaaccctccccccccctaaggggcttttatggaaatttggagggatgcttaaagcaaatatggccttatgcctgcctatccgagtgctcacatgtgagttgggtgagtgagttttggccgggatggcaatgaatggcggcaaacaccggcaaaagggggggcaacgggtgggggggggaagggagggcgaaccccggggcacaaagggacagacaggcacagatagacaatgaatgcttcttttcattgccacggcattgatcccgtctttgtactggcgagaatgaatttgtgcgttctcgtgccatttcgcttatttcgaacaaataaaaagaaacatgtcaaagtctacctaattaaggaaaatgaacgcacattaatgttccataataatcgaataaaaataaaaccaaaatgtaaattggatttcacacctttcctctttcaaattcatgactatgccaaaacgcattttcgttcctttttcaaaagaaatatgttcgatattttttcgtataatttttttgataactatcaaatttatccgaaacttcatcggcaaaattggcactttgaatgccattccttttattgccatattttcctttatatctgcactaatttgcatatcattcacaataatttgtccattagattttggtttcattctcatagaaatttcatttaattattgtttaaatgtcaacaaatctcataccgatgcttccctttttgtttttatttggacttctttcctggttttgctttgctttttttattggcattgtgaccttccctcacttttcattttcttggcactccccggagaagacccccgcccacccccgccgaatggacaaatgcggggaggggagacaaaatgaatttattccgcttcttgtccaacttatcgctctgcacacacacacacagagccattctgatgcttctgctcggaagaaggcttttttgccctcgggggacggattcatttctcagcagaaaagacaatcaaaaaaagggaggggggaaacatttttgggttgttgtgttttttttttcgtacaaaacttcagcaaaatttgaatgtaaaagtttattttatttattttgcttaaacacattccgattccaattgattcatctttattttggcacttaattttacataaattttcattttttgacttctgtaacaaattttctcatcattttgaagtctaatttcatgctaatcggctaacaatttttgcaaatgcgcccatttttgcgaaatgaatgagggaagtaagcactttaaaaagactttgatcagtcgcggtcgcaccgctgggcatcgccattctccacaaaacgacgatggggacgatgaccaacaacaacggcaacaacagaaccaatttgatgcttatctgaatccacaacaaatggacaattttgaaatgggggcagaaaaagaagaggaagaagaaggggaggaagaggaggaggaagaggacttttacgcacttttgcaacggtttgggggccacggaagagagggcggcaaaacggcggaggagtgcggttgtggaaggcggcgcaacggcattggcactgccggaaagagtgccgccgatggtccgggaagggagtacgacgcgccacggcactctctggggcaatttttcaacagcgaacaaagactccgagacagaggtccctctcggcttttacttttgattggaaatgccgagcggcataacaattaattggccatgtgccttttttgcggtgaccagcggacttttaccggtccttctcggctttaatgttcaccccggccaatcccccaaaaggtcctaattatctaattgcttttatcgctttaattgggattaagttttatttttgtcctttttttgttccgattttccgttcttttgccattttcgtccgtccctccgttgttgccat

SEQ ID NO: 21922 - DNA, 3172 bp, Heterodera glycines
gtcgctgggcaccgtacaaaaagcccctcagggggacgggggacacttgactttattacaaattgggggacggatgggttgtgtggggtatccattcgtcatcatccaactgtgaattgattacattagtggcggtgtgttattggggagaggggggagcggcctatatgtatggccactttactatgcaaataggggaacggatggagacgcaaggcttaaaccgatccgagtgtggacggcacaaatgggccaagtggcgaaaattggcggggggcgagggtttgaaattgccttcaaaacggcaaaatgaaatttgcctggaatgataattacactaaaaaagtggattaaaatggttatagaaaaagataaaaaagtaaatttggtgttatatcagggcagggatttgtatgaatctaaaaccaaaatatggacacaaaaatggaatgacaaaaattaaaaatggacatgaattgatcaaggcgaataaattacccaaaaaataaataaatttaaattaattgatgatttatcttttcctacaaaaaaatcttttttttttggagtggcttgggttaattaggacttattaaaaataaatgcctttgattaattaatttccttgaataaattatcgtcatatatccctcatattttcggcacttggattgtacgcaggcaaaagaacggcacacaaataaaatataatgctgcctttgcgcactctggacggttagatgctgtgcgtctcacatttggcccatccaatgccctcaattatgccgccgtcgcacaaatccattagtaatgctaattaatatgaccccgataaacaaatggagggagagaaaaggcacagtctgaaaaaaatatatgtaaaaacagatttgcagcttaatgctcatttgcgcattggcgcctgaataattacaattttggatttttggcattttgccaaattgggaaaggaaaagaattttaattaaaaaatgcagctatagaaaaagcagctcaaattttatactgttttttaaatttaattttatttcttgaaagaaattttatttaagtgtattattattaaaattaaaataaatgaatattataagaatttaaaaaaatatatttccaagctcaaaacaaacaaaaaaaatttaatttacgaaatataaatttaattcaaaaagaaaataaatttagtaaatatttgtaaataaattaaaatttataaatattgctaaaatatcaaaatcgaaataaaatacaaatactaaaaattattttttatgcaaaaaatggcctgctggcggattgctgcatatttaagcattgtcttttttttggcttggcccaattatccccggcccaatggccagaagaatggctcttggcccgccacgtttatcttttccaacaattttgaccaatgccattgttttgaagcgaaaactgcacaattttatgttggtcacaattaagaaagtgcattagcaaatcaccaactgagttaagtggggatgcttttggaaaaataatttttagagaatttttacaagccttaaatggggagcgagcggataagcaaaaaacaaacttaaaaagtcgaattagccatcaaaagccattactcatagcaggtgtcattaacaagaaaaaaatgaataaattagtctctcagggcatggggaaaataaaaataaaaaaaattaagggaagtaaaacaattcaaaaaagaaaaataatccaaaatcaaatttcaggtttataatgacaaattttgattcaaaaaacaacaaaattaaacaaaaccagtaattagacacctaatttttaaaatcaaaaattttcgtctaaaaaaaataaatattttggagatgaatttttgaggacatttttatttaacaggggtatgtattcttaaaaaaaggaagtaaaacaatataaaaaaggataattgatgaaagaaaaaatgaacattttggttttgtaaaataatataaatttttacgtattcgaaaaaaatgttttaataattcaataattaaggacattttcagtttttatttataatcctattcgattttttcaaattgatggcttttaatatttattgtatttttcttattttacgaaattaaatccggcaaaatccgacaaaattttgacgaaatatttggcgacggatgggacaaaaatgaaagtgaagaaaatgtgataaaaattgaacaaaaagaactaaatgaaaactgggaatttactcattcttctgtccgtcaaaatagtgatgaaaatattgcaacagacccaaatgatcaacaaaaaaaagaaatgattcagaaatttgaagcaataaaagacaaattaagagaaaaagagaaatttcaaagaatatatcgaaataaaattgagaggaaaattggaaaattattaggcgcaaaatcgccatacgatattcaaatggaaaaataaattaaatttataaattgaaaatgaatttatatgcgcagaaaaagaaagaattcattgaccgatttgataatttaattgtttatatggccaaggcaaacaaaaagaatttgtgaagaaatttagtgaaattttataattttttaattaatttttattttaagcacaaaataaatgttccaatgatgacaaattgggaaagataaagcaatatttcgaaattaaagaagaaaatccaattagtgacaaactaattgctaagcaattggaaattggaagtcgctaaaaacctggagaaagaaatttgccttaattttgaattgatgattttttgaaagtgtaaaaatttggtttaaaaaaaataaaataaatgaattgtaatgaaaaaaataataatttaaaattactatattgaatatttattaagaatcaaatttaaaaaattttcataatatttaaattaatagaattttgagtggtaaaattaatgagaaaaaagaacgaaaatcttaacatgtaaattatactttgtattaattttaaaaaagatcaaaaaaatgtttaataattttataattaaggagattttcaatttttatttataatcctatccggacaaattaggacaatcaggacattttcgattatttcaaattgattttcaaaaattaaaagaaattttaaaaaaatatttgcgtaaaaa

SEQ ID NO: 21923 - DNA, 1827 bp, Heterodera glycines
aattggtaaaatagatgctgtgttcgtgatcagcgactacacaagccccttaacacttattttcattaatctctaaaacatatttataggcatttgaaaatgtatgttacatagaagtagcctgtaaactagaagagtaccaacaattggaaaagagacgaccaaatgcatacagtcaaaccataatttactaacgaaaatgtgtgagtgataaacgaatgaatgagaaaattgaaatgaaaagacaataatttgtgtgtttcgtccgctatttgaccggaacattgcgcagtgtcggcgcggtcaccagcgaagaagcgccgtcttcggcgtccactcgcagcggagtgcccttgaaaacgcactcgccagtgccagaaacaagcatatcctacaaaaaattttaaaatgaaatgctttgggttagaatttttaccaaagcaatttcttcccacacactctttttcaacactttgtccggctgacgagcaaaattgggacaaatgatcaaagagccgggaggggacgactgatcagacaattccaacggttcaacctgattagaccaaatatcacacaaaaaatggctgtctttttttcactttttgttcggtcgatgcgcacaaaatcatcgcatgcgaatcgatgccacgttttttcgacggtctcaaattgcaaaggcaaacgacgagccggttttgaagctgtacatccatttataaaacaaatgttatggaccatttcaatatcttgggattgcccaatgtttggcacctcttccaatccgacgaatttgacgagtccggcaatgactgtgcgcggctgcaactcgcccagctccacgtgggccacatacagtgagtccgcgttcgggtgcttccgaaccgcaaccacgcgaccgacacgaacatccaatcggccgaaatcgaccgatttttcaccaaaaaagcggaagaatttgtaaaaagggaagcaatgctcactcactctcttcgatggcatcggcacgtttcctaccgaaaagggatgcgccaacattgaaaaagcgaagattggtcgaaaaattggagcatgacggctaaaaggcaaatgtaattaaaacccaaatttggaccgaacgtttgccagacgacgggagagaagtgcaaaattggaagaccaaaacatcggaatgttgaaaagaatttttaattcactcacgttccaaaaataaatcaacatctcaattaatattaggagttttttttgtaacggagtaaaaaaagtatttttttaaaattaggaattttatgctcgaattgaaaaggaagaacacaaacaaagccaacaacaaaagaaaaacctaactaacagaatggaagaatgtcaaacaaaaattggatggtcgtcattggtcatcgattcgaaagcagaggcctttcactgcacaaatttgcctctttccatcattcgtaaacccacgcattctgcgcactttcccagtcgacgagttcttccggcttgaaccaatgggcaatttcacggtcggcagaaggcacctaaaaagcattcaattcttcgtcggctttaaggtcggagggactcaccgaatcggagccgtggcaaatgttacgtcccatctcaatgcaaaaattgccacgaatagtccctggggcactggccaacggattcgtagcgccgagcaaaacgcgaccctgtttaaccacatccaaacctaaaatgtgagattaaattcgtcggcaatcctttaaatcagacgaacaatctccaccctctattcgcattttcaatttttccatttgctggttctagtgcagaatacgcgtc

SEQ ID NO: 21924 - DNA, 2231 bp, Heterodera glycines
ttttttataatttacaaatgaataaagaaattaaaaaaagtaagtttgatgaagcattgattaatttttaaatataagaaatttaaaaaaaagataatgtttggtgaggcattgatcaattttttaaacataaagaaattaaaaatgatacttttggtgaagcattgatcaattttttaaaacattaattaaataaataaatttttataatattaagaaataaaatacatatgaaaagtaaagtaaaacagttaatttaaacattgtgggaagcattgctgaaaataataaatcaaataaaaaagtgaattattgaccgatagattttgtatatgttaaagatgcgaattaaaagaaaagcgaaatattgaaggaaagatgattagttggacttaaatgagtagaataaatacttatttaattgaatcaaattctccaattgaaataattcccaaacatattaattcatttgttcagattcccttgcttatttatcctctaattttccctctgagaatggccaacccttcggctgccattatatttgccctgttctcggctttttggtcaattatttttgaagcaacggtaatttattttttaataaaaaaattaatttttttttgccatgactttttctttaataaaaataaaaaataaaatttgctttaggctaggcctaggcttaggctttcttgggcttaggcgtaaacttaagcttaggctatgttttttaaatatgaattgctttgaacaagttgcctttgtataacattgtacgagttgccattaatccgaaaatataatccaatccaaattcgatacctaataaattctccctgattatttaaattttcagtgcaatgattccttttctgacacattcgcaacattcatcatttctcgtacggaagctgttgatgataatgccgctccaatggaaaatccttcctttgaacagcagcaaaatttggtggcattggacttgggaagagtgcgcgagttgcagcaaatgatcggacaaaatgccatcgatcacattgttgttgaggatggcattttctcaggcgtttactcatgccaatccaacattgagtttcaatttgatggactcagtctgggagatggcaaaatgcatcggatgctgttctcattcggagcaatattaagtgccgaaattgacggaccaaaacaaacggccagtgaaaatagcaactatttgcgttcacttttgaaggcttacgaatgcgtgggagggtcattaaaacaagacgaaggaaggtagtattgaaaaatttgcttagggttaattgttaggtcataaaagggcgtgttatttaataaatattatatatcgcaaaatatatgcattaaaaacttgcaaaatatctacacctatttttttgaaaatgtaccataaaaattaaaaaaaaaccaatttttaaatacttaaaacattattattctaaattctaagcctaattagcagggctgggaaatttaggcaagaaaaaatcacgaaataggtatttaaacaaaaaatgctcaaaatagttattaaatagttacaaaaaacccgaaataagtagaaaaataggtaaataaaaattttggcactacttaaaagcaggtaatttctgaaattttttgcactttttttttggtcgaattttttttttttaatttattttaataataatgaatattaaacattaacagcacaattatggcgagtaaaagtatattcacgaattttttttctcaaaaattttgcaaaacaaaagggtccccctttggttttttataaaattcaaaatttgtcactttttaattagcgtcaaatttcttttaaaaattatttatgcgtaccatatattaaaaaaacaaattctatattaaaataaatttaaaaaaaaaattcgaccaaaaaagtgcaaaaaatttcaaaaatttatttttaatattttcttagaagatattgacattttactaattaaaaaatttggaggataaattttttttaaaattttccaattcttaagggtatatattttttttaatttggtcgattcttaggggtatattttttgattttattgcatttttgttatgaattttttgaaaatccttaaaatagggaacaaaaatgcctatgtaagtaggtaaaaaataggtacctaggtaataggtagaaaaattcccaaataggtaagaataggtattataaaagt

SEQ ID NO: 21925 - DNA, 2011 bp, Heterodera glycines
gcactctttgccattggcactccccacgcccactccgccgtttttcggcctcattcccataaatcacttctcttccgcctcccctttttcaattgtggcatcaataaaatcgatgaattttttggttccgaaaactttttaaatgctttttattaaattgattttaaactctttaataattaatgtgttatttttaattattattaaacttaccatttttaattatttcgaatttcctttcgtcccctttttgagttttgtcatttgattacctttttcctttgctaaattcctcctccccataaagtcaatttccaaattagcactttttggtgtccttttgtcctccctttttctctttttgtgcttctcatttattcgcgtccattcgtttttttatttgcgctaatttccaaccgaatttcgcaaatggcccatttgcggccattctccgccgccaaaacggaagcgcaattagaaagagagcattgccaaaagtgggaggggggcggacggcatttggcttcacattggcccttggaattgccaatttggccaacaaaaacttggaatttttggcctttctttccttcactgtttccgctcccaaaaacggaatttcgcttccgttgagttttgccattttcgaattgttttgccattccttcaaaaatcccggcacttttgaaggtcgaattcggtcgatttgaactcgtaaagcgcgcgttgagccaaattcggccgagtttttattgtcctccgaatataaatggatgattgtgagcaattaagcttgcttttaagagaaatgaaatgaaagttcactttgaatttaattttttgtggtgtttctgatttttaacgttaaaatgttaatttattcttattattattttttactttaattttcattttacatatttataatttttaattacctaattaattaattcactcattaatttccccctctttatttcagtttcccttttcctcggcgtcctttcctttgggcgttcgttcgtttctttttcaccgttccgtctttctttcgtccgttgctccgttcttcattttgtcctccattatttttcatcacactttttgctggccattccttttggcacctccaacaattttggccatttatggtaataaaaattaaattaaaactgaatatgaagccattttcgtttgattttccaattgattgtccgtccattctccgatttggttcttgaaaatcgatttaaatccgataatcaaaagtgaatatcttaaacgctgagatttgaggccaatactctcgggcattctaaatatcctttgaaaatccaatccacaaatgctgctttactttcaaggcacgcttttcgatacccggacaaaccccaactaattagtcgtcatccttttgcttattaccccaactaattagtcgtcatcctttggcttactttcccttatcagatttatgccctccccatgtttaggtggatgtcacccccaattgactgtcggagagtgccgttttcgccgccaccgtcgtcgtcgccgttttgccgcttcctccgccaccgtctcagcctttgttccgctgccgtttttccgcgccctccgccgtcctttttccgttctttctgctgccataatcaccaacaaaatcgcctcttcctccgctgctattgtcccccgtttcgtcgtactccgccgtcaaaagccgacgattttccattgtttggcgcacctccaatccaatcgaataatcccccgctaattgttgccgctgagctcgccgagactgttcctcgttctgctgcggttgcgggtcgtccacaccgcgtcgagtctggctgggccatcgctgggcccacggccgccgaatgccgtgggtttttcttttggaagaaaatttaaaattggcccaaaattaaaattattaattaatttgccatttgtttgttcatcaatttataaattaaattggtataattaattactttaattaatg

SEQ ID NO: 21926 - DNA, 1697 bp, Heterodera glycines
  unsure (1)..(1697): unsure at all n locations
ggaaaatggaggtgtagggggcccggagtagcacattaaaccaatttgtcaacttatttaccatttttatttattgttttagcatcgttaacaaattaaatcatgcgaagaaaatcatgtaagaaaaaaaaataataattcagaatttcccatcatctttgtattgtttcatcaatttgttctcaactttcgctcttcattttctctcaacttcattctctcaattattccccgctctgcgctcattcagtcgatgctgtgccatttgctgaagaacattgacgatttcggcgggtgtgttgaaaatgccatgctaaacaaaattaatcaaaaaatgaaaaaattaatttgttgtgacaaattacccgcgcgccctgttcccgaacaaagtcaaaaacggcatttagtccagggtcctggcgaatttgttgatcaaattgaatgactggctgaccattggtattgttactggagtcatcacgtggtgccattttgggtaaacaatagaatgggttggaaaatttttggaagaaaagtatggaacaaatgtagcaattacaatgaattccattttggaaaccttaaatattcacaaattgacctattttataagtgacaaacaatttaatttcggtcgaaacattgcgcgaaatcgtcaacaaattgcaaatttacaccttcataacaagtttgataaagtccaaatgcaaaacaaattatttcacttcatttgaataatttaataatatcaaaaactgtcatatgttgatcaatcaaaattccgatcctcccccccccatcagaaatttgaatttcccctcatctgtcatttttacaattaatcaaaaaatttcccgccctcatctgtcactttttatcagagatttgaattttccctcatctgtcactttatgaccaatcaaattccncctcccctcggctgtcactttatgaccaatcaaattccccctcccctcggctgtcactttttaaatcaatcaaattttatgtcaaaaaaaagtacatgaaaattttacacacccttctcataggtctaggtttccctaattaattgacaccacccatcccctacggctgaccaattagtgcccgttgaccgctgaccaattagcgcaccccccaattagtgactaattgacacccctcccccgccacctgtcacttctaattagcgtcaagcggcgacggaatggcaggggttactactataaaatatttttattatattttttgagttaaaaaaaattttaaactaataattatcctattaaattattaataattataataaatgaaaacaaaatttttaataaagcgaggaaagttagtccaaaaaattaaatgcatttttacaaggattaataaaaatgaataattaagcaacaaacaacattaataaagaatacaaaatttgaacaaagaaaaattttatacaaaacgcacaatgaaaaaatataaccgttgttttctctgtttttaaatgcagttttataagtaattaattttaaaaaataccatttatttcatacaatcaatcactaatttatttctaactttgatttaattaacgacaatgttttcaatggattacatacattgtttaaaagtttaacaatatatcaaggaatataataaataaatcaaagaaatacaacacattcaataaaaagataaaa

SEQ ID NO: 21927 - DNA, 1191 bp, Heterodera glycines
aaaggagaaggatgtgccaatgagtgatttgaagtgatttgagacgtgccacacctcgtgctgcgcctccttccagtgtaatttgatcagcgtattcttcgatgagctcggccccggactcggctcccgcccgtacattccgccgggcacgcaaaggccgccggggggcggcggaggcggcgcgccgccgccgttcattagcggagggggcgggggcggaatcggacctgccaaggtgggtggggatagttggtgacttggggtgccaatttcatcaggatgtactgacctggtggcggtgggggtggcggtgcgccgcccgcgcccgaaccgcccagcagaatgcctttgtcctgcgcaatctgagccatgcgggccaacacgagcgggtcctgctcgaactcgaggaattcggagaagtcgaagtcgttgatgatcatctgaagttttttatcaaattgttgcgaaatcaattagtgatggttttatcttttcctctcatggcttttcctccccattttcccttctcatggcttttccttcccttggctttttctccgcttcttttcctctcaccggtttgtctttgagccgttccgccgcctctttccatttggcctccgactcggaccccctctgttccgttagccctttgcgcagcgtcgacccgctctccattttcttcgcccttcgctgtaacatcgccgcgaatccgccgcctccgcctccgccgtcgtcgtcgtccgccaaaatcacctgaaagcgttttgacgtttaaaagtgatcggagaggggaataaacgcaacaacaaagtcactcgcccttttcggtttctcgggctccgccggcggtggcgtcggttcctttggcttctccggctcgggaaatgccatcgttttcttgtcgattggcgaagaaatgttcgttgggatggacgggggaggggccttcatcggtttgggcgtttcctgcaacggttgttcatcctccgcctgaatttaaagggggggggggggacggaaaaatatttataaaaaatcccgggggaggggaaagagtgaaatgttctaaatgaaattctctggcgttgacctcaattagcactaaaaggcgacatcagcatagctccctaatgaaaaaatatttcccccaatttcgattcggtgatttcatttgactgaccgttcgtt

SEQ ID NO: 21928 - DNA, 1324 bp, Heterodera glycines
  unsure (1)..(1324): unsure at all n locations
tgcattcgcaagttcgagtccaattttttcnccatttattcttgactccacactttttnntctagagtcataaaagtcgggagataaaatgccacggttggcggggagttcgatgatggtaaatgtggaggtcgaggacggagaacaagcacaattcaaattcacagctgaggatttacctttcccaaagtgccattgtgtgggcaaagaaaatgccgactccgttcacttgattgaggacatttagccggtcaaattaatccaagcgaataaaatgagcaaatttcggcatttttaatctgcgagaagggcacaaattggcattatcagagaatgcagaaaaaagaatggcacataaaagacagcagaagcagtgccaaaatcattctgaaaaaatccaacggtcagagccaaatttattcatttcgttcccttatagccataattaattaattattttcccacaattatttaatatttctttcaattctaatttcttcttcttctccaccgtttggaccagcacatttctcattgtgaatgtgaaaatgatcaaattcattcacatgatgaaaatgcgctgatcttaaccgatggaatttcataattagtgtcttcattagctcggccactcgaatttggctctaaaagttcatttgccttttgaatttccattttttggcatttttaattgttccatcaaattaattcgtttggcaattattaattttgattctccttatccgtcgttttgatcagcgcatttctcattgtgaatgttaaaaatgattgtaaatgcgctgatttgaccgatggaattttgggccctaattacctaatttgaattttccttaatttggcaccagttgaaaacagtactttgagttcgcataaaagaaacaaaaaagggattactaatgattgcttcatcgaaatgataaaattcaaaaacaattcgacacgcgtcaaaaacattttcactacaaaataatgcctaatttgcatttcaaattccgagaattgtcacacgccgtttaaatgtttaataatgggcactccgtgccatcatttgtttgagcaatttgtgccatcatttttgtcactggcttaattctctcccgtgcgttaatctttgatgatacaaaattacatgccaccaaaacatcattcattcattatcttatcacagtcgccagagatgaagttgctgctgctcgctctacgcatgccgtgccgctctgttcgccgttgttcggctatttggaatagcctttgcgcgctcaatcttaatttgaatttgcttcctcgacctgcagnngcatgc

SEQ ID NO: 21929 - DNA, 2281 bp, Heterodera glycines
tttagctgttaatttttaaataaattaaatgttcccctttctttgcttaaagttcgctacttccatcctcgtgtgactgcgctaacgtcctcataaaacccagccatcatcgccacatggcccggcctggactcagttggcacatgactttccaaattgccccaggcagcctcaaaaattgatttttttttattaattaatttttttttgacaacttttccatcacgaataagcccatgcaaaaaaggagaaagatgcgggtgttggtagaatgttcttgctcgaagtccatcttgagaaagtttggctttcatttttaatttgttttttttaatttttattttcgctttaaatgtgtccaattctcaaagtttcatttgttttaaaattacctttaagtaaattttactggtaaatgtctcaaatttgtttgacctgccgagaaaaaaacgatgcgatcggcgggcgtaaaactctccgaatttttggcgattataaaaggccgcgccccgcgcacaattggagaagaaaaataaatgtcaaagacggcgtagagcaaaagcaaatggacggagaagccgacgaaacaaagcaaaagccgaaaaatggcaaagggagcgatggaacgcataaaaaaggcaatggaaaagccaaaaaaggcaatggcacagccaatcggtgaaagatggctgggatgatgaataaatattttatcagaattttaaacaaaatttactcgatattttatttttattttatagagaattaaaaaatattggatgagaaaacaaaagaaatattttcatttgcgttgtgttttctaagcttttaaaacgaaattcaaaaccccggcggcgccaagaaatgaaattaataatccctttaaaaaatgaattttttattataataataataataataataattaaaattggtacattttaagaacacgagcccggcttttctggacccggcagtacccggacccggtttttgctcaaatgcctagacccatgtaaccctattgaaatctctacgattcaactttttctcatttctattcaaacaaccaccattttttgttataaaacaaaagcttcttttttaattcaaaatttagaaaatcatattaaaataaacattcttggcattcttcttctctatctatgatatttctaaaaaagttatgacaaaaaattgcaaaaaaaaaaaaattttccctttaaaaaattcattttgattttaatgtttaattctttttcaaaaaatctttactgaataaaataaaatcatttaatgaatgtcgaatgtttgcctgatcacagttttgtgtcttcttttcatatgcaaatgcgtgggtgattggtctagtggtatgattctcgcttcgggtgcgagaggtcctgggttcaattcccagatcaccccagtttatttttacactcagaagagaatttgttgaaaaagtttaaaattttatgatatccatctttaattggtattttcatttaattttttgctgtttatttaatcgaaaggaaagtattttatttcatttaattaacaaattgttggatttctttaaaatgattaaacaattaaaaagcacagaacagagaatgcatttcgaaaatcactcattatttagacactgaacttcgccctccgttatttttgccaaccattcgcagtagatataaacgcaggagaagaagcctaaaataggaaaaggcaattcgaaaataaaaataaacacagtgagtaattaatgaatgctaatgggtaattaaaaattgattaaatcagttaattgattgttaattggctgccctcaccgttcgattcgcatacgaaattgcctcggctggtcactccgatctgttcccagcgctgaccgtcgtaacttttgaccaacaacggaccaccactgtcgccctgtgattcagaagggtaataacagttaagcagcttttcactgttaaatgtattcttacaaagcaaacattagctccgtcttcgccaaatgcgcaaacttccgactccataatgccgtcgcaacgcgcctcatcctttggccaaatcagcacattggcaccttgcagagtgaccggagaactccagtctaagcagaaatttaaataaatcctgcttttgttttgatttaccggtgatacgtccccatccggcaatgaatgccaggtcagtctttgtaaaattggacctccgggacaaagtgatcggatgagtggcattgtcggagaaatcaatcgaatcttcagct

SEQ ID NO: 21930 - DNA, 2732 bp, Heterodera glycines
tgagagagagaggatgggaaaggacagaatcaaaagcacaaaaatgggtcgaatggacaaattttgaacattttcgagtggaaaaatgccaaaggaatggcaagttggcattgtcaatttagcagatggcatcaatggacagagaactgggcaaaaaaaaccagcaactttttagctagtaattttacaccaaaattgtcaatttttagtttttaaaaaaataaatacaatgcaaaatagtgccacggcatggatgccaaaaaccggcaaatgctgagttttccagtcaatttcaggaaaggattaaaagtggcgtcttaacacagattttgatatctttttgcacctttttcttcgtagacacattgtccttgcgcacatccatcgggtcgacgacgcttttgaagttattccccgtgacgaacgaacgccgccgggggacggcggacagagcgaagagggaaagggcggcagcggaagaggaggggggaacaacaacaacaaatctgagggggaggaaaaggatggcaaaaacggcattttataggaggggggggggggagtcaatgacaaaaaagtcttttaatttgaaaaaattgaagcctaagccagccaaatttgtaagctaacgcaatgtttattttgtaaataaaaatttttgtcggaatgggcaataatttgtttgtttttttcaactgaccacaagttagcatcaccagagccccattaaattcgcaaaatgggtcaattaaaacagtaaatcgtgaaatcattagagttcggcctggacctggatccaggcctggatttttcctggatccaggtccaggtccaggtcatttttcggcaacctggattttcctggatttttgtccaggaaatcaaggtccaggtccaatgtgaaaaaaaatccaggtccaggtccaggcaaaacaggaaaaaacctggattttcctggacgaaattttagaatttattttttcaagtgaccgatgttttttcaagttttcaaaaacagattaaataaatttaaaaacacattattattattaattagatatttttagatgcttctagcaaataattgattttttcaagcatttgtttgctttttaaaacaaatttcaaaaaatccaggtccaggcctggatccaggtcccgaggagcctggatttttcctggacctggattttcctggatttttgtccaggaaatccaggtccaggtccaacatggaatccaggtccaggtccaggccatttttcaaaataccgagctctaataacgttaataatcactttttgtacgtccaccgctttgtggaaaagcgcgcgagggaatggcgacggaaacagcgaatagggcgcaaagctaaaggttcagactgatctaaaaagcatcgatcacaaaacaaccgcccgcgctgaatcagtccgttggccaacgcccattttttggcctcgtcaatttggcccatcactttgctgggcatcctcttctaataattttcatgcttttatcaatttaacaaatatttcatgttaaatattctcataattttttcgtgtccaatttacgaaaataaatttttaactttttttgaataagggaaaaacaaatcacccgcttcattgtttgtgctaccggaaggaatgtcctccaaattttttgtaccttctgccaacggcggaaggaaaacgaatcgcaaacaaaaataaaatattcattgtctaaactaaagtggttgaaaatagtggtatttaaaaatggatgaaaactaataaattatataattaatgaaatcattgtttatatacatacaaaataaaaataatatggttgtttgatcatttaaatcaagataaaatctggagaaagactacggcttacaaattagcttagctacctggctttaagaaaagaatagattaaattatttattgctccaacaataattttgccctgtcatcccttctttccagtgtatttttaggttcggttgggcccggaacaaaaccgggtcaagtccaggtctggaaagagccgttgctggacccggtcgaaaaaggtaaatgacatgccgagtctcgaacccacggcatttaaacattaggatgatctaaccgacttaattgggtccggcgtcccgtcattttgggaaaccgagtaaaacgggcggcgtttttttgggaaaaatataaataaatcttattttaatgataattatgagtgaattgcgtggtgtcttttaaactttatataaatacttgtttatatatcagttggcatatttatttgccaacattattattttaaaaaccgaattgaaaatataaaaatttaaaaaatgcaaacgaaaattgaccattccttttagagattttaaaaattaattatttaaaaattttgtatcaatggtttattttttacaaatttgcaatggaattctgttaattttcgcaagagtttctcaaatgttgttttcttgaaaattttccaattttgagaagacaaaatagccggacatttcaatgcgcaagaaaatggccgaagaaaaccgtcttatggaaaagcaagtcaaagtaaaagatagttttaaataatgccaaaatatttattcatttaatattttaaaatcaaaattttattcatattaacgggggggggggggcggaaggacaggaaaactgaagaaggagaagcagcgaaagagactggggaaaataagagaa

SEQ ID NO: 21931 - DNA, 1439 bp, Heterodera glycines
cgctgctgctccggaaagtgtccgcatattgtcccacctgttcccaccacacattatgcagggtgcacccgtcatagcaatgaatgccgtccgccccgttttggccaatgatcaaatttttgatcactgcattcttttcggcacggatcagtgctttttggccctccgactgatcaccggtgcccaatgccgaagaggcggtcaaccgtttgaagccaaaatctttgacgcctcctgacactttaattgttgccttaacagtttcttcactagtcgcttttggccattgttgcccaaaagcatttgttgccaaattggcaaaaagaatggtcagtacaagaaaggaatgcattgatgaattaatttttattcaatttattaattgatgttattttagtgtgaaaatgtctaaaaagttaatcgcttttaaacaaatttttttttgcacttaggcggaccaaattttgttgaaatttcaaatttgtttagctgctctttctttagccaaccattaaattgatgccaatttatatcgattcaaattatttaaaatttattttaaataattttgttgcacttgacagttgactaaactaaacttttgtttcgagttgacggaaaaccaaaaaatttaaacaaaaatttgtttagctgaaatatttttgtcatttggccaatttcttttgttaatttggccgagataaattttcatcaattaaatttgtttgcttctcattattgggctcagacgccacctttagtagtttggtcgttttcattaaatttaattgactttttgaatgatcactcgggaaataaaagctaaacagataaaattaaaaaattctatccataattataagctaaaagaaagcgtgctgacaaaggaaggtccccaggtgtccgtgggatttccaaatgaaatttggtgggtggatagagcacccatgggtattttatttttgcttttttatacaaaagtcaattataaaaaattttttataaaacacatcttttattttttattttatttcattaacaaaaaatttattaaagataataatgtaataaatatcttttcagttcataaaatctaatttttgtctaatactttttgagtaacttatgtgtcaaaatgggttaaaaataagaattttagatcaaaacattttttggataattgactttggtataaaaagcaaaaaaaaaaaaatgaatttgcatgtaggggattccgaacctagggtttaaaaatcaatgacaagcgcactaccgctacaccactggacactcgattggtgcaaataaatgtttaatttgtttattcattaaaaaagtttggcacgtcataattaggcactcagactcattttgcagaaaataaaaacatttttaaactctcaaatgaataaaatcaattaataaagaattattttaaa

SEQ ID NO: 21932 - DNA, 1719 bp, Heterodera glycines
ggtttttatacaataactttgtttatgttccaacaaaccctgtctttttggtatcattcgaaaatacaaagtctaaataatgtaataatacgagaaaacaagaaaattctaacatttcaataaagttacaaacgaaaataatcaccaagtgtttaattaatcaaatcttttttggtaattgtctaaacactgcaattttatatattttagcttcgttagactgtactttcgaatgataccaaaaaaatacggtttgttcgaacatgaacaaagttattgtataaaaacccgggattgtcaattgattggacgcataaaaaaccattggacgcataaaagtccattggacgcataaactgtactagagccgattttattctcagccttttaaaataaataaaatagtcccgttttctatcaccacaaattatttcttttattcattttatcaattttaggaggattttgacagttgttttgaaggtgatcgatggtcttgcgtttcgttttggcttccttttgtttaaccgttcttttttccccaaggctcaaaagttatcctgctcattcggtgtgcttgtgaaactcttttacgagaaatttccccatccgatgttggtggattattcaaatagaaatattttcgtgagcaggtgaggagtaaaattcacgcacattcgcgtaaagaaaatctgtttcatcagtggagcgaatactagggatcacaaactgttcagcaaggaggattcacgatcattcaccgccatcttagagttccacgagaaaaccttaaaacagggcattgagttgcccaagatgtgagagtttgtttactaattccaactttagtgattcaaaacatcttcagattcaaagacagagtcagtggtccttctgaagccccaaaagtgctcgttgagttggctaaaaagtataatgtgaagggtgggcattggattatgttcttcaacaaattggccacccacaaatgggaaaaagtcttcgacgaattgctctccggtcagtgatttctttaaatgcacagattagtttttaattttcagaagcattgaaacactgggggattctgaacagattcaacgcaaggatttcgtcggataatttaatcatttgttttgtcagttttccgattactgtacgatgcctcgtgattcatttccattttagggcaatgaaaaaacactggccgcgtcggatcccacgattttggactcatcggaccaactccaacggaacaatgtgaagaatgacccgggaccatacactgttctgcgaatcattgacgaaatttataaaccaaacagtaatttttcactttattcgtccattattctaaattattaagcatttggcaacatgggcgtcaaatgtattgtttgattttttttcctttatttctttttcattttagacaaattggacattgtcaggttaattttctcaaattttatactgatttattttttttctcagcgcctgttgcatccaacgggacaatttcattcggccaacaggtcaaatttgggagaattcctcaaattaatagttggtcgaaccctcgaataagatcgccattttcagtttaccaggctaactacggcgaatactctcaacgctttgtcccgtcgaatttgcctttgtcacgcggcggcgcattggagggaatgccaatgccaacggggcgtgtgccggggacaa

SEQ ID NO: 21933 - DNA, 2374 bp, Heterodera glycines
agtgcaaagaaggccgtaagccgtgtgttttctcgaacccttcaccgtccttcctcttcatgcccttcttccacgacaatcgtttggccaagttcgtcgtgcacgctgagtgtgtagatttggtgcgacatacccacgattttgtacgagttcaggcgcaggtatgcttccatggccgtcatgtagcgcactttgaaggtggctgcaatctcgtcgtagtcgtacacttcgtccgcacccgcagtttcgttgcttctgccctgttgcgccgatcttcgtggctgtgcgacacggacataggccttttcaaaccctgaatgttctggaattattgaaaaacccaaaattaataaaataacaaccttttaacaggtatttgaagatatacttgcaggccttctgtccgaacacgtactccacattgatgtggcatccgtatttgagcagaagaaacgggttgtatggaatgactcggctgtcgtccatcagaattgcgctccggaccccccttttcttcttgtaatgcgtctggccttgttcgcccttaataattatattttgaattgacaatataagaaaaattagtacatgctgcctcgccggaactcttccttggtgaggaaagcgctggtaccgcacttcggcccagtctcgttccgggtcagcagctgggtcgtgatggtcgtcgtcatgttggttgtcctggccaccggctcttccaaaaaacgtgtcactttcgtcggggggtatgcgcacataattcgtgtaacggacctctttaaatttttacaaaatatttatcagatatatatgacaacatgatttacccgatagttcagtccggtcagagtacggcttgggaaaatgcttgcggcatcgcgagccttccagacatgccgcgttgcagtcgtgcaacatcattgaagtgacgtagtgccagaggcgacgctgctgatgtccttcgggcgattgatccgatgacggtggaagcgtcgggatgcgcgcggaaacatattcgtccacctgctgtgcagtttcgatgcggaccccccgttcaaggatcagaagcatgtggatgtgtggcatgccttaacaattttataatttaattatgctattaattttaatgaattaccgcgcttttgatgttccacactgtagcaccaaccggcaactttgccgagcacaccacgctccgtcacatccctgatgaattctgccgccttatccatgaagattcggcacacaatgtcgggccggtgagcatagttttgacgcacccgcaatgcttcgtcgatctctggccatttcgggtttccagtaaatgtcacaaaccttaacatttattataatactcataaatcattacaattaatttgtgactcttttaccaagtcggagcccccaggtgtcgaaccatcgtcatcaagtcggcgtacttcccttggtaatactgccgcgacccggcgaaggtctgtggcatgaggaaaacacggccgagcttggcatttggtccttgctgtcggacccccttctccatggcggcgatatattcacgggctagaagctgccggtagttcttcttcacttgaatggctttcaagtggttgagctcgttccgctcgatccggttgagcacagagatggtgaagtactcggcaagtcgtcgagcgaaccacaaccaatggaaggtgttcttgccggacccccgaagtgccatgcggtagcggtagaactgtcgctcagagatgttggtccggcctccacgagtctccacttcatggtcaaagatgacgtcctcattttcattgcgtccgggatttggctgtgcagtagacgtacccaccgcatccatttcagggtcctcctgttcctcgacaacatcgttgtccaatgccagttcgagctccggcatttcgtcaatttcctcatcattctgctgtgtacccacaatgtcatcgattggaacttcgtcgcccaattcgtcgtcggaaatttggtccaaatccggttcctcttgttgctgcatttcatgatgggcgttctttagaattttaatcatttttgattttgttaggctttctcgttataacctcggacccacgcttcttcataaaccaccgccatccaagtgtgccaagtgggtggagtagtgggaagcagcacgggtcgatttgcggcatgccactcttcagctcgcgcatcttcccggctttgtcggacacccagaacgcttaattattttatgatgagactgtttttggatcgtttgttattaccgctgatctgaggtggtagcccatcctcttctacccaaattacagccacttgtttgacagtcggtgcatccgctcgttcaataacagtaatatca

SEQ ID NO: 21934 - DNA, 2178 bp, Heterodera glycines
  unsure (1)..(2178): unsure at all n locations
gggtggcttttcactggggcgggggatggtgggggtcagagtcgcgggggcggggacgggggcacgataattccgcccccgcgggggcgggggcggggtttgatttgaattaactccaaaaaattttacaaaaaattaattttttatgaatgatgtgatggctccacattcctttagtcaatgtatcgcctcaattcaattccttttggcataaattacacagattttgtctaaagaattaccaaattttagagatttttggctaattttttaagaaaaaataggttttttgggggggggggcggtgccgataggccgcccggcgaattttgaaatttaagctcgatttctaacagacgtttacaaaaaaataagatttttacgataaatttttcattttttaatcatattaaattatcatcgatttactcaagcaaaatcggaactcagatttgtaacatattttcttcgaggcacatttttccaaaaaaaaaaaaaaacttcggtgaacgtgcgagcgtagaggtccggcggtgcagataggcgccgccgggaacgttaatagattttcgtccaaaaaatcgataggtttttcgcaatttttagagaaattttttttaataagatttacgaatttttgggccccgcgacgccgataggcagcgccaggcgaattttaaaattaaaaaagaaaaccgtcaacctgaatcgaactcacgacagaaaagtaacgtcaaggttgatttcactaaaccactaacaccacactaacatattcaacgaccaataataaaattaactttaatttcataaaaaatttggtcaaaaagggttaaaaaaaaatcaaaatcggtataaattttttcgccttttcttccatcgaaaacctcattttttaagggggtggtattttcaanccccggccccccgcgggggggtgaaaaagtctcgcgggggcgcagaatttttggcgggttttcaagagtcacgggggggcgggagaacggggggtgaggcccaaaaaacctgtcccgcccccggcgggggcgggggtgacgggggcggggtccgaaccctaatattaactaataaattagttaaaacattaccacaaataaaatatgagcgaatatttactaaataataagacgacaatgaataagcgtttactaaacaattggactacaagagaaaagagaaaattatagattatattgtgatagcgagaaaatgactccgtcacaattgaaacataattaaattaaatcaatctcagcagtaatattttgcattattttttataataatcattttactagagcagaaatatattgaatgaatgaagttatttgactctagcaagtcaaaaaataatacaaataaaatttcattcaaatttgaaaaaaatcataaaaattttactcatattctatgcaaaccgaaaaaaaagaatacatacaatagtttttcttaattctacataaaatctatattttttgcttaaaatcaaaaattacaattttaaaatgaatttctaattgaaaggaaaattttctttgttaaaaaatgttttattttgaagctaataataaacacatattaaacagtaacaaaattaaacttaatgatttaaatgaagaaaataaaatagcatttatatactatgcaaattaaaagggaattaattattataaattcaaataaaaacaaactgaatacgaacaaaaaatttttgttatttatttcgtaaaaaaaagagtcaatatcaataagataaataagagaataatgtaaacctaaaaattttattcgaaaataatgataaacaatttgctaattaataaaataaattatttattcaacaattgaaatagaaaatacagcagaagcactggaaaattaaaaacaaatttattgtatgaagttgaatgtgaagtaaactaaatgcgctaattttgataagtaatacaaaaacacgaaaagagatgtgcggttatgagcaggtaaatgatagaatttgcagtaaatcaaataacactaaaaaacaacttaaagaaataaaatatataaatgaaatttttattattaaataataaatagatctatttcttaattgtaaatatatttttagattgaaaaaatagtaaaaattctaatgcaaattataaaactgaaaat

SEQ ID NO: 21935 - DNA, 950 bp, Heterodera glycines
acccgacttattaactaatttttaacatatggcgtaaaggcctttgaaagcccaattatatttggcggtttaacgaggcaaccctcccaaacaatctgagaattcccttaaattgaaaaaaacaattgcccacttcaaagcgaacccctcctcttcagttggctcagagccaacggaattgtctaagtccgtgtcgaacaaagggaagacattggccattgaattgtcagcgaagggttggcaattagccagcaaaaaatggtcgtattccgattcagaaaagcgcaatgtctcctccaaaaggcgtgaaatttgcaagtaaaaggacgaatgattcatttgtagcgaagaagaagagcagggaagaaatatgggcaaatcctggccaaaatatcaactttttaccgttgctattaattaaatgtgtttgccctgtgcttctctctctttctctcacctccttcgtttgttgtacgtcgttttcccgactttccccctcattctcttctgtcactttttgtgccgccgtttcaaaatcgccgaagtcatcgctgtcactttcgctttcgtctaaaaagtgaaatttcattaggtttttaccaaatatattttaatgaaataacctttttcgcttttgtttttgtatgacagcagtgaaactgaacggatggagccgtggtcaacagtttgatcagcgaaagtgtcagtgttagtgttatttgacgttgaagcgatcattcctttgatcatttggcaatcatgaagaatgggggtcccatatttttcaaaaaaaagttttaaaaagatgtaaaacaactttttatgaggttttcaggggcgctaatcacgaatatgatatttatttcaaacccggacccgaactcgaacaaaagtcgaaaactcgtttttcacaaaaaatccaacttttgtctaaaccggttcaaatgcat

SEQ ID NO: 21936 - DNA, 912 bp, Heterodera glycines
  unsure (1)..(912): unsure at all n locations
ttttaaatcgtgtcnnggttcttctggcaatcagtccaaacttgtttttcacttnaaaaatgagttcccgagaaaaatggcaccttacactcaagttctttattttaactcaaacgtaacttataaaaataataataaaatccaagtgattttccactgttttagattatatacgtttgcgcggaagaaaagtccgatttatccgtgttcagaattttttcgttggatggaacaaatgaacatgaacatattattgacgggaaagttcaaagtgtggcgatcagtcagaatggcgacttgtacatgacgaaacagccgacccacgggacggaagagtccgccatttggaggtaattgcgtgggttttgttttcactgttctattactcttaattcagatcacacatcgatcatccaatagtctaagaatttgcaaatattatataataaaaacattggtttttaggcatgggaggaattttgctcgacattcgacgaatgtttccaatcactttgtgtttacggtaagcttattcttctcataataattcacacatttttaacattccttttgtttgctactaattaagaaaatttaattaaatgaataaaattctattaaatttgctttttgttagataatgaaacccttgcagtcgccgttgtttcatcgcctgttaatttatattcaaagtgcatcgaataacttcatccttttttatattaattttccagacagtgcattaaatgggttgctacaaaagactgtcgaatcattgggtcattttccgctgccggcaaagacaatgggcaaatatttttcccgcgatgtttgcaaaagtttttcctgaaaaccttaatctgacaaaaagttcttttataggcatggtgactcattgctcatttggacaaa

SEQ ID NO: 21937 - DNA, 1385 bp, Heterodera glycines
gcggggtaagcagtgctggttcgtttcatcacggcaccgaaccttttggctagtcagcaatcgttgcttaacttgccagatcggacgggtgcgcatgattccactgttccaagcaccccaccaaaagcaaaacgatataaccaaaatataaggaaaaattttttaaaaaattttttctccatcttcctttttgatactaaagcatcagagtgctaaaattaagttgtaaataaaatttggtgcgctttagagcactttctgaaaaaaatatttatgaaacaaaaaaatcgattttttcaagtgtccgtttggggtactcaaacatttatggggagcaaaaatccaacgcagaattaaagtacaggctatagggaagctattcccgaaggattcggtctccccataaatctgggcgcatcggttcggggggactgccccgaaaacaaaaaaatcgattttttcaagtgtccgtttggggtactcaaacaattatggggagcaaaaatccaacgcagaattaaagtacaggctatagggaagctattcccgaaggattcggtctccccataaatctgggcgcatcggttcggggggactgccccgaaaacaaaaaaatcgattttttcaagtgtccgtttggggtactcaaacaattatggggagcaaaaatccaacgcagaattaaagtacaggctatagggaagctattcccgaaggattcggtctccccataaatctgggcgcatcggttcggggggactgccccgaaaacaaaaataaatcgattttttcaagtgtccgtttggggtactcaaacaattatggggagcaaaaatccaacgcagaattaaagtacaggctatagtgaagctattccggaaggattcggtctccccataaatctgggcgcatcggttcagggggactgccccgaaaacccaaaaaaaaattttttggataaaaattatttaaatgaactgactagataatatttaaaataggttatttctcttcctttcagtatccctgcaaagtttggtgcgcttctgatcagtttctgaaaaaaaagttaagcctaaactttttggcctgtttaaaaaggaattaaaaatttttaaaaattttattcatctccctttttgatagaaaaagcatcagagtgcctaaactaacatgtaaataaaatttggtgcgtttcagaaccctttctgaaaaaatatttaagaattaattttgcaaaaaataaataaaaacgaaagactcagattttcgaaaatttttttgagccagctagctcggcgctcatttcagtgtaagttagtcctttaccggggagtatccctgcaaagtttggtacgcttctgctcaattagcaaaaaatatga

SEQ ID NO: 21938 - DNA, 2470 bp, Heterodera glycines
aataatttgatcatcagtctcgctcctggagatgcaacatcatcaccagcagcagcaaagaagcaaattatttgcccattttggccccccgggggaaaaaggccttgagaatggcgcgaaagaccttggggcatagcagcagcagcagggggcataggccagaggagcaaagaccgatcagagaatctgatcagcgccgcgcatcagtggcgagcgacagggcggaaacaccggggggggggggggcgatgatcaaccccgacgacgacgagtgagagaattgaattatgtgaattttgtggtccaaattttggaggggggggggccgattttttttttgagggggatgggggggttaggtgggagaagagcacgttttgtagtaataacggagtggggataggggggatggtgacgaaggcaacagcaaaaaaaaaagaaaagggggggggaagaacaccatcatctcattagcagcagcagcagcagcgggacttaatgagtgttgaatggaggacaaaaattgaaaaatttggggccatttataattggccgaagggaatttgcaaaaaaaaagggactaatgagagggaaatcgggggaaaaaaaattgcgaaaaacattcatgaattgaaatgcgcgatgacataagagaaggactgggtaaaaaagaaattttgggttaatgagtcgagaatgtgggctagaaaacccgagaatttttgaattaagctccgataattgaaagaattttcggcaaaaaataatttgctaaaataatagcaacattagcgggtgttaaatggaaaattgaacaatttggggccattttaattggccgaagtgaatttgcaaaaaaaaagggactaatgagaggaaaatcataaaaaatcgaaaatttcgcgatgacataagaggagactgggtaaaaagaaaataatttatttgcgcttgagatttattggttcatgagccgtaaatggggctagaaaataagaaaatttttgaattaagggagaaaaaattaatgcgatttcccgagattttaaagaattttcggcaaaaatcttacgtcagggtcaggtaaattcagttccacatccaagatcgggttaaaaagccatagaaattttacaaaaacaaaaatttccttttgttcatgaatgggttcgaaaatatatttaatgagccagtgctgagaatgagaatgaaaaattcataattttttatcattaaatttaaaaagcggagaatttctcgagattaaaacccaataaaccggacaaaaaatttgaaaattctcagattcaattaaagacaaaaaaattttaaaaaattccgggaaagttttattcatcgaagcatcgcagcattaggaagaagcacatatttatttttacagcaaaataaaaaacggctatttttgaattattgggataaaggggagacggggcgaaagattgacagagattggggggggggggacattttagttaattgttcgtcgggcggtcattaaatccgtaaatcctttgccggcggacggcgtccaaaatcctcccaaaaattaatggattcggtggccttcggcggcgggggcaccaaaaatgtgtgatttggggcattggcccccgctcggtcggacggacggacggacggacatcctccaattggtcagccgccggcgggcggccgttgctgccagccgccgccgccgctgggtgggccaaatcagctggcactaaccgagcattccgccgccggcgatcagttcgaccacttgctgatccatccatccggggcctggccgtttgagtcccatctcgtctttttgccccaggcgccgcacatttgtgagagattatgaatgaggagggttcggaaaaaatggatataaaatcactaaatatggacataaaatagagactaaaaattctaaacatggccataaaattgcacaaaaattatggggataaaattttagcatgacgactcaaaaaactgagaattttattgctcggtgattagataatgaaaatttattacaattattgtttgattccccgaataggaagtttttttaaatactcgttggcctcacttaaaaatgtcggcatggaaaaaattttgccgcgaagaatggaaaaaaacgggaattttccgtttcttgttcataaaatttacggttcgattggaacccgaatccaacattcattttgggcaatttcgaatctcggacccgaatttggacaaaaagcgaaaataaaaattttcaaattatgtattacctttgttcctaaattgatcaaaaaaagttaaatttagcggaacccgtcagttgggccctcacggttgggccatagagcatgtttttccactatagtttttttcttttgcatccaaatccaacaatcttggtatcattcgaaagctcttaacattctctattaggcttagaaaaagccaaaag

SEQ ID NO: 21939 - DNA, 1030 bp, Heterodera glycines
tctagagtcattttttaattggctttttaaatatgccaaaaaatgtaggcttaacttttttagtgaaaattcgatcactcatattttttgctaattgagcagaagcgtaccaaactttgcagggatactccccggtaaaggactaacttacactgaaatgagcgccgagctagctggctcaaaaaaattttcgaaaatctgagtctttcgtttttatttattttttgcaaaattaattcttaaatattttttcagaaagggttctgaaacgcaccaaattttatttacatgttagtttaggcactctgatgctttttctatcaaaaagggagatgaataaaatttttaaaaatttttaattcctttttaaacaggccaaaaagtttaggcttaacttttttttcagaaactgatcagaagcgcaccaaactttgcagggatactgaaaggaagagaaataacctattttaaatattatctagtcagttcatttaaataatttttatccaaaaaatttttttttgggttttcggggcagtccccctgaaccgatgcgcccagatttatggggagaccgaatccttccggaatagcttcactatagcctgtactttaattctgcgttggatttttgctccccataattgtttgagtaccccaaacggacacttgaaaaaatcgatttatttttgttttcggggcagtccccccgaaccgatgcgcccagatttatggggagaccgaatccttcgggaatagcttccctatagcctgtactttaattctgcgttggatttttgctccccataattgtttgagtaccccaaacggacacttgaaaaaatcgatttttttgttttcggggcagtccccccgaaccgatgcgcccagatttatggggagaccgaatccttcgggatagcttcctatagcctgtactttaattctgcgttggattttgctcccataaatgtttgagtacccaaacggacacttgaaaaatcgatttttttggtttcgggcagtcccc

SEQ ID NO: 21940 - DNA, 2209 bp, Heterodera glycines
cgttagtttcatttgactgtttgttctatggaaatcttttgttttatgtttcagtacgcaacaaattctttttcattaaatttaaatttgtagccaaaattatcttttgaaaatttaaaaaaatttatttttagccaaactaatttttcgttttcttttttgtttgtctttccatttttaatttatttccaaacaggggtccgtcctacggcgtttcctaaatccaccagcagcaagggggggggggggcgctgaaaatgaaaaaattaataatccactttatttatcaaccaaatttaaatattaatagtattcgctaataagttgactccaaaaattgtttattgtattaaaaaaagttttattttaaatattttacaatttattttaaatttcttttaagtttttattacagttttgtttgaaatttatgactttatcagctttttagagaatatacatatatatttttaatttgtttgttttcgaccaaaaacattatgataattttatgaattttgtttccataattataccaaacattttaaatttcaaatgcttttttttgtcttctttaaaatccgaatttatcagcttttgccagctctcctcccactcccaaattttggttcatcaaattatgacaaaattagagttttacaaatatttattttaaaatcggattgtgtcggcggtgaaacaaattcatctgctgctttccctcctccactttcttctctctcatttccgcaaccaacaaaaagccgcccccaccttcagatgcttcatcttctgctctgatggtcgccctcccattttatgttcaattttaggtcgtatttatttatttttttgctcatttttttcttaaaattccccctcatttatttgtatttgacggaatgccacaatgtttttggcgaaaataaaaaattggaagcggaaaaagcataaaagaacaaagaaagtgaggggcataacaaattatgtgtttcggctacttctaatagctttacattggaacgtcataattgtcacttttgaataaaagtaatatttttaaatgatttaaaaaataataaaatttggccacctaataattaaatttctgttcgattaattttaccattttcatcaataaagaagacatattaacacaataaaacggaaacatttttaaatggcattgttataaagcaaatagccgattattatttattcaaaagcgttcctaaggaaatttagcagcatttaaattcaatgaaaaatttaatgtatataaattattttagctggcacacctgttgctgatgaatagggaccgaattttgaagcatttgcttaattttttgctagctttgggcgagctaagaagcattaaaaactcatttctaaacggttttgggctttttacatttagagaaaaatttaaaaacttttattttatttagaaagaaatttcggcttttttatttgattctcatcaaaaaagacaataaaatgcaaaattttatgcttatttcttgattttatgtacttaattcgctatttttgagcttatttcgtgcttaattcattaaggagtttttgttgcttaattaaatgtttaattatcttttttttgcttaaaagtccgatccctactaatgaatgccaaatgataattaaatgacaacctttgcacataatcactaattttttccaaatgttgtattactatttaaggctctaatttatgagatgttcccttcaaaataataatttttctacaattttcccattatattaattttttcgagcgattacgtaaattttaatttgattattaaatttttaataaatcatttatgattcaaactacgaaccaaaaatttgtagtttcttttcttttcgcagcgtcattttccattttaagaattgagcaaataaatgaacgcaccacagagaattttaattgaccttggaaattgtaattaatatagagagaatctttgatttggctgggggttagggatggcaccaccgccactctttgcctgagaggcggataattaggtaattaatttgatgaccaaaaatttaaatgaccgatagactgctgattactgtaagtgataataaaatatgtgattctgaactgcaataggcttcgctgttttttcttaatgttttagtaaaaaatttttcctttttgaagcttttgcaaatt

SEQ ID NO: 21941 - DNA, 1648 bp, Heterodera glycines
atttagtccaaaaatgattaattgtttgaaatagagtcgatcgggactggtcccggtcaaaaccgggacctcggtactcagttgtactcagttgtccgtgttttggtcccggtcccgctctactctagtttgaaataattgaagaaaatttgtttgaaaattttcattaatttaatttattaaataaaaaaccaaataattttgtattattttcacttaatataaattaaaatttgaattttttttaaatttttaaaaattttttgaatttttaaaatttcccggttggtcccggttcccggtttttcttgcggtcccggtcccggtcccgaaaaaaaatcgaggtcccggtcccggtcccggcttctcaggtcccggcaagtcccggtcccggttttggcaaaaattcccggtcccgtggcactctaatttctagtgaacgataacgacatcagaatcgaaaatttttaatgcagaaatgcgttttttgagctcctttcttcaaaacaatttagcagaaaatttagttaaaacctaaaaatcacagccctagtgatgagtcgttatattaaaatcacgattcggccccagcatgttttttcaatataataacttttttcattgtcaacaaaatccaacattgttggtatcattcgaaagcgtaatctgtttagaatgggtttgaccttggctaaaaactagagatcggaccggtggcttttaaaatcagttggccattttttaacaaaattcattaaaatttcttaaaattttccccctgcggcgcctatcggcaccgccggccccaatgttatggttagagctcgcaaagaaaggcaccaaaaagtgcgaaaaggcactaaaataggcagaaaaaaattgaaaaaggcatgaaaaggcacaaaaatcccgaaaaaggcattaaaaaatttttttattaaggatttttagggagcaaaacacgaaaaacttaaacaaaaaacttgattttggtcatttaaatgaatattaatattttatagtttttcaataaggaaatttttaaacctaaaattttttatcaagaaaaaaaatgaaattttgtgtaacaacttttgagaaaatttttcaattcttaatggtatattttctgaaatttttttagatcatttcttagggtttattttcccgattttattgaatttaattgaatttttcggaaaaaaacgctaaaaaggcaccaattcgctaaaactaatctttggggttttttgaatgaaggcaacacacgttttttggctgcctttttcgatcattttcccaacctatagtacaccgttcaatagaggtttcaatagccctacaattttactcagaagagattttcgtttttttctattaatagaaatagtttattacttttttggaaaaaataaacaaattcaaaaaaatcgaaataacccgaaaatttttcttcagttttttcgggttttaaccgaaaccgttcgaccgaccctcttttccggtctctactaaaactcatattgactgtacaacaaacaaatttataaatagaggattttatagcatgtagtttaaatggctctattccagtttatgcgtccaatgagtgaccaccctcacttttttaggtcataacttttttctt

SEQ ID NO: 21942 - DNA, 2161 bp, Heterodera glycines
tgtcggattgtccctgtcggattgtccacttctgtcggattgtccacttctgtcggattgtcctcactgtcggattgtccaactgtcggattgtccactgtcggattgtccactgtcggattgtccagtcacgctctcatttaattgcatttttactcgatttggttacgaaacagcgcgacagcctcctctcttttcttgttagatgcattaagggccaattctcgtagcctaatcgccctcatttcgtcttgcaaattttgcatgtcagcaatgctattttcttttcttttctgagcaactggcatagctactattggtctgctgctccttgtggccaattcttcgccaatggcaccgccgtccctccattttgacaattctcgatcggtcatcatcgttctcgattttgaaaagcttctcctccctgatgattgtcgtgtatcgctcgtcattgtcaataatcttgacaactcttgggcttcgatcatccctcctgatcgtctgctacttttttggcgccttaattttcgtaagctctctatcgcagttgaactgcttgttcttgccgcatgagagtctttcgattcatcctccacatagttgcttttccttggagcttctctctgtttctgcttttcttttgcgtgacttttccttggtcgatgctctcgcaaactctcttccttagaataccgactctttcttggcttttcatatttcatttgctcatcaaagttgcttctccttgctgatgatcttcgatggtttctttgtccactgctctcctcacgaatttgcctgcttttgcttcttgcttcgtatttttctagtgcaagcatttcactcattgagttgctttttcttgctggttgttgctcgtactgttccggctcttcgtaagcgcttttatccatgctttgcttttgctgcttttcttccaatggcacaattttacttgaagtgctttcacgtggttgctgctgcttcggttcgcgtacttttttctcacgctctcggtccggtttttcttcagccaaatttcttctaacattttcccatgggaattttgttcctattgtcagctgcttgtcctccccattattttgtgaaagagttctggcaacattggtgttaacgcatttcgatgtactattgctagcgttagtccgagttttgattctaaaaatttatttgtttaaattttttaaatttaattttacgtctcattccgttttgaatcggtaactggtggtgtttgttgcacttctgaggaagaagtggcttgaaacgggttttcaatagcatctacatatttgccaagctttttcttcatttgatgagtagccaggtctaatttcatcttacgctcaacttcatcatccgtgcttgcgactgaacgagtacttgcagatgaaatgcggtttggacaaagtgccaatattacaaataataagatgttgccatcaaagaacattttcatttgaatttctgatacgattttaaatttcaaatgattttacaaaaattaatttatgttttaccagtgtaatattaatgtttatatttattactaatataaaaaatatttaatatttaataatgaatgtaaattttataaaattataagaaattgagatagataaatatatataattattgatttattatttgacgatgcagatttaaaataagaaacaatagaaagaaattttataacttattgacagaaaaaaatgataaaattattactgaattataaaattaaatttttattttagcataaaatattatagtttttgtaaaaaagttttcattagtattcatacacctagttttatatggggacttctaatgtataattttattaaattatattatgttttgaaaataacatcattttcttgggaaatttatttatgctcgaataaatgattgaaaatttacggcattattaattacgcctgaaagttcatcttttaaaatttgccattttttgcatttttaagttattatatttgaatcttggcaatatttaaatttaaaaaccaaattctgataaacttaacctgactgaccttaagtaaatttaaattttgaatcgcggttatgattcacgggatagctttaagggttttccgtgataaatttaccctgtaat

SEQ ID NO: 21943 - DNA, 2027 bp, Heterodera glycines
ttaaaacaatgtttgttctccatacagatttgctttacgattggcaaaagtgccaaataaattaataaattaattttaggctaaaaattaattaaaaagtcaaaaaaacagactgttgatttttatacttttcggttgatcatttgttttaccattttaaattcaatttatcaaaaaaatcggtcgtatcgctggtgatccttcatctaatcaatttgttaaaatattttttattaagcaaatttttttaaataattttcaaacacaaaaaatatttaggtaactctaaataaaaatatatttttatatttaaataaatcgcaatcaaaatatttaataaatttattatacaattctcgcgcattaattctgaccgcttctttcagttgcttcaaccaggcacaatgatgaccaagaaaagttcggggggattttatttatttttggggagagaagtcaaaaaaggagaagtggtttgatcaaaagaccaattttttcttttagacgcattcatttattcaattcttattaatttttaaaagccaatctccattaataataaaatttaataacagtgaaaacatgaagattctcttgaaaactgttaaatattttttatgtgtttttctcattacacaaaaatccatttttaatgaaatcatttttttgtttttaaatatttattttaattttcaaatattaattaagcctttcctaaataccaacaaatttgctaaattcgtaaagaaatggagaaacaacaacaacagcagcagccaaaaagtgatgaaaaggagaaaagtgatcagaagcagaaaaaatcgctgtagtactgccgcgcgtcgtgcggaagggaaacggtgggaaattttagtaatggtatcattttggcattttctaagacaaatttattcttaaattgggttgacggtgattgatgatggtgggatatcgaatgagaatggcatcaaaatccggactttttctctctgattattaaaatattaatctccaaaaccgaacgttgtcaacaaatggtgtcgcagatttttttgaaattttgtatgattttcgttatctattaaatatctattctcggtctttttctcgactctcaagttccttggtattggttctgaagtttctaaagattttggcgcactggcattgctaatagagtcttaaatattcaaaatttaaaatttatttgttttcaattttcgcgcaaagaaaagacataaaacacaattttgcccaaaatttaataaaataattaatgtttttctttttttcgtaggttttaccgcaaattaaccgacagaatttaaaatttgaatattcaaacgccttttagtattgctttaattgacattattcgtttttgtttaaataatgctttttccattattaataggcttaggcttttcgaagtaaaaccacttaatatattcagaagtatacacaaatgttttaaattattgcgatttcatttctgcgaattcgcgctacgaaggaggctgtaatatggcacgcaattcaaattgtggcgttttaaaagcgcgggaaaatttaacggtcggagacggtgcacttgaaataagtgatgaatctgatgaacgctgagatttattaatgaatccattcgagtcaataagaaaaaataacattctaatttataaatattaaaaaaacaatttatataaagcttaaactatcaacatgaaagtattgtttaaaaaattaagaaattttctctttgcgtttcgatccctactctatacatataagcgccaattttgatgcttctaggctttaagtttttatgcttaattttgcttaaaatcgggtgtttaattttgtggcccttttcaatgcccaaccgataggcggtggtgtcgtggtcgacatcggcaacatcaaagcaatgcctttgtgccattgtgcagttattgccgacgatggcactgtcaatgcacttgaacgtgctcatcggcattgcaacactacctccaacatcgccactgctg

SEQ ID NO: 21944 - DNA, 1670 bp, Heterodera glycines
ttgacaaaatttcgaaaatctatgattttcaaaatccctgtttagtgcaaatctgatatcatattcatgatcataagcccctaaccccccccccccccccccggttaatctttttatgacagaaaaaaaaaaatttgggtggagcccagattctccagtattactcatgcgcctaataagacaataacagtagtagttacaagggggccagggtcccacttttggcgctaaatttgaattcaaaaatttgaattcaaatttgggcttgctttttttctctgcctatagggctatttcgtttattggctcgtgcctattgagcggttttgggaggtcagaaggtgtgggacgtgtttggcgccaagtttagaatttaaaattttctttttttctctgtcagaaagactgtttcgtttttcgtcgtacacctattgaatggttttgggtgatgtcagtggaaatgaggcgctttggcgccaaatttaaattcaaaattcctgaaagtgttgaaaattgaataatttatgttttaaaccaggccagcgaccgagttgcggcgccggtcgtggcgctaaatttgaattcaaaaattcgaattcaaatttgggcttgctttttctctgcctatagggctatttcgtttattgtctcgtgcctattgagcgattttgggaggtcagaatgtctaacaaatgaaaagacggaaaatttggcggtgtggaaattttatgaatgtataacaaatgacaaaatggaaaattttatgaattttaacaaataaaaaatggaaaatttgatgatgtgtcatgaatttaaaaggtgttaaaatttatgggtaatttctgtgtatgaattcggtcacactcagggcacccatttccgtcgtcacaacggtaattgtgtttttgaatttttgctatttttctgaaatccgtttctattgtgggtggacgctttcgcccggaatttgacgaggatgatgaggaggacaccattgacatagtacttgaacaccgattgttgttgctgctgctttcaccgtcagcatttgattggtgaagggcagtgtgcaactgtcttacgtgcttggtatcgcaggtgaggcgaggaaagcagggttgaaaggcgctctgtgaaaatcattttcgtattattatgttattcataaaacggtatttcacatttagaattattatttatattatttaaaacgcttttcactggttgggggatgttggacagaaggagagaaattgggggcaaagattgacggacgggttgtgggttgaacaatggggatgtatcgattgatgatgtttgaacggtttccattgcgccaatttcagtgtcaacagtgtgtccattgtgttccaccattccgttttttgtcctaagtgtgaatgaacgttccattgtttgagcagagtgaatggcggcttcctaaaatttatcgaaaaagccaattgggtgattttttcccataaattccaagagcgaatccgaactgtaatatgataatttatattactttttacatgattcataagttgcctatacagggttcttctattacctaactactcagtccccattttgtaacgatcgtatttggcatgtgcaattccactatgtaccacttactaagcttcttacacttacagcattgtttc

SEQ ID NO: 21945 - DNA, 2451 bp, Heterodera glycines
  unsure (1)..(2451): unsure at all n locations
gtcgatagagctcgaaaaactatgttttggaagtggtctccgtttctctgggaaaaatcgttaaaaatcctaaaaattcaaaaaacccgaaaacctacttttaggcctaactcgaaaaatttgnaaaattttcgaaatttnaaaatttggaaaaatcgagctcattaaactctacaataagttcgctggcaccccctccctcagaccaaaccctgacgtggtattcacctggtactgaagtgggaaaaaaaaattaactgagtctccgtgtctgtacgggtccgggatttggtctgatcaaaaaataaaaaatactggattatagaggacacttctgcggagtgccctcacagcgggaattttttgatccgagtttcagaaaaaaagttaggggccctcaaatgcacgaaaaaatgagaaatcagccgctgggactcagtcgtccgcgctgaatttttttctatagttttcccggattctcctcaaaaagttgtaagacccttccaccactttcagacccgtcccattagccgttaagctcaaattagtttttgaaacgaaactccttgtcaatataacgtatatattaactagcgggtgcgtgaaccgtcggctatttagctgggaaaaagcgcttcgcgctttcggagcttcgctacctaggctgtaaagcgattcaaattgattgaattggttggagattttttttgaatttttaaaaaattattataggtttttagtcaacatcgaggctcaagacgggcgcttcgcgcccgtttttaaatttgttggccttggacgggcgcttcgcgcccgttattcaaattttgttggctttacagagattagaagaggtacaaaagtgattagaagaggtgcaacagagattaaagaggtacaaatttgataagaggtacaaaaatgataaaagaggtacaaaagtgattagaagaggtacaagattagaagaggtgtaacagtgattgaagaggtacaaatttgatgaagaggtacaaaagtgataaaagaggtacaaaagtgattagaagaggtgcaacagagattgaagaggtacaaatttgatgaagaggtacaaaaatgataaaagaggtacaaaagtgattagaagaggtgcaacagtgattagaagaggtacaacagagattgaagaggtacaaatttgataagaggtacaaaagtgataaaagaggtacaaaagtgattagaagaggtgcaaccgcgattaaaataaaagtcataaaatgcgccgtatttttcctcattttttaattatttgattgtgaaaattcaccctccctaacccgagttacgaatttttgaaaattacaccaaatataatttttttgacaatttataatttaaaaaacattaaattctttaatttaaaaaaataattatttttaaataaaattttcaccaaaaaataatttaattcaaatgaaaattttttatttattattaataaaataaaaatattttaaataaataaaaattaaaaataactcaaaaataaatagaaaaataatgttacaccgtccggattcgaacctgcccccccccccctcagaacatgtcccagaatccccaatcacacagggattctgaggtcttgacgatgtcaaaagtaaaatctgatcacgtattcgtgatcagcggcccaaataacccctaaagacatatttttggaagatttttgtgagaaaaatttttccactcaaaaatcctggtcacccccctttggtctcgaatctcaaaatcacttttatttttataaaaattcttaaaaaagtgataaaaatgccaaataaaatttataaaatagagctaaaaattgcggatttttgtagtattttacttttcccgaatagcttttcagaaccgagttatgaatttttttctgaaaatttgaatttttccagaaattctggaataacttttttcctttttaagatagaaattccaaataaagtccataaaattctcctgatttttctctatttttaaggctttattcctgtaaaattgatcaacccttcgatttgttatgaattttcaaatattaggccaaaatcccaagggccaaaaaattgccaaaaaataaagaatttttaaaatattccaaaaattctgaaacgtaaaacaaacatcatattcgtgctcagcacctcaaaataccccagaaaaaaaattttcacccccattttggcccacaaaaaaaattttgaaaatttctagggggcctagctcgaaaatttttgaaaattttacatcatgtagtacaccgttcgatagagcttanaaaactttacaattttgcccntaaggcgttttttcgataaaaccaacccctaacgagttatgggcccgggactcaaatgtcccgctcaggccaaaattttttctatttccgggaaaaatcgaaattttcta

SEQ ID NO: 21946 - DNA, 1372 bp, Heterodera glycines
atcaaaatcatcaccaaacgcagcgggcaacaaagcaccggaatagattgaattcaattggttgagatcggtgaaaattgttggcgaagtgcgacgaagcaaattgtccaaatgataaccatcgtaaaagcccaagtggcgaatgttttcagaaaaaattggccaaatttcacgaacaaaaatgtcccaaatttgttggccattcgtggtatgtgaagaaggaagccacaaatgtaaattggtgcctcttttgtcgaaaatttggtgatttgaacgaagaaaagcgatgacggagtgatcgatgtacctaaaaatgggatgaatgcttttattgcgatagctctgatttttaagtactcaatccgaagatgcttaaaacggattttgctgggcaacggacggtcgggcaatggaaatggcacaaatttgtcatcgattcgtacagacagcttcggttcaggtcctttgtccttgcgacgaatttcgattgatctccaaattgtcaattcgcttttgccatcgaaatgtttgtccaccaacgcattgaaacgtggcgaaagaagtgccattttgaggccgagttgagcacggtcaaaagaggggaaaatgtccatccaaacgtcgttgcaaatccaactgaaatgggaaaaagtttagttaaataaatgatgaatttgtgtgacttttcaaattgcttaccgtcggttcatttttgtggcaattagcacaattttggccgagttccgaatgatatcacacaacaaagagcagaataattaattgcgttagaaatttttatttttttttcaaatgcaagacaaagcgaaaaaacaaacatttttatagccatgaaaagggattgatgaatgtttttgtatctttttgtttatgtgtcatgattagggaacggattttggctctattgcagtttatgagtccaatcgacttttatgagtccaatcaattgacaatcccgggtttttatacaataactttgttcatgttcgaacaaaccctatctttttggtatcattcgaaagtataaactgaataatgtaacagtaagagaaaccaagagaaatctaacatttaaagaaagttataaacaaaaataaacaacaattaattaaattaatcaaatcttttttggtaattgcctgaacgctgcgattttatatattttagcttcgttagaatttgtgctttcgaatgataccaaaaagatagggtttgttcgaacatgaacaaagttattgtacatataaaaacccgggattgtcaattgattggactcataaaggtcgattggactcataaactgcactagagcccggatttcttggtttttaccttttttttgcggattagtact

SEQ ID NO: 21947 - DNA, 2570 bp, Heterodera glycines
tggccacaatctgtgaacggattaacggaaaccaaagccattgatgagcagaccaggcaagtctcacggccaattgcccgtttaatggcgccgatattcacttggcctttgctgttggtgccgacgcggaccaaacgcattctggaaaaaaacataaacaaaaattgaagtcttttcatttaccccaatagtttcgctgctttaaaaaatccgacatgggcgttgaggggcacaataatttccggtcttcgaatgccatttttgtgggcagagttccgataagctgtaaaagacggataaattaaatgggaaatttaaatgtgaaaccgaggcatgccaaaatgatcgactcggacccgctggtggtaaccactccacaacttttggcacctccgtgaaaaagactgcacaaaatccggatacattcggcctaaaagtgccgttttaccctaaatccaatgatggcacacaaaagaggaccgacctccattttcctaatggaagggcacgcttcggggaaagcggcatttgtatgagagtacagctcgaaaacctgttcaaacacaagttttccaaataatccttcgcccccccccctcctccctcgacctgtttgatcatccgctggtaattgctgtcttcgtcctccaccgcgtacagcgacccgcacagtcggcccctctcgaagagaatgtcgctcatcgttttgtaggcggtcgcctcgcgaatgatgtcgtcggggggcagtccacggtcgggcaaatatttgtaaaattccctcagccgatcggcgcgatgcatccgatctgaaatttaaaatatttccgaatgcacctcatctccgtcagttggccaccctccaattctttgtacgcgttttctttgttctcttcccatttgtgtttgtacgtggaaaaactgagcaacgaatcattccactgaaaatgaaaataaaaacaaaaaacagacagtcgacaccaattggcgaaatgagacgaactcttcgaatttcaacactttgcgaacccattgaacaaaaaggacgaacgacagagtgtaaaggacaatttgccactgttccaaatgatcaaaacgacgatttctgaagaaaacaaaagtagcggaaataaaatatagcaaaaaagggaaataaagaaatttaaatgcaactcactaactcacaaatgaatccgaaagtcgtcgatgacgtaaaggacgactcgccacggcgtatggtccatcagagtcacaaaacacaaacaaatattttcaatagtaaaaatgaaacattaaattggaaaaacgaccataattaactttattaaagtcgtatgggaaataatttatcaataaattaggcaagtttaaaaataataaagtttaagtctcttcgtcaggatgaccgttttcgaattgcagtgaaaatatccaaatattggctcaaagtgtcgattgccatataattgtccagctgttcactgtgccgtttgaacacctccggctccggcactttcgactgtccaaaaaagaattcaacaatctcttcgagaagggccttgcattgatggagaatgttggaggcggcatattcaatttcaacgacaacgccctgaaattgacaaatttagggagaaattcagagagtaaaagccgcggtaatagtttagatggtgccacacctttttgacaaaaattttcttgtaagtttttaaaagtcgtgaaaacacgttttatggggtttttagggtcgcagataacgaatctaacattcattttgatcaaattcgaatcccggacccgaattcgaacaaagttgaaattcaaaactttcgaaattctcacttctattcaaaaatcgattaaaaacaatctaagtttattcgcaaacattgcaacatcaaagaatggtcattgtaatgatacgaacataaaaatgaattttgaattttcaaatttttgttcgaatccaagtccgggggtcggaattggccaaaacgggtgtcattttcaggatcagcatcaccgaaaaccccacataactgtttgcacaacttttaaaaagttcaagaaatttttgtcaaaaaggtgtggcaccatctaaactattaccgtttaggtatgtatatgactagattgtggtataaatagaccattttttaatttgaaaaagcgaatcataaacgctgggcttgacccatagtgaaccggtgtcatgccagatttgtagtggtttttgtggaccaatggcatagaaaaggcaatgcccaaaaaaacaatctaaggaatatgttaaaaagtggtgacagaccaaagccatcgaagaggaggacgaagtcatgccaaacatttccacaattctgacccaccaacaaaacttgtgtatatgtataggtaaataaattagtgaaaatcggactaattgtaagctaaaatagttgaagacggacaaattgcgacgtatgccaaggagaaaaatggtcacaaaaatgcgtaaaagcaataaaattttattaaaatgaaaatgtgaatagaaatccaaattcagagagatactgacaaaaagagagagc

SEQ ID NO: 21948 - DNA, 642 bp, Heterodera glycines
  unsure (1)..(642): unsure at all n locations
ttttaatgtctctaacacatgaaaaacatcaaattcgctaattctaacaattttggtttataggctacaaaatcactttgaacacttagaatcaatagaaaatgattagttttcgcattttggttgaaatcagcagtttaggacttgagttataacgtgataaaaatttgaaactctcacaacttttttcatatgacttaaattgcttagcattcgcttagaaaaagatttctcttttcaaattttgttcactttagttgggaatgaagcgagttatggctgatcaaaataaaaaatacaaaaaaggcaaatgaaacgtaacccagaaaagagaaagggacaaaattcacttatgaaaatgattttatttcggtgtgacggaaagattaaaagatactcacaacttgggcccactttctgagctctctatggtctgaaacgcacgaaaaacatgttttttcggctgttgttaggctccagcactgtcatttccgccacccgtttagatgtttttanattgacttggaaaaaacagacggcttttcgtacaaagtgaaatcaccgacacatcttcgccaaaagcgataagtatgtcacgacaaacagagacgaacaccaacacgactgagttcaccactcttc

SEQ ID NO: 21949 - DNA, 1423 bp, Heterodera glycines
tctcacattcatacccgccttagaaaaaatctctttgagaagagagtaatatgactgaatttcttcagccctttctaaaccaagtattatgttgtccacataaatgtctctctctatttctctcacctttttgtcagtatatttggacaaatgaagtttgatagtcaaggagagatgcgccggtgaacagatgactccaaacgttactctagtaaaccgatactccacgaggggagaatcgtccacgtatgggtctctaacccacaagaatcgcatcgcattcctatccttaggatgtatcaaaatctggtgaaatgccttggctatgtcacatgtcaagagaattggtttaattcgacttcgaattaaaatgcctgctaaatcattatagtcattttctcccttttctaacacttggttgagggtgagacctcctctgcatctagcggacgcattatacacaattcgaaccttagtatgttcactcgtttcctttaccactgggtgatgtggtaaataatgaaccttacttccaaccaaatacctttcttcaataggtaatggctcacattcttcaataaacccggtttcgacttgttccattatgatttcatggatttgtcgaagcaaatccggtgtttttctaagtctgcccaaatttgacattaactgtctaaatgccatatcataatttgttggcaattgagcagccaattcttcatcccataacaattctgtttgatacctatccccattgaatgatattttatcaatcattctttgtctcacgttttgcttatctgaattgagatcagacataccgacatgttctagaccattccagtccataatcattttattgaaataattccgactcagttggtcgctattcagttcccattctactgaaccttcgttactgttgaccaataatccattgaatatcattaccacacttttggtttacagtatggtgaatgactgatgatgatatgtcggattgagatccgtttaatgacttaaagaattgaacctttccttgtccactcaaaaattgaccaatatttgagtcattgatatacagtcccgattgtaattcctctaagacactaatgttcaaacgattataataatcgtttccaataattaaatcaggctcaccatatacctctggtgaacagaaattaaagcactgattaattctggatgagaccagattaatcagacttccccttgggaaaaaaattgaacccgcctgtgcacaaaaggtcgccagttgtccggcgcgcgtcttggtaaatggggatggcctgcgcgctgagacgtgcaccaagacagtgcactcaattggttctcgattcgtcaattgaccgatgcgtccaatgtccaattcgctgcgtcaaatgtccaaactgttcagtgc

SEQ ID NO: 21950 - DNA, 1196 bp, Heterodera glycines
aaaaaagacttacaaaataaacccctggagaagggagtggaaacatgatttcaaaatttcaattttttctagtctatctactcaaaacggttcagaatcaataaaaataacatcacggtgcgaaaaatggggtttgacaagtttattgggaaaaaaagactttacaaaataatacccctgggagaagggagtgggaaacatgatttcaaaattttcaattttttctagtctaatctactcaaaccggttcagaattcaataaaaataacattcacggtgcgaaaaatggggtttgaaaagtttattttgaaaaaaagactttacaaaataatacccctgggagaagggagtgggaaacatgatttcaaaattttcaattttttctagtctaatctactcaaaacggttcagaattcgataaaaataacattcacggtgcgaaaaatggggtttgaaaagtttattggggaaaaaaagactacaaaataatacccctgggagaagggagtgggaaacatgatttcaaaattttcaattttttctagtctaatctactcaaaccggttcagaattcaataaaaataacattcacggtgcgaaaaatggggtatgaaaagtttattggggaaaaaaagactttacaaaataatacccctgggagaagggagtgggaaacatgatttcaaaattttcaattttttctagtctaatctactcaaaacggctcagaattcaataaaaataacattcacggtgcgaaaaatggggtttgacaagtttattggggaaaaaagactttacaaaataatacccctgggagaagggagtgggaaacatgatttcaaaattttcaattttttctagtctaatctactcaaaacggttcagaattcaataaaaataacattcacggtgcgaaaaatggggtttgaaaagtttatttgggaaaaaaagactttacaaaataatacccctgggagaagggagtgggaaacatgatttaaaaattttcaattttttatagtctaatctactcaaaacggttcaaaaattcaataaaaataacattcacggtgcgaaaaatggggtttgacaagtttattggggaaaaaaagactttacaaaataatacccctgggagaaaggaggggggaaacatgatttcaaaatttttcaattttttttagtcttatcta

SEQ ID NO: 21951 - DNA, 1580 bp, Heterodera glycines
  unsure (1)..(1580): unsure at all n locations
atgtctcgtaagacgtcctgtagtagtaactgctttgcttcgtacattcaatatattttttattaaaaaaatatttatagtttttttcgcagtttttttctaagctaaaatttaatataattggttttgtttttgttttttcttaaaatttaggttattttgattataatttaaccgcaacggtattaaatttgctattttaataattaaaaagattaaatattcatattatatattttttagacttttttcattaaaaatatatctcatgaaaatggaatttatccagaaattgaatagagccgttatttagtcattgttagacaattatatttcaacaaatttatgactaattcccagatttattggaattattggttattaaattttaaaaatccattaaaaaagaaaaaattattttatattataattttttcgttgcaataaagaatggtaaatattaaatatacttttaacaatgatttttttaaatttatttgtttttaaattgatccttaatatttttttataatttatttccttgatgaagttttcggctttagatttctgtggagtcgcaaaaatatatattttttaaatttatatattcttatgatttgttttttttaatagttgcgcaattttaaaatcattttagattgaaattataatttttatgaattaatattttcgtcacgcaaaagattttgtttggtattatttaatcaattaagctattctttcgttttttaatatgtttgcattcaagtcttttggcttagcccagaatttctttaaaaaatttaatcatgaaacaattatttggtcaatgttgggccttgaaaaaataataatattttattttattactattagtcaattaatcgtcgtaaaaagattttgaaatttaatcctttggataattaaaatagaataagatttattatttaaataaattagtttagtaatattttattttaaaagaattaaaaaagtttatcattttgaaagtttttgcagtgtataaattttattctatttattaattaatatctttttagctattcttgttctatttgttattttacttttttatttctttatttttattttttgttgtttatcttatcactcatgtaaatgaccttttcagcctattaaaatttgtaagattaaattaatgttaatttcaacaaccatttttttaatattttgagttcttttccaataataatttaattttcattagcttttagctttttagtatttttatgtttttctatttgaattatttactattagacctatattactaatttttaataattgtaaaatgcacattcattttttttgtttattttgatcgtttactgctgtcctttattgcaaatgaagcgtcgtcatagttggcataaaaatgtatgccgactatgttanattatattatgcccataaaatgatgaccattcaaatcagttgattacagcaatggaagcttttgaaaaatggtcaaaaataaatgttttaaaaatttcaattgaaaaatgttttgttttatactaagggtgcgaccccgaccc

SEQ ID NO: 21952 - DNA, 1020 bp, Heterodera glycines
  unsure (1)..(1020): unsure at all n locations
taaatggttatgggtantttttgaaaaatatataattattcttaaaaaatttggttatctttttataaaacaatgtttaaaaaaattttcttcgatcaattttttgagtttttttcttttaaattacatagtttattttagatttaatttctggtatatttataatattctattcaaaatttttatttcataaatcaaaaattgataatcaacaagatacactttacatttttagtttttttaattgcaaaaatgtcaagggatattatcattaaattctgccagattcaattattaattatatttacaacagttaaaaggatatgacattcatgttttcattcaaaataaaaattttttaaaattaaacaaataataaattatgtttaaattaatatttttgaaaaaattattttttcattatcttattcaaaatagaaataaatttactatatttataattaataattatttttgtaatgtttttttatcaaaaagtgtggttgttttttattcaaaatatttgtgttttctttaattctttgtatattttattatttaaacttctcaattaattctcgtaatttgggtgttatacgccaaaagctcctcgcctatatgcttttttgtattttatattttaattaaatttatgttttatgatattacataattttaattaaataatctcttcgttccacgggtacaataaaacactttccactgccgcgttcaatagaaaatttctggtttttaattttcatttgttttttttatggtattttttaagccttaatttgaatttttttattttattattaatttttttttgatgtatttatttttttacctaaatttacaatttttctcattctctcggcatagtcgaacaacaatttgtgatcgacttttaaaaattttaaaatgattttttcattattttcatttatcttaatataattaaagtcaattaattttttgattttcttttttttatttttgtcccaaaatcattaaacg

SEQ ID NO: 21953 - DNA, 941 bp, Heterodera glycines
ttagtcatcatgtcgtggggattccatttctctggtctccttaattcggaacgttgtaatttgatttaatttctcaaaacatattcaaatatattttcgtaaaactttattattaatatattatatttacatttataattaatttttagaattaattgtcattatttttttgtatattataaaataaatgctattataaagttttaatcaaaaaataatcatttttacactgcaatttaattattattgtttttatttttttcaattatatttaaggcaagattttttgattagatttattgaataaaataactttattaactttcaataattttacaatttatctttgttccgtagagcaaatatttattaattttaaatattcatttattaaattaaataacatttttaactttcaaaaatttacaatttctcatacctatgtcgttacagtattcacaaacttgatcattaattcttaactcaatcataaatcagggtttaatttttttaaaatttagatttaatgaccaagttttttttgattaaataaacaataaatttttaattcttttcactgttttgatcagttttgaccgagaccgggaaattctttgttttcccagccaaaaactctcgggttttcaacccaaacccggtcccggtttacctcaaaattcccggtcccgtgacactctacttcggaccggctcagttcgaccccagcatgtttttgcactataacttttttctttgtcaaccaaatttaataatcttgatatcattcgaaagctcttcacgtgctctattagcttacaaaaaacaaaaaaaaattttagcatgtaaaaatgtaattaagaaaaaacctcaaaatttttaacttttttgcaatttcatgttataacttttttgctatttgtctaatcgcgaatcaatagctt

SEQ ID NO: 21954 - DNA, 1898 bp, Heterodera glycines
tccgtacgcgaatacgttttgtatgcgtctggtatccctttaagagtgagtgtgttcggaactggtggcggtgcatcgatttcacgacggacacgcctgattatctaaatatacaaatatttgaggaaacataaaaaactatcacttgttttgtcgcctgtttggttgggagttgcgcaaggactgtcgtggtcacattctgcagtgccaaagagcaaattggcactggaggatccatggattgatccgccctgcgcttgattgccgagatcgctcgaaagagattccattcaaactgcacttgttgcacactgcaaagtgaccaagccgatctgatcgattcggagatgcagacggagacagaagagaagaccaaaatgaccaacgagcttgccagcacagagacgcagactgaaccagaagagaagcccaaaacatttgcttttggattgcaaactgatcaaaccggtttgatcgattcggagatgcaaacagtttcagaagagaagccgaaaacggtcacttttgcaatgcaaactgttcaaaccgatctggtcaattcggagatgcaaacactgtctgaagaggaaccgaagattaccaacaagttaatcactacagaggcgcagactgaacctgaagagaagcccaaaacatttgcttttggattgcaaactgatcaaaccggtttgatcgattcggagatgcaaacagtttcagaagagaagccgaaaacggtcacttttgcaatgcaaactgttcaaaccgatctggtcaattcggagatgcaaatactgtctgaagagaaaccgaagatgaccaacgacgaggttcttgaactcaatgtctcggttagtttattttaaaaatgtttatttggtcttcatatattttcttgttgtcattttattctttgagactaattttatttttcgatgttgcagaaattgcctatggatgctgattcgtcatttctcagtaatcaaggacggagttcccctttgttggacgaatcattgcgccgtaaatacaatgaaaagtgtgaagaaatggcagaattacgttatgtaatttatctttttcttaaaatcttttctaaacattttctacaggcatatgagtttcaacagtcaatcatttctaatcaactggacgaaattgcgcggctaaagcaacaacaacaactacgaaatggcgttcaaaaaaatgggtgagcgaagaaatagattcttacactgacaatgagtacgtttaaaagcgtgttacttttttgaattaaatgatgcttaccgattacaatacaagtcattgttcagaagtccgtcctcgactcgtcactcagccattactgctgctgcttcgccgtcgtccgttttccccagcggtgctctgcccaccatttcgggtcgaccacgcgctgcaaggcgaacttattgcgaacattgcgaaatgtttgacgcacacgactcgtcagagtgtccaaaagaagaggcaaaaagagcagaacgacgcgaccatgaggcactttcaccgcagaagtgggacgaacgggaacgcaccttctggcattaatattgacgatgcatttagacccaccctttttctctttatttttgtccattcgtttgtatgatcttttgactttaaacccgtgtgcctttttctcttttttttgtctcattgagtttaattattttcatcagctgcctttcatattcttggttcggtttcctctttgacttttctttttacattaaaaatcgtaaaaactaaataaaattcaatcattgcttttttccccctaaagttcaatcaatggcttttttgtgcccaaattaccgttcgtttatattgaaaatgggctaccagacaactctgtttgttgtcaatttaaatgt

SEQ ID NO: 21955 - DNA, 1522 bp, Heterodera glycines
  unsure (1)..(1522): unsure at all n locations
ctacagtagacttttttccaattattattttaaagtgcctttccccaaggaccaacgggaacagaatcccgtcaaggacatcaaaaaagttccagccgactttgctgtctaacacgaaaatgccgaggtcatcttttcggtttcttatctttcggtgactttgttcggtgctttaagtgaatttttaacgaatgaattttttgtggctgacctgcaaagcagatctcttccactggtcgccctatttcggtatttattgttacaaagatatatgcagggttgtagtgatcaacattcacactgaattcataagaattcagagtgagcacaaatgggaaaaagtcctttaagatctgtttgtgttgggcaaagtgagataatgatatctgatgaaaaaataaagagttaatagcgtgttattggggtaaaggggtaaaggagggatggagagggagacaaagatttagagacatatagagacatgctgagaatgatagacagagagaaaagagagaaaggggagggggaagagagaaagaggaatgagaagagagagagagagaaagagaggggggagggggtaaaggggtaaaggagagatggagagggagacatagcgtgataggtaaagagggagagaaagagggggagacaaacccgagagacagggagaagcagaaaaaaagcagagtatgattaaaaggagagagaagagaaagatagacagagagagaaaaagagagcgggataaaaaagagggagagacagagagaggcagagaacgactaaaggagagagtgagagagaaccagagaatggagaaaaagatagacagaaagagtgagagagggggggggggtgtaaatgagggacggagagggagacatagagtgataggtaaagagggagagacaataatcggtctagagatattatgaaagacggggaaacagagaaagaggcagagaaagagtgagaaggggaaggaagaagataaaggggactgagaatagcgagcgagagagaggaggataaaggagggatgaagagggagacaaagatttatagacgtataaagacatgctgagaatgatatacacagagaaaacaaatacaggataggtggtgccggaaatgtatccagggacggagacatcagcattcgcactgaattcataagaattcagagtgagcacaaatgggaaaaagtcctttaagatctgtttctcttcgcaagctaaaataattatatcttttcaaaaaataaagatttttaaccttttatttcttgtattagcaaataaatgttgagggaaactgagcccattttcatcaaaattgtcgaggcggtaatgtacgggtgggctttaatgtaggtgcctatacgtgataaagccactgtcnaacgagctaaagccgaaactgccctttgtttccgatgtcttgttgttcgaactatgagtatttggtagccacagaattattatttgtcaaaaaagaaatttttttctttttctagaaa

SEQ ID NO: 21956 - DNA, 858 bp, Heterodera glycines
attcatacctgtgcaagggggggggggtcagccaagaggtcttacgatcgactttggccctcccatgggagggtcagagcccatttccattacgatcgaccatttcttgcctgctgaagacctttttgttgctcttcgggtcaaaaaattgttttctccagtgttattaaaaaattttgaacgcctattcctttcaagattccgtttggggctggggttcccacccgggcaacgacttttttgcggcgcttttttcaaaaaaactttaggaaaaggggggtccgcggtgtcgataggcgccgccgggaaaaatttttccatttttaatgcgatttgttaacgatttttgccaaaaaatgcctaagttttgcatatttctagcaaattttcaccaaaaagttaacaattttatgcttttaagcctaattttaaagaaaattatagacgaaagggaaaaaaattgattttagttgatcgtaaaaatttgcatttttttttttgaaaaaccggcaaaatttttcgatttttctactcctctcctcttacgatcgacaattttcctcacaaatcggtattagtcgatcgtaaaaattttgaatttttaatgaaatttgttaagaaataaggcaattttccgaattgccaatgagaaaattttataaagtttctgtttttatattaacgatcgactttttcgctgactttttttctctccctcatttttcttttctccttcttcctcccttcaccccccccccccacctcgtacgatcgactgtctcgaacccttacgatcgactaagagacccccctcctgaccccccctgtgcacaggtatggtgttgtgttggaattatt

SEQ ID NO: 21957 - DNA, 456 bp, Heterodera glycines
tcaatctctctacagaaattaaaatattttgaattttcccggacccccttcttcctcaaaagttttttgaaaaaagcacgcagaaaaaagtgatttgaaatgtaaatctgaatttctaataatattcgaccatttagtccaaaattgattattgtttgaaatatttgaaataaatttggtttgaaatattgattaaatatattataatttaattttgcgttaaattattaatttttatagttttacttgaaaataacaaattcccggtccctgtacaagaactaattaatgattagggaaaacatcggtcatatgggccgaagcccaaaatggctaaataaaaaccaatcgactcctgtttgtatgaacgaagccaatagatttttgcggggctacccgacttttgggggatttgcaacttggggacccgccatttggggacccgacttttgggga

SEQ ID NO: 21958 - DNA, 1081 bp, Heterodera glycines
  unsure (1)..(1081): unsure at all n locations
gtcgggtcctcaaatgtcgggatccncaaatgtcgggttcccaaatgtcgggtccacaagttgcaatcccccaaatgtcgtcgcaccacgtttttgcggcacccaatccctgatggaaattgtttttagttttttggcttttgtgcgttttaggctttggagggttaagtggcatttggccatttcagtcccgggtctgtaactcttcaaacaaaaaaatctttcagattcgttcattacagaccgagaggagtcgataatatttattttagccatttgggctcctgctagccatatgaccgataaactttaaattttgagtgagatttattaacagaattgtcaaaaattacaaaatgttttgttaattagttggtttttagactgtttaaaatgaaagaaaactaaaaccatgctccgaaattttttcatttaaaattaaaaagcccataaacccgaatatttacaaatttacgttcaaaataattaagccaaaaatcccaaaaatgggtattttacttggatattttactgcaaaatatatttaatcatgccaaaattcaaaattttcaggcagagcgtgtaggcgccgctgcctgccccccccccccaatagcagaaaaataaagataaattaatttttttttaactagaaaattaattatttttgattttcccggaaaactcccggttgtttccgagccccaagttccgtttgaaaatccggctaccgatcctggcctttctgctccggatgtcccggcccagttttgctcaaaattaaacacattgtgtgccagtcggattgccttcgtaagacaaaatcgtcgaattttgccgaaacccttgttgttgcccaacgccttttgggtggtagaaaattaattaattcgaaaattaattccgccgggagaaattttcttttttttctatttcgcatttttagtacttattttttgatattttaacaaattcatttctaaagaagtaataaaaagaaaaaccggtcgtcggaaaatttttagaagaacaaatccataaaatgtgaaatctcttcaaaaaacttttaatgtaaaaagcg

SEQ ID NO: 21959 - DNA, 1127 bp, Heterodera glycines
  unsure (1)..(1127): unsure at all n locations
ttttgagcgtaatacgattttacttacaccatttttgctaggctagatcacatgcgatttcggcactctgatattttagcgctcatatgggatgttaagcgatnngtaganggaatgggagcgctaaattgttgaagagctttttgagcgtattacgattttcttagcccattttttctaggcttagatcacatgcgatttcggcactctgataatttagcgctcataatgggatgtataaaggcgattgtagaaggaattggaagcgctaaaatggttgaggagctttttgagcgtaattacgattttacttacaccatttttttctaggcttagatcacatgcgattttctgcactctgataattttagcgctcataatgggatgtataaaggcgattgtagaaggaattggaagcgctaaaattgtttgaggagctttttgagcgtaattacgatttttacttacaccattttttgctaggcttagatcacatgcgattttcggcactctgataattttagcgttcataatgggatgtataaaggcgattgtagaaggaattggaagcgctaaaattgtttgagaagctttttgagcgtaattacgatttttacttagaccattttttctaggcttagatcacatgcgattttcggcactctgataattttagcgctcataatgggatgtataaaggcgattgtagaaggaattggaagcgctaaaattgtttgagaagctttttgagcgtaattacgatttttacttagaccatttttttctaggcttagatcacatgcgattttcggcactctgataattttagcgctcataatgggatgtataaaggcgattgtagaaggaattggaagcgctaaaattgtttgagaagctttttgagcgtaattacgatttttacttacaccattttttgctaggcttagatcacatgcgattttcggcactctgataattttagcgctcataatgggatgtataaaggcgattgtagaaggaattggaagcgctaaaattgtttgcaaagctttttgagcgtaattacgatttttacttacaccattttttgctacggcttagatcacatgcgatttttcggcactctg

SEQ ID NO: 21960 - DNA, 1839 bp, Heterodera glycines
atatagttttcttgagtcgtctattgtatattcgcataaagaaaagtgctaacgagtttaaattgtatattagattggttaattttcttgttaacgtcagctccttcgttaaatgagcaaattgttgctatttcgcgtgaattaaaagataatataatatccagttattcttcaatttccgtttattattcgttgttagtaaaattaggtttcatattgtcacgtaattctgggtttgatgccgcgttctgtctttctgtattagaagtttctcaggtttttaatcagaacaattttataacagaaacctagaataatcttttttatcatatttgttattcatgtaatttttgttcattgtttaaattttgtttttttttcttgatgcgatcttaacgaggtgtttgttttcttggttaaggccttcttgcattacttcttttagagttttacaattactaagatacacatcttttgctaatttaagtatttttacactcggttgttttttaaaagtttgataatcaaagcggtttttaccttaatttttattgggttttcagttacttgactttaatgaattttattctctcctcataactaagccgcataaaaaatatgtaaaatataaaaattcccagcttctaatgataattaatgtaaggcaaaacaaagttaaaaacaatgaattagtatatgcaaattataacattttaaatttcagttagtcttgctgcgattgttttccatttaatttgttgtttttttggtaacatgtgatttcgtcagtagtgatttcgtcagtgataataattatttctttacaaaatttttaatatttcataaaataaataatttaattattagtaacttaaatatgtagactcaaaacaaaattctttgctcgattaccaacctataattcggccggtcacttacatatattaattattgtatttgtgcctagtctttttcgttggtggacttgtcaggttttctgcctacaaaccgaagccacattaaaagcataaatcataatgagttcgacagaacaataatttgagaatgctttcattttgcaaattgggacccattagaatttcatgagccattcttatcactatttttttaaatttttaaaaatttatattgaatatcattggatttacaccaaattttggatttgaaaaaaggtaaaatcaactgtctgtggatttagttatttcaggaaaaatattgaagtatgattaaaaattaaattttttaatgggaaaaaataaaaattattaaagaggcagaccatttagtatcgaattgaaattatataaaaatagaaaaataatgtcaaactttttcaataaatataaaatatattattatagaaaatattataaaattaaaatacagtatattattctactttcattaaaagtcaaaatatttttctaaaaataaaaaaacaaggtcgcacattttcaattataaccaactctgtgcgaatttaaaatactgttactaaatttattgacaaattatggaataagggttttcgattttttatttgcaaatctaattttaatagaaaataaattttaatcattttcatataaattacaactgtccaaatacaagaaggttaatcacttaatcgcgatttaaaaaacaaatcaggtaaaaataaaaataaaattaacaggaaaaatttttatcctataaaaaccattttaaacggccgatgggcacttcttttttttaaataattcatttgaaaaaacatcaaaatctgcaaaaaaaaattgaatggaaaactaaattggaacgtcagaaaattatagtaat

SEQ ID NO: 21961 - DNA, 1104 bp, Heterodera glycines
cgaaataattaaaaaaccgaaacaatcgaccgcttttttgacaaatcagttggccatttttttaacaaaattcattaaaaattcttaaaattttcctccggcggcgcctatcggcaccgccgcataaaggtatattctctgaattttaagacttttttgttctggaactttttcgtttatcttttttccgactttttatgaaaatttcgcccccgacaaaggtgtctgccccgacatttttaaaatttctctagccaaccccgacaaatttagtcgaccccgaaccccgacttttccaaccccgacgtcgggggcccaaccctaattttaagcaaaaaacaaatactgtaaacagagatttcgtgtttggctttgtgccaaatatgttccttttttcgaatcccctggattttgtttgaaccgggttcaaaaatcttagatggcattgttcagtctccgttgtctgccatattttctccatttctccaaatttgctttgcccaaccttttgatgccaattatgtctttaatgtttgcgttaatccgtgccaataggcaatttttggcgcaagaaccttatagggtttttctagcgccagaattccgaataaagcaatatttgcgccaggatccacattccacgcaatagatctcttggggctaatggaagtgccaagtatcgcgtgaaataaatgtgccggggtcatgaaatgcccaaaaagtcggggactcagtgaaaagtatcgaatgtcgagatagttgaggtgatatcgtccgcccaccactatctgggattggggaaaggcttaaaacatgtttggaattcgtcggcgggaatcgagggtgggccactgaaagccgccaccacgtatcgcacgaattcgtaaaatgccacaaaaagctggggatttagggtcaaatccgggtcctcccttctgatcagcttttatcatcgccctgatcaccacagatgccgcttctctgttgctgctgatcgcattgctgtgctgtaccgtgcccgcaccggtggccgcaatccgtggcgcatttttccgttccgggcattcgtcggccgctttgtcttgtctaccgatgccagtaagc

SEQ ID NO: 21962 - DNA, 893 bp, Heterodera glycines
  unsure (1)..(893): unsure at all n locations
tttttgctttggtgaaggtttttagttgcatatacatccagattttgggggtttttgggaatagatccatattatcaccatttgttgagcatatttcggcaatttttatgatttttcatacgaaaagtgcaaaaaaacgaaaatatacccctaagaatcgactttttgggaataaaaaaacacacccttaaaaaattttgaacttttgtgagaacttttgaataaaatttatttaattttgttttagcatataataaaaattcgaaattgcatataaaaattttaaaatcacgtttttttttgcaatagtctaaaagttattgttttggtgtttttaaagtaaattctgaatttttacaccatttttggcatattttttttttgttgattcaaagtcgtttttgccagtttttaaggcatattttaatgcatatttggtcatttttcgggtttttagggcatattttaggcatttttagtgcatattttatgtgcataattgcatttttttagtgcatacaacttataagcttagacataacattaaattttttgtcattttatttcatttttatatttgtttattttctttttaaatggtaaattttaaaattttatttaaagatcgatcaaacaaattattattttttctagcgctttatctttaaaaagacagggatttactaacgaaagtgataataattagggcacaaaaataataggacataaagtcgcgaattatgtccacaaagagggcaaaatttctcaaaatctcttanaatcttaattaaaaatctttaaagggtaaaaatagataaaatgagtttaaaaaaaataaattagtaatttttcaaaaaaacggcataaatcgcaaattccccatttttttaatt

SEQ ID NO: 21963 - DNA, 887 bp, Heterodera glycines
gcttaatcaattattgatagaataatattagtgagaaaaaatattttagcaaaatgaaaatgatttttaatccaaatttagcttattaaaaaatttaaagataaattaagaaatcaaataaaagaaaatataggtgttaaagtacttaaaacatttaatgtaataaaaatcagaacatttgttattttaaattggtattttcatgcttaatgctgaacatgtaaattctgtgctgaatttagcattttcgtgcttatttttgtgcttaattggcattttttgtaaaattttgaataaacaccgtctcccaggaataaaaacgaaaaaatacacgcctaggaatcgacttataaaaattcaaaaaaatatccctaagaattgacttaaaaaatttcaaaaaaatacacccctaagaaatgaaaaattttcaaaaattcaacccttaaattttttgttttttgacaaaattttcgattttaaaaatgacagtttttgctaagaaaaaattagaattgtcagtgcgaaaagagaaattgaggatttattgttaactaataaaagtttttacataaattcaccaaatttttatgctttttttaccattttcatgcttattttgtgcttaattatcattttttggtgctgaaaaatccggtctctaattatgatttggttgctttgcttttttgcagtggtagtgtctacggtaagggccggaacatgcattttaaataattattttaacacaaacagacaccgtactgatttggcccggtctcttttgttaaataattgcggttacgcaaaatgacacggcacctttcaaaagggcgaaatttcaattatatattttttatcaatttattttcgagagaaatttcatttat

SEQ ID NO: 21964 - DNA, 1721 bp, Heterodera glycines
atttaacaaatgatcaaagctactcaaattatttttaatatttaaattataaggaaaccacaattaatcaaatacagtttggcgatccgttttccattaatgtaattttccccagttgtatcattcatttatactgcatattgttattttatatgtactttcttaaattttccataaataaatgtcggcttattttaaattgatttcttcattaatccaaaatcccgaaaacatactaaaatatttcttaattcattagtttgtttctcctcttttcgcatatatatatatatgcattaaagtaaatttccctttgttggtgaaaattgactcatggttgtcgaaactcgtaaaatcaaaatttgattagcattaaaataatgcaaaaggggcgataggggaatggtgtgactgctcattttctctcccgttgtttgtttgtttttaatcccttctccgcccgttccacatcctgttcctccccaaaaactcacatgtttccctccgccgcaaattcgcaccaccttttttatcccgcgatcgcaactgtgcgaaattgtccgtccattctctcccctcataaaaatcatttgttcgccaaatttaccctctcataaaatgtggtttaattacctaagtttgaggtccccgtataaatcattatttaattgtgtgtgtgtgttcgcccatttgaccccgacccaccgatcgagcccagctgcccccgatcggacccgttgacactaccttgtgcaaattttgtgaaggctcctccacatggtactagcaaaaaatgaattgttaataaaaaaaataaaggataattttataaaatattttcgcattaaaaactttaaaaatctattctaacaataaatattatttaaaaatttaattaatttaattgcgaataattagctggatgaaattttctttaacaatttaagttccacaaaaaggcagatgtctggcggggcgatggtttgctactcacttcgttttttcgctggacatatgaagacaaagagaatagccaaaaaacatttttattttcataatattttatttaaattaatattaattcatattttaatgacattttcgcattttaatgaatttgaaatttatggcttagtttaaaaagcttccaaatatgtgttaacattggtcaaataacatagaaagatcacctttccatattttttgtattttgtgctaatatttttgtccacttatactgatcaccttattattatgcatttttcctctcccactattcgcccatatttgccctatcaagtctgactgattcatttttccaatgtatgccctctggctctgtctattataattgtacacgcatagcttattcaatttaaccattttgtttattttttctgggttaatcgaaggtttaatcacccaagtttgtgtttgagatattttgaacggggagaaaaagccaagtccggggctcagatgcgtaattgaatggcttcgatccgaacaatttcgatgcaaaaattcttggaccatagtgccaaattgtatatttcaatgtattcgtatttcctttgcaaattatttaggccgagtttttttagaataaactggagaattttttccaatccgaaattttatgtttaaactaataacaagttttgacaaaattactgatccaatgtttgtaaatataggttaaatcaataaatctattttgg

SEQ ID NO: 21965 - DNA, 2497 bp, Heterodera glycines
ttgttcttcctcatcaactttgacctccgcatatatttgttatttcttcactgcataaaataaattggctgttggtcggacacaacagttcactggcgcagtcagcagtgcaaaacaaagcgacgaggcacaatcggagttaaataaaatacgcaaagtaaagcgttcaactgccgatttcaaaaacgcaaagtaaagcgtacttcttctgccgacttcatccaacgaaaagctcaaaaagctaatttaaaaacgtgaaagtaaacacgaattcgttttgtcagctcagtaaagtaattctgtctacaaagctgaagtttcacaaaagggtaaagtaattcccacgtcaaatcatcagcgtcaaaattcgtcaacattcacaaaggatggccgagccaaaagcaaaagctggaaaagggccgggaccctacacagcggagatggcatggaaaatctgggaggagcgcttcgaattcttcatcaaactccgagcagtcactgatgccgacacaaaaaagctgctgttcttcacagaaattgggccgatctacgaggaattacgacagatggcactaccggatgatgtcagagatatgcccttggataaaatcaaggcattgatgagagatcaatatggagagacaaagactgtggccgcgaaacgacacgaattgtttgctgcgaaacaaacgcaaggacaaaccatccgcgactatgcgattaaattgcgcactctgatcgccaacgcagaatggcacagagattcggtggacatgtgcctgacagcgttgttcatcaatggactcgcagatgattcaattcgagcggaactgatcaaaaaaggcgacaatgctctgaagttcaaagacgcaatagaaactgcggtgcttttggaacaatcatcattggacgcacagcgaatcggtggacatgggccaagagaaatagtggccaaggtttcatctcaatgaaaagagaagaaagccggcggcaacagcacaccagggaaatgtcatcgatgcggacggaacggtcattgggcgagtgaatgccccagcaaaaacaccgaatgccgaaaatgtggaaggattggacattgggcagtggcctgcaaagcaaagcagagcacggtatcaaatgccgcaaaaggaaggcaaggctcttcctactacaaaggaaagcctgtgcatcaaatcagcgcacaaaagcgtgattcttccgcggatgttgcgagcgtcgtcaagtcaaaacaagttaaatcactcacagctccaccagcattcgttcaattacaattgcaaaaagaggaagcagactttgaattggacagtggcgccgacgtttcgctggtctccgaagatgattggattgcaaatggcgagccaaaattttcaacatgttcgggattacacgcgtacggaggaaagccaatcaatgtccttggattcttcgagtcaaaagtaaagtacttggggagagaaaccacgacggacttgtatgtggtcaaggacaatgtgaagaatctgtgtggacgtgatttgatcaaaaagctgcagatcgacttgaacaaagcgtttggaattggaatggtgcaacaaattcgggacaccaaattcggcagtaaattggacgaagtgctccaaaattacgccgaagtctttagtgaaggacttggccgctgcacaaggcacatcgcgttaaaatttaaaacggatgtacagccgaaaagatgcaagcctcgtcccgtgccattcgcgttgcgttccgaggtggagaaggttataaaccaatgggaaaaggaaggagtcctcgagcctgtggcgacatctgaatgggcaactccgcttgtcattgtgccaaagcccggcaacaaaattcgtttgtgctgcgactataaggtcacagtcaatccgtgcctggacatccatcagtacccgctccctcgaccggaagaattgttcagcgctctcaataacggcgacaaattctcaaaattggacctgaaagaggcctatttgcagcttccgttggacgatcaggcgaaggaatgcctcacaatctgcacccataaagggctgtaccgattctcacgcatgccctacggagtggcatcggcaccagcgatattccagcaggtgatggaagaaattctctgcggaattgacggagtggcagtatatttggacgacatcgtcgtcactgctacaaacaatgccgaacatttgaagagattggatgcagttctccaaagacttcaaaaggcaggactacgagtaaaaaaggaaaaatgctcgttcatgcaagaaagcattgtctatctgggacacattatcgaccatcaaggaattcgaacttcgccagagaaggtggaagcgattcgaaaaatgccggcgccggaaaacttgaaagaattgcagtcgttttctcgggatggttggctattacgggaaaatcatcccttcattggcgacggcctcggaacctttgaatgaacttc

SEQ ID NO: 21966 - DNA, 2178 bp, Heterodera glycines
gggcatcgttccgcttgccactgacaatggcactgctgatcagcacagtttgttcacattgcccaacaatgtgcacctttacccggcaaatcattcgcttctgccggcatttcagtgaacggtgctgaccgtccggaaattgttattttggatgtgcaatcggttctttgcacggaaaagcatgacgatgctgccacgaattgagcagaatgaaaacagattgggatcgaagagaaaatatcatatgacaacatcgaacaatttgtgctataactagagagtccaattatatggaaatccatatttttttcctggactgtgggaggcctgaaacgcatgaaaaacatgtttttagctttgtttgaagcttctaggatggatttctatatccatatttttccaaatttcgcgatttatgtccatattttggcatttaagtccatatgttatgtccatattttggtatttttccaaaaaccccctattagaacggcccccatcgggtaaattggcctttttgaacccttaagaccgaagaaatttccgaaaaagacactttttcaaaatttgtcgaaaatattgattaaatttaaattttcttaaaaattggttaatttatgtcaaaaataagcaaaaaagggaaaatttcgcttttcaggttgattttccgctgaaattagtaaattttaagctgcatcgtgtttttttcttctaaaatgattttaatacaatattttgccatttttgaagggtttactttgcgtttacgaatttgaaaaaatttagagaaattataccctctatttgaaaaaaattatgtccatattttaccattttatggccatatttcgcgattttatatccatatttttggactccctagataaaacaaataaattcgcataataattttgccatttgtgaatttattaatcaacaacaaatctaactttcaacaatttaataattttagaggtcggaatggtgctgagtcgctatataaaaactaatgctgtccgagacctaaaatttcccgagaccgagactcgagagcgagacccaaagccccgagaccaaaaaaccccgagactttttcgaaaaaattttcttatgaagcggaactgatctaaagcaaaaatgaagaacataaccaggagcataacccactagcccacggatatgaattaaaaaagttaagcaaaaagttaacaaaaaattaattttagatttacaaaaaagccaagcattaggggtgtgaaaaagtctcggtctcgagtcacgaaaatcgagaccaagaccaaaaaaacccgatacttttctcgagtcgagactcgagactctcggacagcactaataaaaaccatcaataagggcgttatataaaaaagcatcaaatgaaaattttcaacaaaaaactgcccataacttttctcgaagtcaactaaattaaacattcttggtattattagatagccctgagttctctattagctcaccaaatttcaaaaaattgatcaagcttgaacaaagttatgacgcagtggagttgacccatagagttcattagttttattaaaagcataagtaaggaatttattattttcattaatttttagatagtaaaacattgattttggctccctgatgtttcgtcactgaaataaatttttaaaaattaaacactatgccatacactttataaatttttttagccaaaacccattaaatttgtgctaattggtatgaaatttcacttaacacaccattcagaaaatgagcttctgaaaggttttgacaaccaaattggaaaatcttggtatagtagcgcggccctgcgcggtggacgtgctggcgttgggactgggcaatttgggagggcagatggggaacattgggaaggaactcataaactcccgaaggaagggccccatgggatgatcaagcccagggatcccatcccgcctttgatggacacactgggataagtggctttattccggagagactgaagatacttcgcttgaaatggcgattctcagctgaatgttcccaattttgtctattttctgaattagagggaccagcaaaatctcgaggacaataccaacattcattttgaatggtgccctggtcgattggcaaattcgcagaagagccgagtctccctactcgtataat

SEQ ID NO: 21967 - DNA, 2222 bp, Heterodera glycines
gtccttctatcaatttgcaatattttagcagtttcttgtcactcatttttgggttttctctttttattttccaatattttttcattttttccattttttctttctccgttattctacagcgaatgccaaattgtttcttccatttaccaattgcgaattggcttactccaattttcttgccaatttcttcataattttgctcccattcctttgatgaatattttcttttttgcttatattcatttgtcatttcaataaatttctgtacaatttcaattttttgttcatcagtttttgatttgtaagaattcttttgattaagtcctaattccttaatacatttataaattttcattggatttgtctccaattttttcgctattttctgatcaattttgttccattcttttcttggatattttcttcctttttcctttattttctcttttattttgttgaatgttctaattatttctctttttttctgctcatttcgttgtttttcttctttttcttgccatttttctccaaatatttcatcaaatgacttttgttgcagctttttctcttctgatccaacttttgcaatttcaacaattaaaaacataaataaaaataaaaatagacacaatttcatatttcaatgataatgcttgacaaaattataaattcacaaaaaaaaattactaatttaataatttaacgaaataaattttatagaattaatattttttcgattaataggaaatgttttccaacgctaataattacgtattaaaaaattaaaagccttggatttattaccaaatctgcaggacaaaaatatgtaaaataggacaatttatgattaaatattacaaagattttcatttccttaggacaaacataaaaaacacaacacacatttaaaaaaaattagttatctttttaatatgttaatttttttacaaaatttaatcgaataaaaatatttcgtcatcagtgccgtctgatcattgctgatccggcagctgaaatcaatgccaatttgacgtgccaaatttcgcggcacttttaaatattttttgcgtaaaaaacaaactcgatgtttatctggcatatggcaacagcaaatttgtcgtagtgatctgtgtcaattaaaaaggtgtgtaatttaacttcattatgtaatttgggaacaattaattaattgcatgctaattgttacaaaatgccaaactcggccctgtatgtacccgagtatttgggcaaaaccgggtccaaaaagctgggttctctgcaaaaatttctcaaaatcgaatttgaaaattgtaatttgttcataattaaaaaataataatattttccgtcaaaaaaagatcaaaataaaacaaaaatatttagctaaaaaagatcaattatgaagcaaataatgttaaattttttattaaaaaataatcaatcaaaaatggagctctcattaatcacgaaatatggcaaattataggaatattagttataatatatattttttatttatattttatatgtcataaataaaaatattttaataaaataaatatcatcgtttttacataatatttttatttttatttcagatttagaagataatccatgaaattgactcataataataataataattttaggcaaagtatcattacaagaatgaaattgtgccaaataatggagctctcattaatcgcgaaatatggcaaattataggaatattagttataatatatattttttatttatattttatatgtcataaataaaaatattgtaataaaataaatatcatcgtttttacataatatttttatttttatttctgatttagaagataatccatgaaattgactcataataataataataataattttaggcaaagtatcattacaagaatgaaattgtgccaaatattcattttaattatatttttggtcgtcctaattaatattaattatattggatcagaaaagaaaaaattgcgacaaaaaacatttgatgaaatattcggagaaaaatgggaggaaagagaagaaaaacaacaaaatgaactcaaaaaacgagaaataattagaacattcaacaaaataaaagagaaaataaaggaaaaaggaagaaaatattcggcaaaagaatgggataaaattgaacagaaaatcgcgaaaaaattgggcacaaatcgccattatatttataaatggatcaaa

SEQ ID NO: 21968 - DNA, 1317 bp, Heterodera glycines
aaaaaattattttaatttaatttttttttgataaataatttttataagtttaaaattatttattttttttaattaatagaatttcatgtattttttttattaaaattgttagaaattttttcattttaattaatgaatttctaatcactgtgtatcaattatatttaaagattggtgtaaattaataataaaagaatttatgtaaaaaaataataattatcttttaataaagaatttcatattttttttaattgtttataaaaattaatttcatattaatttaaatattcaattattgtacatttcaaaattctctttttaattaataaaaggaataattaatttattttttaaaatttataataaattgcattcaatttttgtacctcttctaatcaatcacagttgtacctcttctaaacacttttgtacctcttctaacaattttgtacctcttctgatcacagtcaatttaagtgaattaaagctctaaaaatagagaaaaatcaggagaattttatgggttttatttagattttctttcatgaaactaaaaaaagttattccagaagttctggaaaaattcgaattttcagtaaaaaattcataactcggttctgaaaagatattttggaaaagtaaaataatataaaaatccgcaattttttgctctattttataaattttattttacatttttatcacttttttgaaaaaagttatagaaataaaagtgattttggggttcgggaccaaagggggtggacaggatttttgagtgaaaaaattttttcaaaaaaatattccaaaaatatgattttaggggttatttgggccgctgatcacgaatacgtgatcagatttcaattatgacatcgttaagccctcagaatccccgtgtgattggggattctgaggcatcattttgagggggggggggcgaagttcgaagccgggcggtgtacattatttttctaccatttttttcgtgtttttcaatttttattcatttaaaatattttttgagttaataaataaaaaattatatttaaattaatttttttttaatgaataaattttataagtttaaatgaattatttttttaattgatagaatttcatgtatgttttaaattaaatttgttaaaaaatattttcattttaatttaatgaatttactaattactgttgtacctcttccaatcactgttgtacctcttctaatcattgttgtacctcttttaatcgacttttgtacctcaaaatttaaataacgggcgctaagcgacggtccaaggccgcgaagcggcctaacaa

SEQ ID NO: 21969 - DNA, 629 bp, Heterodera glycines
tgcaattgagggggaaacgtgtggagtgttgggacggcttcagttcgaagtgcatggtcggctttgaaccttcgaaatgaattcgaattccctttggctttgctttttgcagcaatcgttggcttcgcccgactttgtgccggcgatgtgttcgaagtttcggtaaggcacggccaccagcgatggcgcagcagaggcaaaacgttggcggacaaaagccagcggtgggaacagcgcatgtcgacgatggacgtgctgtggaacgagccggtggtggtgaaggtgccgcgggtgcccccctattgtttaaatcgaagagaaaaagatattatgtttctcttcctgcttatggaaacgtacattggaaatgacatcatgttcgtgaatctgatgttaggttatttgcatttattaggtggagttccgtcaatattacgcatgaaagaatcaggcaataaaaaaagtgacgaatctacacattttgctacttacggccaccgatttgagtgccgttaatgttgaaattcgggtgaaccacccaggtaaaattatgaatgtaaaacaaatcaaatgagttgaattagaaaatttgatgacttgcccaataaatctatatttgccacaaaatc

SEQ ID NO: 21970 - DNA, 997 bp, Heterodera glycines
cccccccccccccccactttgccttttcctttgtcagtgcgtcgcatgttccttctcacccgcttcatcttctcacgcttcgcctgctttgataaattcgcaagaattgcgagttaaaaacacgcaaaatgagcagcaaaacgcactgcggacggcggaagcacttctgtcgcgggtcgagcgaattcggacggcgttggcacaattgagaagctcatcagaattcacagaattggtcactttcgaagcggcgatgctcaattgggaggcttttctgaaggtgaagtctttgcatgtcccaaaaacgaaggaatgaaatgccttcagttgaatcgcgcggctgtgatttgccaaatcgaatcggaagccaatggcacggcgcattcattcggcggcccattccgtcgtcagaacagcgcgtcggctgcttcaaggcaatgggagacagcaaccatctcgaaatatcaccgagacatttgatcaatgtttagaaatgaattgtcgaataaccaccgaacttcactttaccaactccaaaatggcacaatcgctggacccaaaagtccgtcgacggcgtccgatgggaccgatgaaagtgccggcaattggcagcagaatcggtcgttggccgaccaaatgtgtgaactttcattgtttcggtgcttaaattgcctttcaccgcttcagctctgaaattgacagtggcattgactctcttcgccaatatcattcgccgtttcatttcgccgcgactaatggcccacaaaagcatttttcggtgtttttcttgcaacggattaaaccttaaaccaattcaaaggatcggcgaaagtctttgggcgccgtcgtggaaatggcggcggtccctttgaccgatgggacgacggccagcggaaactcggaagttgacaaatgtttggcaattcatttggacagggcgcagcaggcgattagggtgaatcgttgcgaattgcgtgaaaacactcaaatgatatgg

SEQ ID NO: 21971 - DNA, 1900 bp, Heterodera glycines
  unsure (1)..(1900): unsure at all n locations
tgattatttcaacattttttttttaatttccagaaacaatccaagtcaaagccatgacaagcattggatttttgtccaggaaatcaaggtccagatctatttccagtctttttcaaaatgtcgagttccaatctctttacttttatcgtcagcaattcgttgcaactgttcagcaacagatggttgttgaacaggttgctgtggtgcagacgcatctgcggcgaccggcggctttgacactgagacaattgctggaacaacatacatgattagtattttaattgcccaataaagaggtgaaaaattctgggaatttttttttttttactttttttgcattaatttttaccaggatcataagtgatgtcaacaacacttggctctttcggtggtgtctcttcacaaactgaaaagtgttcaatttggtccatttttaagacatacatttaagagacgggaccagaaaatctcggctttttttcgtgttcctggcaatggtaactaattgtggttcctaattaatttaataattgggcaacaatgtgcagcgccattgtcgggtctcccatttgattaactaaattttttttttggcacattcaaagattaggcaattattgaaaatttaggttaaacattcggaattggttgaaataaatgtcaaatttgcaaaaccatcgaacattttgaagcaaaacaacacaacccaagtaacaaaccgatcaaatccttgatgtcgctggccttgaagatgatgaaatcatacacttcagcgcgtgcctggcattttttanacggaaattcgtttaaattttcaagcccattaaaaaaaaaaattaatttttaccggcacgggcacaggcgcgggtctgtcctctgtgccaaatgaacgaactgaaacaaaagaaatgttggcaagagaatggcacataattaaaggcaattcattgtaaaccggcatatttgggcccaagtgggctaataggcctaaggacgcttcaattgcattttgtgagtctaattgacttttatgagtccaatcaattagccatcctcactcatccttgactttatgcaccataattttattgaacaagatcctggacagacgaggaacatatacatgattatcccaaggtccggaggacggacaaacttggactcgttttttttttggccaaatcgtatttcgcaattgcactttatgagtccagaaacatttttaagtccaatgaactgcaacagcagcaaccggaatcctacaactgtgcaagctcggaaagttgaaaaagtctgggacggctattggcaccatgccggaagaggattatcggaatccttccactttgagacaaatcattaagaatcaggttctattgcactttatgagtccaatcaactcaacccctgagtatctcattgtttggataattaccaaaaaagaatgactaattacacaattgtttgattatttctcgttttaatgattttaaaaatatcaattttttttggacatgaacaaagttattgtaaaaaaagtatgattaaattgattggactcataaaaaaaattgaatcgacatataaaatgccattattggactcataaagtgccattatggacttaaaaatgctattattgaacccataaagtgccatttgattttgtttttgttttaccttgtgataatgaaattgtcgattccaatgggtcaacttaaatttgatttaataaaaaaatgccattttcatatttattcatgcatttttgacagaaccttgataaagtgtgccttcatagcgaatgtcgagacgtgaaatcaaactgattttactgcctatgtaaaggcgtgacatttcaagaattatagggcaatttgacgattttttgacaacgata

SEQ ID NO: 21972 - DNA, 2161 bp, Heterodera glycines
ataattctaataacctaattccatagacttaaaatttaaaagaccgtatgtcgtttttttaatattacaatgccccaggtcaaggccaaacttaattgatgactcattttatgaatgaattaattgtctaattaattatccatttcaatcaaatttcagttccaactggtgtgttaacaattgaagaagtgaacagcgtgtatcagcattattcccatcaaaatttaagtgatgccactgggcttttcccattgaaatttccaacgcaccgacggaacaaaaacaaaggcacaattgagatggaaattgaaaaagtgtctgaatttgtgctggagcctgtgggaagtggccgatttagcgatgccatggacattgggggatttccatggaaaataatggcacaaatcagaacgaaaaacgaaagcaatgagaaatggttgggcttttgcctttccaacgatggccttgaaaatggtaaaaaaaagtctttttcataatctgtccgaatttaaattcaccaaaactaaatatgtataataaacgattatgcagacaaattagacaaagtgtaaacaataaaagaatgcaaaaataagggaaattgaaaatgtaggtgaaaagtacccaccctttcaacttaaataagtatcgtatttaaataaaatggtaattttattaaatatttatttattgtgcagaaaattggtcttgtaaaagttcggcaacacttcgaattgtttcacaaaagaatggcacggaggatttaattggaacattcaatgaccgcatttttaataaggaatggagcatttatggaaaatatttcattagttttgcggtgagtgggattcaaataaatttaataaacttcatattttgaaattaaaatttttaaaattttaaaaaagaaagtgacaaaaaattgaatagaattttttgaaattttttggttataactctttgtaaatttttttctagattttaaaaaattaaataaatataggatttgataggatatgtaatgcatcgcttaataccaatttttattaatttaactaaatttaagctaagttatggtttcttattagcaataaaattgaactaataataaatttaaatgtttctatcattgacacttttgtaactttggctcaccatgattttatattacataattgatttaaaattaaagttataatcggaaacattgctgattttcatgttaaaaaaattaattacaatatttgtcaaatttttgcatctccaaattcaaaattaaggaattgttggatccgggcaaaggattttacgacaaaagcgaggacaaagtaaaattggccattgatgtcattgtggatgagccaaaaacggagaaaagcatttccgatccgaacaaatccaacggcacactttcgacggaaattgaaaaactatcggaatttgctcgagaaatcgaaggaagtgaacgtaaaagtgaaactgctgtgtacataaagggaatgccatggaaaatattggcatatatcaaaatgaaaaatgaaagcactgagaaatggttgggctttttgcttttgtgcgatgcttctaaaaaaggtttgcttatcaaattatataatagaaataataattattttttgtataaaattggtgtaattaattattgaaaagactcatgtaaacattttaacataaaattagaagtgattttttaaaggaaatgagttaaaatataaatttgattattatttaatttgctttaaggtggaaattggagccgcaaatgttcgacaacacttcgaattgtatctcaaaaaaacggtgtggaggattttaagagagaatccagtgaaaaaagaatttttaacaatgcaaagccgagttggggttggaactatttcatttcttttgcggtgagtggaaattaattagttaatttacattttaatattgtaatggcaaattaaggaattaatggacccaagcaaagggttgtacaacaaagacgaggacagcgtcaccttggcaattgattttacatgtgaatagcgtaaacatttcgagatggattgaaaagtgaaaagaaggaaatcagcaggatgagaagagagtcttggagggcacagaaattttcttggtgcttaaattttatatttttttatgt

SEQ ID NO: 21973 - DNA, 1052 bp, Heterodera glycines
acgcgaaaaaagggaaaattaaaattaagaataaaattctatataattttttacttggcttttcactttattaaaaaaaattcgcccaggggaaaatgaaaagagcgaaacgcagcagcaacagcagaacattgcgcaatccatgcgaaggcttaagccagtgacgtggaaatgcaaagtcatttcgggaaggatttacgaacgaattgggcggggcgagggaacgtaaagccaaccggaaggattaagccgagggcattggcaaaatgaatttttgacaaattataaaaacgatatttgagttaaaaaagaatgcaaatcattaccgtaatggtacgcgttgttggagagcattaccagcgacgttggcatacggtagcgaagaaagaagccccgagccacaaaaaatgctgcttatgtatatcgtgtgccatcagagaaacagtgccaaagtgcgtgttggagagcagagaaagacacacagagagagagagagagagagagaagagagagagcgagagagagagagagaggaaaagagagagagagagagagcgagagagagagagaaaagaaatcatgaaaaagaaattgaagagtaagtcggagagagagaaatagagacttgaaaattgcagaggtatagaaagagaaagagaggcagagcgagagctagagattaattaaaatttgcaagattaagcacctccagtggtcggacaattccggaaaaagttgacgaagctgttcagggctcaattccggttcggtcagcgaaaactttggacgatttttctcctcaacgaccaatgcctgaattcaaaattggacaattacattcgacgttaacattttgagtatttttctgatcgctgatcattttcaaaaaaggcttcaaatctccgattttttgttttgttttttagttttataattgatgattgatcaattgtctgatcacttatgttcatttgtcagcaattgatttattgatcagtgattgttagcgatcagtttttcgcgatcggtgatttaccatcagtcagcaaact

SEQ ID NO: 21974 - DNA, 946 bp, Heterodera glycines
tgatatcgatcgatccattctgacaaataagtgatcatttgcgggactgacttttgcaacgctgaaacagcgatgctgccggaagtggtggtcaaatggcggcggagacaaaagcatcggctggtgcgaaggtgacaaaaggcaacagctggcgcaatggcgctgaatcggcgccgaagcgccggaggggtcgagcagttggacactgtctgaacaccaaacacgagactttggcgatgtgtcgcccgccaaatttttacgttttaacacaatttcgccgtttgccgctgcgcgtgccgtcgtcgtccgtcggccgccaccgctgtgaatgccttgcgcaacggcggagggccgaatttgcaaactctgcgcgaacgttgcggaccaagtggcggcggtcggcctctgctccgccaccaccgaggaggacgatttgctgaagccggcgcccaacaattcgtcctgcgaggaaatgccaaagcgatggggcggccaatgggcggaggaagagcacagcgaggaggtggaagggcctaaaattcgaaagctttttgaattgttgaaattcaaaatttgcctccgccttgcactgccagcgcgccgccgcgatgcttttccgcgtcggacgatgaatcatcgccggaggcgacagacgaggagcgcgaggcggagcggggcgataagcggcgccgcgggctgacgccgccgccgccggcggcggtgggcggcgagcgggcggaaccagtgctgaacgagctccgcggggaagggcctgtgaaaatgaaggaaagaatgaacgaaaaacattcatggattaccaattaaaattcattaccctaattagaattatacattaattaattaccctaattttatttgagtaccataattataattaagaaataagcatttcttcatcaccctaaatagaattaggaataaacat

SEQ ID NO: 21975 - DNA, 2430 bp, Heterodera glycines
  unsure (1)..(2430): unsure at all n locations
accaatatatcgaaatcgttgtttagggtctaaaccacattttaataaaagaaaattaaacatgtatcggatcgggcagggcccggtaccggttttttaccggccccggaaaccggccctgcgatttttgaaaaaaaatccggtttaaccggtttataattttgccacaaattttccatttgctcattttcctttgaaaatgtctttttatggcataaagttcttatttttttgttacaatctgttgtgaaaacttgggcaaagtcaaagtcgaacgtaagaccccttcactgtctcctcccgtgcatacgtattattaaacgaaaagaaaaaacccgaaaatttttaactcatttcattcataattaaaaactgattttttgtaattttatttacctattttggaaaaatgtattcaaaaatttcgaatatagtaaaagaaattgcctaaagaagatttaaatttattcatttttatgcaaattttcatgctcacaaatcagatgaaaatgccaacaaaataaagaaggcaaatccggataactgtgtggatcggatgatagtgttgctgagcacggccaaaggcgccgatgcgcattttttggttggcaaaagtgacaaaaaagaggtgagcgagtgacattaattagtcaattaattattaaaagggaatatttttaggctctacaaacagccaaaataggctataaaatggaaaataagcgctaaaaacctcatttttaggggtgcaaaatgacataatgtattcaaaaaagtaaaaaaattaggcaaaatcaatattgaaataaataatttttaaatctaaaattctttcaagaaaaaataaaatttggaaatgaattttaataaatttttcatctttaggggttcttttttgaaaaaatttgggtcgattcttaggggtgaatttttcgtttttttattgcatttttattaataattttgggtaaaaggccaaaataggtcaaaatatgtttttctctaaattttgtagtttaacaatccaccaaaaaaaaaaacaagttttcgttgcatttcagtccatgatgaactcaagaataaataagcaaaacataaaaatatcatccctaatatggcacaattaaagaagcaattggttttggtaatgaattttttcagcttgttcatgctcataaaggcattcttatgatttcatccaatgtttttgaggcaatgtttcaaaaggaagcagaaaattcgaataaccgcacaacagacggaaagggtgggcaaaaaaaaaaagattttttttttttagaaattttgcctcaatgttttgcatgaatactaccgagtttttataaaaatattagtgattcaatgtgaaaactgctcttaattaatgcaaataaattggcttaaaaacttaatttttttttcatttattgaaaataaaattgaaatttaaattttcattttatcatcagttgtaaaggatggccctttgttgatttctgatgctgatgcagaagctttcaaagtgatgttgcgcttcatttattcggacgatttgagcgaattaaatggacaaaacgcagtcgaaattatttaaattttcatttcaattaaagttttaaaattggccctaaaattcaatgtttataaaatattaaatggaaattatctgcaaaaaaaagagaatacaatggccaattaattcatgttaattgttttttatgattattgaaagtgccaaatttctttttagattaaaccaaaaaggcgctacgaaagtaatttcggcaaaaaaggcgccgaaacaaaaagcagtcaatggcattggcaaattgcaattgtcgtggaaaggacactggcgagtgccaatcggtttggagcagagccaatcgacacggattgaattaattaaccattaaaaacaattaaacatagttagttgcccaatatttaatttttaaagtcgggcacctggtagagaaaaatgaacatcatgcaagcggatgtcatcttgcaaaagccacggacctcgagccgaattaggacaaaaagtcgaaaggcaacattttcgaattagcgtttttcgttcaaaaccggtttaaaaaatacactgaaacttctattgatgcattttccgggagcccatgaaattgataaaaaaaatgagtcacttaattttgtctccgtcagttaaagagtgaagaaattacaggccaaagacatttagacggaacaaaaagcaattaatatcagcaaagtatcaaataataacaaataataataatttaaatttaaacacaaattaaaattgcattaagttaatagggaaaaacgaacgaaaatgcaaaattttatttcgcttttgcttcactttttattgttttgctgctaattttgtgtacattctctctcatggaaanntgtggtagagaa

SEQ ID NO: 21976 - DNA, 1911 bp, Heterodera glycines
  unsure (1)..(1911): unsure at all n locations
tccaatcatgggcgacgacacggccacagccgacaaaaggctgggcaccagtggacggcgtgttcctcttgtcaaaatggagcatgaccgaaacatgcaccgggatcgatcgtcatgcaaactgcagtccggttatggcgtcctatttgagcgacggcctagctcaaatctacataccaacgctgctccaccttcttctggcccaaatcctgctggaatacagcgaacgatgggatgcgatatcagacgccatctacacgctgacgacctccggcctgagccctgcggatctcatccaagcagccatcgcccaaaaaccactcatcggctacggctactccatgggcaaaaaatggacaagaggaatacctaatccagcaaagtggcatgcccacctcgaatggcacaacatacggcaacgtggctcgagtacgaagatgggttctgctccctggccttggcaaaaggcggaaagggcaaagtcctagtcatgccattcgcggaatccgatgtctcggaccagggatttctcacggaatccggagtgtccaaaacagtggacgaattggagcgcatacttcgaggcaaaaaagaagaagcgtccagcagccttgacatccgactacagcgatttgtcgaagcaaggacccaccaagcagatgaggtaaacacaaacatgctcgatgtcgacacgtcaaagccaatggtggtgttagcagcatgcacatcggcagcgcaacatccgattgaacaccaggaagaagtccatatcgcaatgcctcaagcggaagaagtcccttggacttggggaacgaagcactattttgtgaacgacgtcaaaatcagcgcaacaaaaatgcgggagctggacgaagcactggaagcactgattctgtcccaagtgccaccacctgaagaaagggagctaaagcagctgaccttcgaggccgtcaaacgcattctgcgcagggacacatgggaagacttcgaaatgcgcatcgccggttctacaagggcaaacacggccctcagaaatggagacttggacatcatcctgatgcccaagtccggcgagccattgagccatgagcgaaagctccgcgagctcaaattcttggtaagggaattccgcctgatgaagcgccaatacccttaccgccactgtgtcgccatcaccaaaacgaaggcaccattgatcaaaatcagaacttcggaggacgtcgacattgacatcacaatggacaacaccgaagctttgagaaacagcaattggctagccgagcagacgaacgacagcaaattgtggcggctctatatgaccgtaaagatctttgccaaacataacggcattggcgatgcgagttgcggcggcctcaactccttggcatgggcagttctgacaacgcatttcgccgcctcacggggacaggagcgttgtgaaacgccactgctcgacttcttgcagatggcggagtacttctccgagttccccttcgagggctacaccatcaccaccacgggatggcgggagcggaaatcgtcgtctgtgcccatctacgtcgaggacccgcacaatagagaggacaattgcgccaggaaccgacaagcgcaagacgtctgccgggtcaaaaacaagctgacgcaggcatggagtcagttcatccgaaagaaggacaaatgccgactcgccgacctcggctttccatgtccgagggacgaagacgtcggctggccatcagcgaggggtcagacatctggccaagagcagatggacttcggcgaaaaggagtcggaccactcggacttcgactcggacgaattggtcttcgaagggccaaaggaagaanaatcaaacagcgaaagaacccagggaggctggcccgaaaacttcccacggcaacatcacgacag

SEQ ID NO: 21977 - DNA, 1604 bp, Heterodera glycines
aaatttggctattttttggaaaaactctgtgcactgcactcaaaatttttttgcttcggcgtatatgggcgcccctatggaccaggtctgtacgcaataacggattacggattgcggattacggaaattacggggttttgggagttacggattacggattacgggttacggatttttgggatttttccgtaattttgatccgtaatttgacttttggattattttttcgagacgatttcttgtaagattatttttataaaaaacaaatttttctatttttttatttaaagggctacccgtatttcgatttatttaagaattaaaatagatttataattttttatttgttgttgttaaggctatttgggtagttcgcctagaaaattttgggatctgtcaaaagactcccaccgtattgggcgtatagctacagaatggcacaactttttaattataaaaaaattttactaattgggaattacaaacatattaatttgatttcagcagagtcattcctataagataatggaatttgtttaattcgtttttcctttttgttgaaaggaatgaatttaatgatgcttttcagaaaattactatagttaatttctaaaaattcacacttaaacagtttagaattgcttaaatataataatataaacgcagtttctcattataggtctttaattcatcatcaaaatataccgcccgaatttctagagagaagcttcagagttttccaaaaaatatgctggtacccaaccacaggcactaaaagaatctttttacaacggcatttcatttttcccacgaataattggcaataagaaagaatttccaatgttttttggcacaccttggcaaataataaatatgcaaaggttttataattttcttattaaaataattaattatataatggaatttgtttaattcgttttcctttttgttgaaaggaatgaatttaatgatgatttcagaaaattaatagggtttatttctaaaaattcacacttaaacagttttgaatcgcttaaatataataatataaacgcagtttctcatgagactcaaatctccggcattctaaacactgggactcaacccaccaacatttcaatcaccaggactcaacccaccagcattccaatcactgggactcaacccaccagcatttcaatcactggcactcaattctcctgcatttcaatcactgggacaacccaccaacatttcaatcactgggactcaacccaccaacatttcaatcaccaggactcaacccaccagcatttcaatcacttgcactcaacccaccagcatttcaatcactggcactcaattctcctgcatttcaattactgggactcaacccaccagcatttcaatcaccaggactcaacccaccagcatttcaatcacttgcactcaacccaccagcatttcaatcactggcactcaattctcctgcatttcaatcactggaacaacccaccaacatttcaatcaccaggactcaacccaccagcatttcaatcacttgcactcaacccaccagcatttcaatcactggcactcaattctcctgcatttcaatcactggg

SEQ ID NO: 21978 - DNA, 964 bp, Heterodera glycines
  unsure (1)..(964): unsure at all n locations
tcagggcttgaaacaaaaaaacaattattaacccgatttttgacataggcgcaaatgatgggaccacaaaagtcgggcaagttacggactgaccctggcggaatgcgcagaaggagaaacctcaaaatttgatatgcttttcaatggatattttaataattattttgttttctcgtttgtattttattttttccatgaataaattcttttgtttatttgaaaacatgtatcaatcaggaatattgggtgggctgggatccccattctaatcctgaattttggcatgagacattgagaaaaattgtcgaaaataatttttgaaaattttttaactggtgtgaggatttttagttttctaattattttttctttgattttgattcgataagaaattcactaaaaaaacatttttgagcggaaattcctttaaagcgtgccgcaaaaagcgattcttggaattaaaaaaacatcgaattacatggctgaccacattcacaaatttggaaatatggccgctgacccaatcaataatgggaagtgaaaaacacggtatttacatttttcattttaagcaatttggaaaaaattaattcctggtggtaaatctggtttttgccattgcagttcagaattagaaaattttttggtgtcatcctgttttatagtaacaaaatcttaaaggaatgttattgatcactttgactgcagaattaatattaattatagtaacaagaaatatattgtaattatttttccgttgattactgaataataaatacttgaaaaaaggcatatgtatgtcgggaccatttcgtcactcccactcattcaatcgccttcacgcacaccattctcctannatggcgatgttcaacatctttaaaccttttaacgaagaacaaagttttaatggcactgattaacccaaataatgataatatattncaataaattaaataatttt

SEQ ID NO: 21979 - DNA, 811 bp, Heterodera glycines
ggcttgaattatatggaaatccatatttttttcctgtactatgggaggcctgaaacgcacgaaaaaacatgtttttaacttagtttgaagcctctaggacttatttctataaccgttttttccatatttcgcgatttatctccacatttccaatttttccatattttggcatttttatccatattttatgcccatattttggcatttttacccatactttatgcccatattttggaatttttcaaagaaacctctaatagaacggccccaacaaaattggcctttttgacctcaaaaactggaaaattaattttcctaaaaaaatcattttttcgaaaaaatttcctcgagaaaattgaataaattaaaattatctttgaaattgataatatatttcaaaaataaacaaaaaagctaaaatttcgcgatgcgctgatgggggaaattgaggaaagggctgggggaagggagagaaagatcgaatgccgagggaaggtggccactaccgctcggttggtgagttcgaaaacctatgtcccaccccccaaaaccaattcctgactccaaactttatttccttcgatggataaaggtataaaatggaataaaaaatggagaaaagataaatgagtggaaatgaatgaataaaaagtgtaaaatgttgatcgttaaatatccgtttgaattggcggagccaagtgagagagagagatataattaagtctataaatggagagaatagagaaaaggagtaattgcgatttaaatagaatgataaatggataattgacgtaaatgaatatgccttaca

SEQ ID NO: 21980 - DNA, 955 bp, Heterodera glycines
acctaaaataaacaaaaaatgccaaaaccatcacagagagtttcaatttggaaaattctcgctgaccaaatgcctcttttattcaatttgatcaaatgtcccttttttattcactttgatcaaatgtccctattactttgatcaaatatcccttgttttattttcactttgatcaaatgtcccttttttattcactttgatcaaatgtccctattactttgatcaaatatcccttgttttattttcactttgatcaaatgtcccttgttttattttcactttgatcaaatgtcccttttttattcactttgatcaaatgtcccttttttattcactttgatcaaatgtcccttttttattcactttgatcaactatcccttgttttattttcactttgatcaaatgtcccttttttattaactttgatcaaatgtcccttttttattcactttgatcaaatgtccatattactttgatcaatatccattgttttatattcactttgatcaaatgtccctattactttgatcaaatatcccttgttttattttcactttgatcaaatgtcccttttttagtaactttgatcaaatgtcccttttttattcactttgatcaaatgtccctattactttgatcaaatatccattgttttattttcactttgatcaaatgtccctttattattcactttgatcaaatgtcccttttttattcactttgatcaaatgtccctattactttgatcaaatatccattgttttattttcactttgatcaaatgtccctttattattcactttgatcaaatgtcccttttttattcactttgatcaaatgtccctattactttgatcaaatatccattgttttattttcactttgatcaaatgtcccttttttagtaactttgatcaagggtccctttttttattcactttgatcaaatgtccc

SEQ ID NO: 21981 - DNA, 912 bp, Heterodera glycines
gggcggattgatgcgtagcacctgcgaggggagtcgtcagtcccccgaccgtcggtcgtatagcaactctccgctttacctgggtcctcctcccacacgactttgtccaccgtctcgtggagttcgggcgcttcaaatcggatccatcgctccgtgtacattggcaaaatgtctttgcgtcgcaccacctcttttccctcacggcgccggtcgttcagtccgatctccaggaaggaagtgccgctgagaaaggccaaacagaacagacggacgcgggcgcgctgattgctcacattgccctctttgtccaccgaagcctcgtactcgtcgtagcaatgaatctgcatgcaaatgtacgacattcaaagtgccattcccgtactaaatgtccattgccgactaattactctctgtccctcccttttcaaagtgtcaatttttcccgtcgtaaactcttgaccagcgtgtctattctcgactattgctcattcactctcgctttgtcctccgttcttttttttcacctgcacttcgtcctgtttgtaagtcggcgccgtctcgcgctttgccggacaatggaacagcacattttccaatgcgtcagtgaaactggcgatggtccgttcgttcaatgacccgaacttggccagcactgtgcactgggccgcgtgctcaagaggaaggccatatttggtcagatggccttcgacgaggcgcgaaatttggccggggcgaatgccaatgcgttctttgtacagaatgtgttgcaattttacggtgtgaattttggtgaaaacgtcgtacggttgcagcacaatgtccgacagcgaataattggcctgaatttggcacaacggaagtgatcggtgaacaaacatagcatataaattcattggtcgtgaacccaattag

SEQ ID NO: 21982 - DNA, 1995 bp, Heterodera glycines
atgcgatggggcgagacagagcgtatgcgctgagacccgaaagatggtgactatttcctgagcaggatgaagccagaggaaactctggtggaagtccgaagcgattctgacgtgcaaatcgatcgtctgacttgggtataggggcgaaagactaatcgaaccatctagtagctggtccctccgaagtttcccccaggatagctggagctcgttaagcagttatactcggtaaagcgaatgattagaggacttggggacgaaatgtccttaacctattctcaaactctaaatgggtatgaagccagggttgcttgactctgaacccaggcgttgaatgtttgagctccaagtgggccatttttggtaagcagaactggcgatgtgggatgaaccaaacgtggagttaaggtgccaaagtgcccgctcattagaccccataaaaggtgttggttgatatagacagcaggacggtggccatggaagtcggaatccgctaaggagtgtgtaacaactcacctgccgaatcaactagccctgaaaatggatggcgctggagcgggccacctatactccaccgtcattggcttgtacacgtgcttgtcgcgtagtctggccatgacgtgtaggagggtcgtggtggttgcgttgaaggctttgggcgtgggcccggccggagcttccaccagtgcagatcttggtggtagtagcaaatattcaagtgagatccttgaagactgaagtggagaagggttccacgtgaacagcagttgaatgtgggtcagccgatcctaaggcaccggctaacgccgtaacacactacggatgacgacttttctgtgcttgcgcagttggtccatccggttgccgaaagggaagtgggttaacattcccacgccaggctagggaaatgacggttcgcaagagctgttttgcgcggtaacgcaaatgaactcgcagacgtcgtgtggagtccgagccagagttctcttttctggtttagggtgtgcgtgcctggaagtggctcagcctgagatagggatgttgcgcccgtaaagcaccgcggttccctgtgtgtctcgtgcgctccacacggcccttgaaaatgcgagggaagctatttgaatctcctgcctgatcgtaccgatatccgcagcaggtctccaaggtgaacagcctctagtcgatagaataatgtaggtaagggaagtcggcaaattagattcgtaacttcgggaaaagaattggctctaaaggtcgggtcagccgggctgttgcgtgaaacaggcggcttttgcccgtggctgcgtgctgttctttcggggatggtgcgtggactagtggtgagagctgcttgtggagcgcttcagctgcgtgtatgctcgtcagggtatgcacttcggttggcgctgaacgaccagtttagaactggcacgaactcggggaatccgactgtctaattaaaacagaggagacggatggtccttgtggacgttgaccgtgtctgatttctgcccagtgctctgaatgttaagccaaggaaacttgattaagcgcgggtaaacggcgggagtaactatgactctcttaaggtagccaaatgcctcgtcggctaactaccgacgcgcacgaatggatcaacgagattcccactgtccctatctactatctagcgaaaccacagccaagggaacgggcttggcaaatttagcggggaaagaagaccctgttgagcttgactctagtctgactttgtgaagaatcatgagaggtgtagcataagtgggagccgcaaggcgccagtgaaataccactactttcatcgattccttacttaatcggtaaaacgggagtgcgcccgaaagggtgtccattttggtgttaagtcgggccacccggtggcccggcgacccgcgccgatgacagtgtcaggcggggagtttgactggggcggtacatctgtcaaagcgtaacgcaggtgtcctaaggcgagctcag

SEQ ID NO: 21983 - DNA, 2234 bp, Heterodera glycines
aatgaaagtgaggaagcagaagcggcgaaatccaaacgtggtcttccgggactcattcaatttaatgccctgctcattggcagctctgatcccatcctacggccttgacgtcgaggacaaaccattcttcccccatttggccaaccgaccggagaattatggtagagcgattcatccaactcctgaggactatttggccaatgggatgatgccaggcaaaaggcggcaattcgacatgtggtatgagcagcaccgtgaggaggcatttgttttggatgaggcattagcaaggcacaaatttttaatatttttttcaatttttattttattttgttcagctattgcaccaacgacgttgaaattctgatggccgcactcgtcgcattccgtcgggaattcttcgaaataacgcgacgacaggagtatgtggaagggattgacgaccgcgagaaccatgacggaatagatgctctgcgtgaatgcatgacaattgcgggtgcctgcatgcgccatttccgtacaaaccatctgccagctgagcatctggcaattgtacccgagcgcgggtatgacaacgcgcagaatcaaagtctcctggcacttcgcttcttctactggtactcggaggagtacgatgtagaagtgcaaaccgcacactctgccggcggagaaaagcggattggtccctattccttggacggatggattgaggcggagggtcgagcaattgaagtcaatggtaggctttaatttgttcaaatttgaaaatcatgactttaaggttgtacatggcacggctgtaaaaaatgttaccccaacgacaacatggtacttcccagtggaaaaacggcagggcaaatacgggaacgtgatggtaaacgaatggaatacctaagcgcacgggtcaatcgcatagacgtgttttgggagtgtaaaattgacgagatgttggcgagaagcaaagcgatgcgtaaatgttttgctaactacgtggacgacggacctctggtgatacgcgacgctttcatgggagggcggacggggccaatgaagctgtatcacaaggcggccaggggcgaaaaaatttcttattacgattttacttctctgtacccctatgtgaagtgagttttttattattaaataaaacataaatatttaaaactttagcttcaccacccgttatccgattggacacccaaaagtccatgttttcaaccaacaagtggtgtggaccaaagagtacccgaccggcggtgtggacgacgactaccactgccaacacaatgatcaacagcgaggttgggtcagcacctgcacgtccatcgagctgaacgctgcgctggacgagggctatcgcgtcacccgtctgttccgtgtgttggaatatgaggacagtgacgaccaacttttccgcccgtacatcgcagagttcatggcgcaaaagatccaggccagcggatttgacaacgaaatcaaagggaatgccgccatggaggaacagtttgtgcgagagtgtgcggaaatgtttggcatcaacgtggacccaaccaagatggcgataaacaagggaaaacgttccatcgcaaagttgcgcttgaataacttatgtaagccatttgtttttcaatggattttaaattttaaatttaggggggcgcttttcattgcgaaactttggactttgtcagactctgattacggacagtcctgttgtgcttgccgaatatctggacaacaaatccgttgaagtcgcgtcaattgatcagctggatgagaagcacatcctcatcagctatcagcacaagaaggactgggtggatgagcatgcctgctcaaacattggtgagaattttctttaaatattaccgtaatcaaaaaaaaactacagtaatatctttgtggacaacttccacggcgcgacttgtcttgttgaaggcaatgcaaaaagtagtcaggtcggaacggtgcgagctactgtacacaggtaattgaaaaaaaatattgtttaataatatttttaaattttagacaccgatagtctcgtccttgtccacccggaggggcgttgccctctcaaaactggcccacacctgggccagttcacggatgagtaccccgatcacgacatcgttgagtactgcagcggcggatgaaaacaggtaaatttacacgtttttcaaactgtcataaacgcacaaattaagtatggtctgtgtctgcggcgtaagggg

SEQ ID NO: 21984 - DNA, 2477 bp, Heterodera glycines
  unsure (1)..(2477): unsure at all n locations
tcatcagaatcatcttaattttcccccagtgatttgtgagtgataaganaatagaagaaattcagggattaattcctgaggaatttccaaggaccacgtgcatcattgctacaacggtgcccttaatggctttttaatgtcaaaatgcccgacactagcgcatttctntagacaacgaaaattaattcctgaggaatttcccaaagccatgcgcagctttgttagaccgatgccgaaatggcaatataattggaaaaggacagacaacaatgcttttctttatatcagctgatggtttacaaaaatcgaaatacttcctgagtactttccaaggttcggcaaattccaaattttgttcaagttcgggttggtcaacttgaccttcaagaaaatggtcaatctgctcgggattttcttggcaatttttcggacacagtttggtggtaaatgtttaaatttttgacaatcgaaaaattcaattttaaaattttgtatcccttttctgattggacttattatttaatcaccggtttgttttaaatatttatcacaaaataaatcacaatttgtcaacaatggatcacagatcacaaaaaattatcactgttgtccgactgcggaagtggttgctcccgaattgtccacttcttttgtgcctgtcggcaaaccaaatgttttgcggatgaatgtggccgtccgctcttgcgcagttaggaaccgtctttgatgcagaaggttgttctgcagtttctgtgcgcagatgacggtcttttcgcgtgcggctctagtcgcgtaggttgtcgattggactgtttgagcaattcgtcaaggattttcctattgaaatcttccgcgcgaatcgctttcgcgaccgattctaagatattatttgtttggagttcgaccgatcggatttttctttcctcttgctttttgcactccttgactgcgttcgcccaaatttctgttcgctcgtattcgagcgttgtcaatttctccaaaaaacagttgtcaatttcgggggcgaaattgctgtggaaattcggttggtccggggttgtctcccggattgagttgaactttttgatcgcgtttgtcgtttggaggaggtccgcgttttggttggtttttacggtttgttccacacagccaattgcttttttcagttgtttggtttggactttgatttcggatgctttcagttttgccagtaatttttgggtctcaggcgagagggtgaccgggtcggatttttcagaggtggggtggacccaaggaattggacttcggtttgctccgaaggcgaatgagtgcgaatgactaaaaattggatatcggtacgatcagaaatctttgatcacttttcttcggtggtgtcttttccttcttttcttcttcttcaacttcgtttgggtttgtcggtgcgcgagatgccgatcgggttgttcttttcactgaatgaaatgtgtattgattgatttgtaatgggatttttgggtgtgtttgtcgggttttgatcttgagaaaaattgactgttttgtgtgagatttggtggggttttcctttaaaattttgaatttttgagtgtgtggattggttaccctttgtagcaaaaaattttttgaagtttttttttaagttttctcacgtttgaagttgggctgcggcacgaagagttttcgctgtttcagtagtttgacgatttgttgtcgaatgccgggtcgttgttgtgcgcagggcttcttcccgggtcgtcgtgcaccactttgtcctttccgcaatcggtgatggacaaatgggggggggacgagatgaaaagggagattcgctgagttagcttgggattgacatgctttggactgagatgatgagtaatgaatgagaccaaacctaattggatatacctaatacattagaatggactgaatttcatagtaaaattaattaaattatttttcatttactcacaccggttcaattttggcctcccagttccaaaaagatttgcatgtgtggcgaagtggtttttgtaagatagtaaagggacaaagggtggtggttcgagtccgttgtgcaacatgaatatttttatttatttttgtccaaaatattaaaaaatgacgaattttgggaattatttttgaagctttttgccaaccaaattggataatcttggtatctttcgaacgctcttgatgaggagaagctttttctaagcaaattctaagcaatttgatgaatcagaaaaaagataagagcgttcgaaaatctaaattaacaatttagcaatgttctaggccgaaattcttaaccaaatcactgaaattttgttaattttctttttctctatcggtgtgcaaaatttgaagaagatttaacatcagagaaaaaagttaaatgtcacgaagtgaattcggtttttctctattaacagagataaggaaatagtacgccaaaaagagagatttttttctct

SEQ ID NO: 21985 - DNA, 2350 bp, Heterodera glycines
  unsure (1)..(2350): unsure at all n locations
ttcttttntaatcattttgttttaaattttaccttccccaacggtggccttggacacttagttttgtgaaaaaacgttccccagtttttttagattggtcaagttaaacggcaccctcaaatgacgattatgtggaacagcgatgatgaaactgacaggggaagaagcaatggaaaaagcctaagggaggggaaaacaaattaatgaaaatcaattaaataaactgcttaaacaacacctctttggccctttgaacttgtgtttcaatttgcctaagaatcaatgcgtaaatggcactttgtacaaatgcaaattcgtacaattagccgcgtttcgtacaaaagcatttcaaataaatttgaaaaaagctaacctatttttggcttttttctaaatgctttaaatattatattaaacgcttttttgtacgaaatgccattgtatgaatttctttaaacgaactgccattgatttggacaatagcaatgaaacatttttcggaacgccgccgggacgaggcgtaaacaaccatttagccactgcttgccctatcgaaagagcaccggtgccatcatggacaggcaattcaataaaattgccatcgctgtataaatatcggagagatttgcattcgttcagatcggttgggacaaattgtcccaaatctttggagtgttttgatgagaaccaccgcactgtgcaaacgttgtctttgatcattggccaagcattgcgaatagtgaaatccgaaatttggccatttttcgtatcaattgacaaatttgtgccgaaaaaacgctgaaaatggcacagaaatgccatcacattttggtcaatgtacctggaatttgaagacatattcatttatgagctgctaaaattactgaatccgtaagtgtttgaatccgacgactttgttgggcaacggattttgtgggattggcagcgattgcctacgaaaattggaaatttccatttccgcagtgccattctcgccaattttctgacgaattacaatttctcccaatgaccatttgcgcgttttgaagtgttcgtccacaaaacggtcaaatcggtggctgagcaatgcaattccgaggccaagctgacggggtgagagcaaacggaacaccgccagccaatcgtcggcacaaattggacttggagaggaaaatgattaaacgaaatcccataaaattgctttgaattaatgtcttgggctaggcctagctctaagctttaggctcaagcttaggctttattgcgttttgtaattaaatttacgtttattttttcataattgcttttaattatcgtacaatgccttaggctatgcctaggctttaagcttagccctaagctttaggcttaagcttaggctttattctgtaaattttattattataattaaatttacgtttccttttctatttgcttgttcgcttcttttccgttgtccgacatttttttgtccgttgtgtgaatttaggacgcttcttcttggaattaggttcaataaggctgttaaaaaggatatactgtataaaatttgttttaattcttttaattggcgatatgtttttaaaaaatggcgtttttctctctctttttctctgctcaagtgaagacagagagagaaaaaaatttcatttatcatttttagtttgtctacaagattcttcgcgaacaaagattcaaaattaaaaaatagtactgaaattaggtagttgtaaaaagtattgcaatttgcagtaaaagcaaacttcaaattattttcatcacttttttattttgtctatctaagtgaacaaacaaaaaagacgctattttcgtcctccagcattaatggattattaaattttcaaatgataaacatagataaatcttaattagtattctatacttattttttcgatttttgcattttattcaattcttgtgattgttccacgtacacgaaaaacagcaaaatttttctatggcttctgccgtggtaaagcatccgcttgttttgtgggcacaacgttcgcccaacctttacttggcggtcgaagtgggcgacatgaaaattgaggagttgaccattgaccaagacaaattcaaaataaagtaatgagtttgctggacacatttaaattagggtgcttgccgcaaaaaattccgagtagggatcaaaaaccgaaggggtaatttctgcaaaaacgaaaaaaaaagtagagtaaagaacaaatgggtccacttcgattttttgtcgaccaccacaactctaataagggatcggggggtttttcatgacatcccaatatagtaaatgtttattttcttgacaaattgctcaacttaattgttg

SEQ ID NO: 21986 - DNA, 1136 bp, Heterodera glycines
tttatttttgctttaccatgaaaattatatgacacaaattgacatgaaaaccctaattggacggaaaaaactttttttcttttaaacatattttgagatatttgaatttgaaatacattataaaaattcatttttttgaaaatgtccttaaaccggttttttcaaaaagataccaaaaatcaattttatcctaaacctaattaggtaaccttgtttttattcacttgtccaaaaaatatttaaaattttttatttaggtatgtaatacttacattggggttttgagtatttttcttacatatttcatgattttttttcattcatattttatgtatatattttgtgtattttcttacatataattcccatcaaaaaaatacaagttagaaataatatttttaaaatcataaaataaaatgcatttaatacaaatggaatggaatcatttgcggaaaatcacactgaaaagcacagtgtcatcgcgaatcagaaaggcacagaacggacggtcggcgacaaaacggtattctttgctcgaacaacactccacttcttcttctgtgactgccgcagcgacagtgccctcctcattcacctaaatttcgttgtttaaattagttttttttttgagaattgagctaaaactggtcaaaaatatataaattttctttggaccggctggtgacttttttttattttgcaattcgatggtggcaaatttgtataaatggaatccacaaaaataagggcactaattgtgggcaatcaccgtacctcaatgaccgccttctgcaccacttcgctgagcagcaacgttttcttgccggaaatgccctcaaaattggcgctgttggtgaatgcggtgggcatgcccatgttggtcaacggtttgttcaatccgtgcgtggcctccaatttgaacttgggcaacaccacctgggaaaagaaggggctcggctgggatagggaccaacaatttctccctttttcattctcattccctcatggaaaggatcacagattagggccgactgctgagagttacagaaaaaatatacaaaaatataatcatggtaaatattcgttgataaattggcagacggtttagaggtaaaacaaggaaaaaatcatttcat

SEQ ID NO: 21987 - DNA, 1788 bp, Heterodera glycines
  unsure (1)..(1788): unsure at all n locations
cgggaattcccggtcatccgaggtcccggtcccggattttgaaaagctcaggtcccggtctcatattttttaattgatatatttttatgattttttatatgaaaatccgaccaaattgagcctaataataccaaaatttttgttgaaaatctgttatcaaatctcactcaaattttcaaaatttccccccgcggcggtgactatcggcaccgccggaccacctttttcccaaaagttttctggaaaaagtgcgcgaaaaaagtgatatgaaaagcaacgaccatttagcccaaatgattaattgcttgaaataattgaagaaattttgatttgaaaattttctttaatttaatttagttttaacttttggattttattaaataaaaaataatataatttaattttgtattattttcacttgaaataaattaaaatttgaaaaccgggaaccgggaaaaacaagcactggtaagaatgggggtctgagtggaaaattagtaatgaaaattagagtcaaaggaaaaaatattaaaaaaatgattaaaaatattctttaagcgtgtcgcaactaattgttcaaatgcactagtggctagtccccttgacttttgtcttcttctttcccctggnttcatccctctacggaaattaaaatattttgaattttctttttgtatactcatggttttcctatcgacaaaatatgatttctcatattttttttgtttatatatattttattattttttaaaatgaaaatacgtacaaattgagcctaataaatccaaaaaacctgcctttttgttgataatctgttaacaaattggactcaaattttcaaatttttccccggcggcacctatcggcaccgccggtctcccctttctccacaaaagttttttggaaaaagcgcgccaaaaaaatgatcagaaaagtaatataaatttataataatattcgatcatttagtccaaaatgattattttaaaaaataatttaaataaattattttgaaaattttcattaatttaattatgctttaacttttggattttattaaataaaaaacaaaataaaaatttaatttagtattattttcaattgaaataaattagagatcgacattttgaaaaatgcctggacctggacctggacctggattccatgttggacctggacctggatttcctggacaaaaatccaggaaaatccaggtccaggaaaaatccaggctcctcgagacctggatccaggcctggacctggatttttttaaactcattttaaaaatcaaaaaaatgtttgaaaaattcaattaattgcttgggaacatctaaaaatatctaatttacaataataatttgtttttaaatatatttaatcattttttgaaaacttgaaaaaatatcggtcacttgaaataataaattctaaaattttgtccaggaaaatccaggtttttcgtgttttgcttggctttaatatgagtataaaaagattaaaattggttttttacattaaaaatgggacattacttattttgtcaccatgtaaaaaaataatttaatttatttgtttttacaaaactttgtcagtcacataactcggcattcatgcttatttagaagaaataaaaaacacttttcttatgaatccataggtactgtatctacccaccaaattttcattcggaaaccccacggacacccggggaccttcctttgttagtacctcgatagctttgtggtttcctttgttaactcataaattttaaattcattaagttata

SEQ ID NO: 21988 - DNA, 1364 bp, Heterodera glycines
aaatgtgggggggggggtcagagattaaaatttcccatctttcccaatgccttttcgttttccctaaatttgcttaaaatccgcatgtgaagttgatcattttccttgtccaactatgggaaagactgctccaacaaaaagaaatgtactcacttaacacaaatccgtcaattgttcgtccgtccattttcgaaattgcattttccgcttcgccgttcctcgcaaattcgataaatgcaattctctttgtttgcagcacatccatttttcgaattgtgccaaatttgcgaaatatgtcgaacaaattgttagaatcgattcgcggcgataagttaccaagaaatattttcgtttctctaaaaaaatataaaaaaggtttaaattggtaaagggttagggtataaatcacccgaattcgtttcttacgacgtcctcaaatggtcgattaaaagaaaaacgcgacgacctttggtgattttcttttccagcgttaacaaagactgcatttgatttattttcgtacggaaaagttcgaacattgttgaactaaataaaaaaatatccattgaaatattaaaaaatgccatagtttttgttcccccatttttgtttcctactctttgctgttgtttgccaatttcctgcatggaatgacggctgaaagaagtccgaagagtagggtgatgagaacggtccgtcggagaaaagtcattgaaatttttgcgactaatttcgggcgaaggagcccggcgatgtcgccgaattggaggagaccgatctaacaattgaatcgccattaacccaattccacccaaatggaccccaccagtgttaaaatcgaggcttctcatcggtcccatcgaccgacttcgcaacagcgccgaagtggggacggtcaaatcaaaacggacgcgttttctcgcccttctgtcgctgtgctgcttcacttctctgacatcgctgccgtcatcttcgtccctttctgcgaattttcattttatttaaagaagtgtggcaattacaaccttctagaacgtcgtccgacacttgctcagtgttcccgtccgtgtcaacgccatcttgccgaaaagacttaattagtaatccgtgtttatttaaaacagattggaaagttgcctcgagcctttgaaggccttcggaagtgggcacaatccaacggccggggccaacgacctaaacgatgccgaaatggacaatggcacccgccccactaacattggccagttttttctgcattaatttgctcaatgtttccgggattgtgtcgtaattgcccaactccaaaagtgccatttgcgaaatgagctttgcttctgacaatccgcccttgggattttcaattt

SEQ ID NO: 21989 - DNA, 643 bp, Heterodera glycines
tgtatttggaccaaattcggaaggacgacgtggtcggatttaaatgattcacctgtcaaatgcaaaataaatattgcatcaattaagcttaatcacggtgccatcactaacgaatatttgatcaaacgacaattgaaacacttgaaactgattggcaaaagggcggggggagacgcggggaaagagcacggcaaattgcgagacacccatctcgactcggaccgacgactgccgctgttttcgtacactcccgacacattttccctgtaatatttactcgagtgtcgagattgctttcccagtggcattgcacttttctctctagaattttggtgccgatgattatggagaggaaagaggcgcttgggtccatgggaaacgatgctgcgcttgcctgtctgtccgactacagccccattctcttctcctacttccagcaattgttcgcccaagtcaccaatcctccgattgatccctttcgggaacaggtaaagagttaatctcgactgatttgagcatgtttttgtccctttctcaggttgtaatgtctctccgctgtccaattggccccgagtcgaaccttttggaaccggaaattcaattggaaggtcgcattctgctcgaccatcccgtgctttctctc

SEQ ID NO: 21990 - DNA, 1487 bp, Heterodera glycines
tttcattgccaaattggtcgacgttcagttggttgacgccacttttgcgcgctttaggtgctgaagcgtgtctctctgaagggttggcgatcgcaggtgatcaacattgtatacccggcccgtcacgagcagcacggccttgtcccggcgttagaccgaatttgcagtgaggcgtgttcagctgcgttggatgggtttcaagtgttgattctgtccgaccgtcaggtggcttaataaggcgacagcacatttacggaacaatgaaaaaataggtggacaaggacaatgttccgatcagttctgtgcttgcactcggtgctgtccaccaatgtttgatcaaacagcgcctccgaatgcgagtggcattaattgtggagtcgggggaagtcaaacaggtgattcgctaaatgttatagtcctttagacttggccatcaatgtttgtcattttccaggtccacgacttttgcgtgttgctcggttacggtgcggatgccgtttgtccttacatggtgtacgagacaaggtaccgactgcgcagcatgggtctcatcgacaagtctctgacggacgacgatgtcttccaggggtacaaagcgggcatcgaacggggcatttacaaagtgatggccaaaatgggcatcagcacgttgcactcgtacaaggcgagacaataatatttttacagatcgttccaacaaaaatattgtttcagggtgctcaaatcttcgaaattgtcggcctcgcgcaagaggtggtggacaagtgagcacatttttgagcaattattacttaatagcatcaggtcaacgcacttttcgcgacttaacttttgcgacgattcgtaatttatctctctgtctgtttgtctttcattaacattcgctttcgtggctatttcttccctcttcggtgttcaggtgcttcaccaattccgtgtcccgtttgggcggtgccgacttcgagacgttggccatggaggcatgcagaaggcaccgaattggctatccgaatgtgctgaacagtgacttgtatttgtatggtgagcaaatttgttcagagttttctgtctatgactgtattaccgtaacactctgcaggagacagcaaagtgttggtcagtccgggcgtttaccattggcgcgacgggggcgaaaaacatgtcaacgaacccgtgaacatagccaagctgcaggcggcggcgcgactgaacgacgctaaaagttaccaggaattttcacgggcgtcgaatttggcccaaagactctgcactttacgaggccaattggagatcaaaacaaatgtgaagttgcagattccgttggaggaggtgctgtgacaattcatccgatctcacaaaacataaaatatataatatatgtggtttaggtggagccggccgcagaaattgtcaaacgtttcgtcactggtgcgatgtcttttggctccatcagttgggaggcgcacacgacgtggccattcgatgaa

SEQ ID NO: 21991 - DNA, 848 bp, Heterodera glycines
cttcctctttccatccctcccttctccccctctcctccctccggcgcttcgcttcgtttcacttcactttttctgctgttggtgtccctcgcgcacagaaagtaaatcctgttttagctttagcccatcgaaatgaaaactgacaaagatgaaatgttatggttaatccatgaaaagaaaaggacgaaataaatgacaaatcaatttattcacttcacataataattatgccattgttcaatttttgcttgtcaaaaaacattcggaaatttgtcgtcgcggcaaacatttgccaatgggcgaatggaacacaaattcgtcttggcaaaggaagtcatgggggacgccgtccgagcaaagcaaataatacggcgaacatttcggtccgtacgtgccgttgggcaattgtccgcaaggattgttagctgtggatgatcagtgatcagttcctttatgcggttcccctgctgaccaacccgggtgttgcgggtgtttgcttgggtttttttgcgttccgttggcattgccttggccattcgtctgctgctgatccgtcggcggtgcataaacactaaatttgaattggcgatgcttaattggtcgttttgtcctaacggaggccggtggcggtgccggcacagtgccaccgcattccggcacattgttagcgtagtcgcattggccgaccaattcgctatacttcagaagggccggacacgcaaatgagtatgtgttcagcccagtacagctgaaaagtcggaaactgcgcgaaaacaacaacactcggacctaaagtaaaatggaattgcacccgccgctgtaatagccaatggcacgatcggagcaat

SEQ ID NO: 21992 - DNA, 951 bp, Heterodera glycines
caattaatgagggtttacttgagcgggagacggcggatgccattgagtggccgaagcattggaaatttgggggggatggcgaacggattcgaattgggtcggctgatggatgacgagctgattataagagtaaccagaaacagttgacggagaaggactaaaaggccaattggcacagtggcatttgcaaattaatgattattaattaaactctctcaattagtcaatcttttttcattcattgctttgcgcactttccttccaaattgttggcactttccacggcacaattctccgcgtattggcacgacaaacttttcatttcaaatacgagtttgcctgggcacgccaatttggtcgcctttccccccaaacacgtgtaaaagtgcccagtgcacggctgtcgaacgtaatatccgttctgtttgtccgcacaacgaaaatccgtcgttgggggaggcggctgtggcggaccgtcgggcgaaggcatcgccccgggggtggtcagtttgccggagacgttgctaaaggaaatgcccaagacggaatttgaaagcacttttgagcaatgaaaatgatccagtaaaatgcacgtacgtcgaattgttgcacatttgggggtattggcacagtgctctcgacgggtcaaacacgagattatctaaagggacgaataatgaaacgaagtcgctttcaacccaattggatggcttttgctttgcctggacatgtcagttgcgttgggtgccctccgacgcctaaaaaaatgcgactcgaaaattttttcttttcgaattcacatgtgtaaaaatgagcagaacacggctttttaaagtaatatccgtcgacgcgtcccccgcagcgaaatgagctgagagaaacgaacggacgacgcggcggaggaggcggagacaactgaaaaaaggcaatgacaagaaaatgaatgaatga

SEQ ID NO: 21993 - DNA, 2493 bp, Heterodera glycines
  unsure (1)..(2493): unsure at all n locations
aaaagcaaattattaaatccttataaaagcttttggctcacttagttttttttaccaaagtcattttcggacgtttttgaggaccataactgaagtcaatttgggcttgtaattgaaatgccgggagaaattattttatatatatattttgttgatcattcatgagtttttatattttcccaaagctcacttggccttcattagataaaacattcgtttttgattttgttatttaagtttttttttcgttgagtgttcggtttttcctttctttatttatttattgtaatcactgattttgactttcttcggctcccgtgaaaatctaagaattggacaatctgatagcgaataaaaaatataaaaataacgttttataaagcgatcacacatagaatttccaaaaaaaaaattcatttttttttcgctgtcgcaatgttctgccatgcttctgtatatttgttaagatttatttattttttttattcataaatacttttttcgggaatgtatttgttgatgtgttaatagcagacatagcaggaaaacgggtaaaccggggatatcagacggatacggctagtaaaagggaggtgaatttttgaaatctaagatatgtaagggtagctatgcggaaaatcaaaaaaaattttttttaattcttcaatattttgaaacttagcagttttcacattttagcaccttattaatagggccgcaatttttagcgatttaacttttttgttttgttttgctcaattgttttgaagaaagaagttcaaaaaacacatttctgcgttgaaatatcggaattccgatttccgaaaaatttttttgcctcggaatgtcatccctaatttgtggtctatgaaatcaaaaattattaaagggaattgagcagttagttagctttattttttgaatatatcagaaacaaaatgaagtgaaaattgggaatctatcttaggtttttaataaagtactctttgcctaatatctcctaaattgattttgacacgttaaatgaattctttgaaatttttatgaatagattaatgatttgaatgtaatattcgccattagcggccttgatgctacaaaaagttaataaaaacgaaatcttaaacaaaaaattttaaccagtaaactgcataatttataaacacttccaactattaacaaaattaacgtggactaaattttgaaaatttaaaataaattgaaaaagtaaaatatcatcattaccacaaaatttatttcccatgtttaacgcggaaggaagcacatggtattaatatgtaaacaaaattgtatggccaaaaataaaatgaagaataatttttttttggttggtaaaaagaattttaacatgacaaaataaaaatcatttcaaacatttgtcagtcttcccagcagtgtttcatttatcagcagggatgggagctgaatctggttcttgggtagaagacgaccggatttgaatgaattaatgttgagatcgatgagaattgtcggtgaaatgcggcgacgcaaattgtccaaatgattgccggcatttgcggcgcctggtcaaaataatatttgcggtgccgacattttatggtgcccctaattaataaaacatccttttgttttccttatttccgtaagaaattcgttcaaaattaggaaccgctgaatgaattcatttttaatattttttcattggcgtctaagaaatcttttgaattgtgtcgagttcataactttttagccaggcagcgatgggacattgacgttaaaacgcggaaagtggcggttgataagaggcggattgccttggaacgaaatggccgtgcagtaaaggactggatttcacataagcttaacattttgcccatttctttattaagcggagaaaatagataaaattaaaaaaaacatcggcaaagctcaactgacgaatgtttgtcgcaaaatggggcaaatttgacggtcaaatcggcggacgtctttttgtatgaccacacattttccaaagcgtcaattctgttttgccatgaaaataaaattaccaggacaaataatatgaaaatttcaataaattgggaaataaaatttcatcgattaaaacaaaatttatttcctcatgtttaacgcggacggaagcattgaattaatatgtaataaattaaaatattttttggttggattattgccatcatttctcagtctttccagcagttattaatttacaagcagggattggagctgaattcgtgccacaacaaactatttaaactgtttcattaaaataccaaaaaatgattttattatatttctttttttctttatttattggccaacggatttggntgaagagcattcangttattangcaaaaaccctanaaaatgaaacactaaattctcactcatttagcacgatggaagatttcatgcaagatttggccaagtatgcaaatttggtcatgaatggctaacacgatgaaaa

SEQ ID NO: 21994 - DNA, 1419 bp, Heterodera glycines
  unsure (1)..(1419): unsure at all n locations
cagcaanttcacacggaatacatacatatacataatacaagcacagattgtctgatcattagagacatcaacgggtacaagtgatcactaatcacagggatttactccagttaggcgccagccatgtttctggactctaagtcaaccaaatccaacattgttgatctcattcgatagccctaaaagtgtcgtttattaacctgcaaaattccaacaaaaaaaatcgttaattttgaacaattgccaaaagcacagaaaaaacccgggttttcagtcatgtttggccataatttttttgaaccttaatgaaaattttcaaaattttacaggctaatagattgtccggggcccagctgacggagtccggggagagcattcgtcaaatgggcacatcagcggttgggctgcaatgccggacgaatccatgcagtgaacagctcaagcaacaccgaagtcaattccgtggtcaagagaagaagaacgaacgcttgcggtgccttttgctgaaacgtgccgtgccgacaacacattcaaaaaaaaaccctgtccaccacgaagacaaaactcaaattgaaaacattaaattgcacaattttcactgccattttcttatgcaacgcgttctgttttggcgctggccctacgagccagccactccccatccgtttgtgccctcgccccgtcccgcgctcaacttgccttcgcactcgcgtaatgattccgctccagcaattgcctgccaagcgcgcgacacgtgcggaagttctcttcgcgcgtgtcgagatgccacgcctgaggggggagggaggtaattgccgagtcattaggcctaattagcccgtgcagcaccaccttaagcattcgttctccttgcccacaattttcatggtcctctttcgcgcataagcgtctctcagccgtttcgcatcgccctcaatttgtgcccaatgccgtcgatgtctttgagaaatgccttagagcactttcaacaatattaataatacaacactcttgcgatggtcaacttttgcctgttgttttcgtcacagtgcgccaactgacaacgaatcgcggcccaattcctcgggccgtgcgtgcgttttctccacaatgcgtgccaaactgtcgcggatacagtcgtaaaagaatttgtgaatttgacggctcgcctcgagcatctgaagggagacagattatgggactaattaatggtaatggggcacattatgaattttcaacatttgaatgacggtaaatgggaagaacacaaaggacagatgatcaaaaggacggcgatcagagcactcgtcaatggcaatggccgcttcacgtccggacaatttacgcacaagatttaccatttgaaatcgtaagtttgaggggggattggattgtaatgctaattggtcatcattttca

SEQ ID NO: 21995 - DNA, 1461 bp, Heterodera glycines
  unsure (1)..(1461): unsure at all n locations
ttttgaatcaatttcaataggtgtgggactacgctgagtgggacgacacgctattcagtagctacgtcacagctttcgtcggtctcaaagtgcagncgagcggatgnccagagggatgtgaancgaaagagcacngtcagnccttcgtcgcagatttctgcgtacggaaggattcatctggaccgacaaaagatgnccttcaacccgggtctccgtctgatcgccaagactttggcgaactctctatggtattttatttttctacgatatattaaaaaaatgattggaaggggaaagctcgcgcagcgcgtcggccacactgagatacagtacacgcgcacgcctgccgaattccacaagctcctcgacgacccgacttacgacaaactggactttgtccacgtctccgaccacatggaccgtgtcgtcgtccggaagcgacccgagttcgccaaagcaccattgaccaactgccttccagtggccatcttcgtcacttcgtatgcacgtctccatctgtacggatacatggagcaagtgttgacattgaacaacgctgagcttctctactgtggtttgtcttttaccgtttaatgttttagtgacggtaatttagacacggactccatctattacgtcaacaagattggagctccgtgcgtaccggagggcgaagcgtttatgtagagaagaaaatggacacaatgacgataagtcggattctaacgggaaacacaaagaccagagaacactacttgggatgcttcccttgcgacaagctccccgacaaaatcatcaggtacccttcagcattggtggcgaacaatgacccatccaataaagagggaacgcattggatagcaatgttcatcgttgacgacagaaccgtctactactttgacagttttgggcgtactccgaacagatgtatcagccactttttgcggaattatgaaggcgtgatttcaaacaagccccctcctattcagtcagtgttcagtgagaattgcggttattattgtatttattttatttattgtatgtgttcattgagaggaaaaaattatgacagcaattttgaaaaaatgacaaaaagactgaaaggagaggataatccagatttgtttgtatacaaatttgttaagaaaatgatgaaataaagtatttaaaggaattgaatgtaatattttattaataaaaatggatcgattagacacagtaattgcttcccttcttaactgctctgcacgtaatttatgcgaccgcctaaaccaccctgatgaaatcaaaaagattgaaaactttttcaacggaaagaccctgcaaacgacatataaaaatcaactgggcgaagaaaaggattttatttttggtggaatcacaaagaaaagcgcgagaagacaaatggcgtacaacgggttcaagaatgtgaccgtagaccagcatttttatgtacgtcat

SEQ ID NO: 21996 - DNA, 1678 bp, Heterodera glycines
ttccccatgcttttaaagaaattcgcgttttttgggtgcagtagtcaagggctcgcttctcggactcggttcttctcgagactcgtaaaactcgactctcgagcagcacctatttttttaaaaatttatttcaagaaaaaatttttgagaaaatttttcagcgattttttggaatattttttgaaaaaactagtaattcactataaaattgcaaaaaaaaaatgtaatgaattttattataaaaatttttctaaaatttttctgaacaatttcttattttgaaaacttttaaaaaaatttaaaaagaggaaacgatacggaggggtgctatgtcattatttaaaaaccatcaaaataaatatttttgcttataactttgctccaaaacatccaaatctattattaatccttgctatcattcgatagaactaagtgtgtgtgttctttatgagcctgtaaaatttcaaaaaaatttattaactttaaaaaaagttatggccaaaaatgttcgaaaaccaacgttttttgagttcctcgagctacaacttttttgaaacttaacgaaattttttttaattttgcagactgctagagaacacttagggctatcaaatgatatcaagaattaaaaatttggttgctttggagcaaagttagaaataatttttcgacaaaaaaatttcataatgatggttttttaaataacgccctttatgatgttttttaaataacggctccgccccccaaaaactgggctggcgccgaaacgagggtgtccctattaatttagtaattaaaaaaaataaatgtgaaaatcttatttttctgttttatctctccggttagatattattaaaaaagaaaaaacggatcaataagaaggtggttaaatgataaaccaaaataacaagtttttttttctcaaatttaatgctgcttaagacctctaaaattgaaaaaatgtaagtttgaacccgaattttggacataagcgctacgctaatgtccggacacgattttccttccgtttatcgaacatttttcgtttcaatttaaacacaaaatctttccttttttttggctgtctttgcttttcaccttttacgtcagctgtcctccataaatttgttttcttttttcttatacagaaattgaattcattttttttcatcatttcattgtttccatttgcataaaaatctgttgaaaatttttatttgtttatggccaaaagaaatcaccaagctttgttttttacaaaaatgtttttagccacttttttttaatacaaattcatatttaaattaggtataaatttaaacagaaaaaaaaactttcatccgcagaatgggttgaaattttgcagaaaaatgcacaagaattataaattttgggaaaatttttggaaagttttgcttgactcaaacatgaacaactctttcgaatttttgaaaccaaatgaatgtttttctcacttgctaagtcttatgctaaaaatgggaaaataagtgccaaaaagttccgaatttggggggtgtaaaatcgtaaaagtttatctaaaaaggtaataaaattaagccaaaccacagtattgagaaaaatatttttaaaatcacaaattcttgtcaagaaataaataaataattttggagatgtatttttgagaaaattttcattt

SEQ ID NO: 21997 - DNA, 2746 bp, Heterodera glycines
aggtcaaaattacgtttaaaacaaatcatatttaaattattgagccatgaaaaacggaaaaggcacccacaaaatacgaacaaagatgggacgaaacagaaaaactaggcaataaaacgaaattgaaatgtgaccgaatgaacgcagtcagaaatttgaatgtacaatttgtaatttgaaaatgcccaaaattggaaaagaaaattgaagacaaattaaaatgtgcgacaattgaattttgataatatttaaaggcaaatggagtttattttgtgtccgaattcagaaaaaagaggagagatcaaaagagtgaaagttttaatgtaaattcagccaaatcgccataatttaagcaataattaattaatttattgtttttgtgattctctgccgctttgtctgagtgtctgccgttgctttcttcactctctctctctctttttctacctggtcggttgatactttgtctgcggcaatttgtgcgtaacggaggaggaagaagaaggagaaatgcccgccgatgacgacattgctgcgtccaattgacgacgcaaaaaactcctcactcctccgccgaaggatcgaagcagttcacgatgcttgaaaaaaggagtaatttgttgatcaatgcttgtcgttgtgctgttctactgaccgtgctgtaccaatgttcgctgatcagtcgctgctcctgcgtcgcctggtgtttgaactggtccattttgttgcgcaactgttggttctccgcctgcgtttttgtcagttcgtgttggacttggagcatttcggcagcggaacagtgcttatccgacgccgtgctgtactgctcgatcaccgtggccgctttgtctaaggacaactccaaatcgcgcaaattccccttcaattggctgtagttggctaaacattttgcttcgtaatgaatgcgagaagacaaaatcgttttttccagatgagatttcacagaattctcaactgttactgtcgcccgattacccctcccatttgacttcacttgtcccctcaccttccaatgaaattcgccgttcttcactcagtgcttccttttgtcgttgttgttccatttcctcgtgtaattctcgctgcattccttggtaattgatgatttgttgctccaaaaacttcacccgactctccagaccctccttcgcggcaaatttcttcgcgtaatcgtccaatctaatcaaaaaaaaaacatttaagcctaaatctccgcgctgggacgaaaccaggaatttgtagctgttttgtgccaaaaaatgacaaaccttggcatttatgagtcaaaaaagatgaaatggggggtccggcggttccgacaggagacaaaacgcgcctgcaaaaaagtgtgggtggttgaataacaaaaaaaaaaaaaaaaatgccggagaaaaaattggttcttcgtatgaaaaatcgatcccgagacaccccctgtcccaatcgtaagtcgtgtggcccttgggctgagacacctcttgtaaatgtatgttcaacataaaagattaaatgcccttcaaatccaccgtttgtgtagaagctgcaattccctctccttttcctccacttccttcgcgtgtttgtccattttgcccgatgcctttgtatttcgttcgttggcatttctttgctccctcttcaactgttcaaattcgtaccgccgcaactccgactcgtcctgcgcttccttcagtcgtccattcaaattgcgtatggtttcttgctgaaagtgtgccaatgcttttaacatttttcttgtccagctcatatcaatttccttcaaaacaagtaacaaacttaccaatttgatgtttacgacccgcatctcctcgaatttgacttccaaattgttgtattcctcctgtgccatgttcaattggtcgttcagctgctcgttggccttctccaactgtttcattcgcccgttcagttccgtagaacgtattttctgctttgccaactcgtcatcttccgattgtttaccaggcgaagcggagggactgtcggcggcgagaatgccacttttagttggcgatgaaaaaatttgcaaattgttgttgttgttgtgcaaaagcgggaaggcattggcattggcactcatcagcttcccggacggcgacaaaacttgagaaaaaggaagttcagccgagagacgatgcatgcaaagtgtgtcgatcttaaattcatagaaatgaaaaaatttgctctaaattaatttttgctttaatgacgcagggccgtaacgaaaattatgaaaaaaccaagggattgtggtgtttctgaaaaacgaaccatttccccgagtgtccgcgcctgggccttttcaaggcgtgagatgagcgcgttgaattggtcgacatgcaaaatccgcagcgaaaaaaagagagccaaaaagacttttgccaattccatggtgtcatcgttttttgaagagtcatcggacgtgcccaaaagaagtgatgcgcaaagcttttccccggtggccgcttcaatgtcaaaaaaggcggtgtgaatgctgaagccgtgagtgtccatgaagcggagttggccagttttactgaacgaattcgatattttgactctttgatgcaattagccaaaccaacatttgccataatcattttacacaaactcacacaaataagggagagtaggcaacatcggtttggcatccctcacctctagaggaatcttccaaccccaaatcggaaaagagcaaattcaa

SEQ ID NO: 21998 - DNA, 2242 bp, Heterodera glycines
  unsure (1)..(2242): unsure at all n locations
ttcctttgtgctcacttcgcagtgtcctccagttgtcttctaagggactttgaaatgnnngaaanngnnncttnncccccttcgccacttttattttctctcctccttaatcaccttttttcttccttttcctcttttctctctctctctctcctcccttcgctgtcccaactttcccatgcccttttctccctttttctctccccctttttctctagcgttcctcggcccatttaatgtgtgctatttcgttcgttacacacataaaaaccatcaaaaagggcgttatataaaaattattaaatgaaaatttttaacaaaaatttcctaactttgctcaaaagcaaccaaattttaattcttgagattaccgatagccctacataagagttcgctattagcctgcaaaattacaaaaaatttgaagttggaacaaacttatggccaaaagtacaccgggcccaggttttcaaacattttgctcataattttttcgaaatagcgaaattttttgaaattttgcaaattagaagaaaatatatatatagagcaatcgtgtgctatgaatgaaataaaaaatctaaaaaattataactaaaattttttcgttaaacataaaataattttgatcatgaaaaattctgaccagaactttctttgaaccaacaaaatgaagtaatcttgatataattcgttagtcctaagtgttctactagcctgcaaactttcaaaaaatttggataagtttcaaaaaagttatggccaaaaatgcttttaaacctggtttcttgagtactttttgccataagtttgttcaaactttacgattttttttttgaatttaggtgaactaatagagaactcttaagggctgctatcgaatgttatcaaaaattaaaaatttggttgcttttgagcaaaattatgggtagttttttttataaattttcatttatcgactcggcaccatttaatgtctctttttcagtggggccgaactcaggggtgcgattttgccctggaaacccggcatttgccgggttttgggggtccttgccgggtttttgccgggtttttgaagttgccgggtttttgggtttttgccgggtttcctatttcaattcatttatttgagctccagggatcctttattttcttaaaaatttgctcaaaatcgcaaaatttggtcatttttgtggtcaaatctgttaacaaattgtattaaaaatcacaaaatttttcccggcggcgcctatcggcaccgccggcctcccttttccccaagtttttttttagaaaaaagcgccgcaaaaaatcaacttcgattttcgtgctaagaatttcacaaaatgcttatttctaacaaaaaattgctcaaattgatcatggaaaataaaaatataatatttgaacatttttaatgtgttttgaataaatttgtaaaaatgaggcttttttgccgaccaaatgaggcttttgaaaattttaatctggcaaccctggttaaactcattaatttcaatcaaatttaattcaaatattttgtgcccaaacgctcatggttacattctttcaatgccaaatttgctcaaacaggtgaaaagtggtgataaatatattgtttaaatgttattgaccttttttacagtgaataattggcttaaaaaattgccgggttttttggccgggtttttgaaaatttttgccgggttttcgtgcgcccggtttttgggttttggcgatcgcatccctgacatgaatgatcatttgtgcttcataaattcaccacccactgaataaattcatttaagcttaacttttggtattgaaatcataaaagtcaattgcttcaaatagatcagatcactccttcaattttgtagagaattttgtaccctttcattaggcttgtttaaaaaattttgagaaaataattttcaagggtaatgctaggcatttagcacaaatctgactttctttaggctctttcgaaccccaaaaccggattcgacatttttctaaaatttaaaattctcgttttttttttgcaaatattaccacataaattgctcaattgcattgaatcgttcgactgatttcatcatttttgtttacgattatctaaccctgcttcatttgttttcaacaaatcgattccattattaccccatgatttctcatctgaatcctttgtttttcggttggtacgccacaaaaaaaattattttaattcttataaaaa

SEQ ID NO: 21999 - DNA, 1285 bp, Heterodera glycines
  unsure (1)..(1285): unsure at all n locations
gctcgtctatgatgttgccaattgaatggcacttttgttgttggtcacncatggtgccatcattgtccatgtccatgtcggcatggtcgtccccgtggtgttgctgctggaaaatggcatgctgcaactcggcgaacagcacacggccaaactgctgggccaaccggaagccgccggcgctgatggcattttcattcgcgtctttggcaccaccgcaaccgatgctgccgacggagccgtttaatgacgaagcaaatgccggtgacaaggacagctttgcaccagcaaaagtgccatttccatgaatgacgcccgctgctgctgctgctgcttcatcttggctcattgacatgagtgccgctgcagccgccatttcttccggccgctggtgctcagcggcaacaacgggcaacagtcgccgctttcggtcgccgctcgctgccgccggtggcgagcagtacagcaactgttgttgttgctgctgctgttgttggtgatggacgagtgcagcagaaatggctgcaactgtagcagaagttgccgccgaggccgccgaaccgccggtgggcgagcaggacgcggacgacgaggcggacgacgcgttcgccgctcctgcggcgggcgttgcggcactcgctgccaacgacgacagtgtgccaccattctcgaccatgccgccgatgccattgttgacggatgaagccggcacgcgctcgtaatggaacgggttgacgcacaccgagtcgcacttcatgtcaaacgcggcggtgcactggggaagatgcttaacctgtggaaagaaatgggaatttacaaaaacaatgcccggagggcgaaaagtgagacaaaagccaaatggggtaaaatgtgccaaagaaagggtcaaaatggcaaatggggtaaaaaaaaatgtgccaaatttcacttacttcgttcttgtgcaggtcgccccagcggaagatgcgcgcgtacaccacgtgcggaaagcctttgcgaccggcaacctgtcagagagagacaaattgaccaaaaatggatttagatcgcttctgatcagattaggtaagcctagttgatcagagccgtattgtcgtggtggctgctgatcggcagtgatcaaaattaggctaacaaaactaatcagcagaaccaattggaagccctgatcagttgcatgctctctctctttctccctctctctctctctctttatatatgtgaagcgaattggttccttcctcatcagaaacaagaaaaaaaactgaatgggggacgacgagtgatc

SEQ ID NO: 22000 - DNA, 2003 bp, Heterodera glycines
cacattttactggcggagagtccaagtaccttaattggacaattacttgtcaacgaacacagtcgcctttggcctcttatggaacagaaaagggtggatatcagatggggtgcgtcccttcctaaaaatttctcttttcgtctaaccatcccacctttttgtgctctatttcattttcaaaattgggaacatttttttgtatgtttttttgaaactaaaatgtaaaaaatttaataattatttttgatttaaataatgcttctgtttcgaatcttttggctttaagtaattaaattgtaaaaattcaaaactaaaaattttcctctgaagttttgaacttggctttaccctgcttttaagtcccaccgtgaggcgggacagttccaaaatttgtaccacattttactgtgcaaagtccaagtaccttaaggactacagaagagccaatgacgcagtcacctttggacagttattaaaaagaaataaggaaatattcgatggggtgcgatcctttcaaaaaattactctcgtcttctacccccccccccctctttttgtgcactgtttcgttttaaaaattggttccgaaattttttggcattttgaaattaattgcaaaaattcgaaacaaaatactctgaagatttgtaatttcacttcaccatgcttttaagtcccaccgtgaggcgggacagttccaaaatttgtaccacattttactgcggagagtccaagtaccttaattggacaattacttgtcaacgaacacagtcgcctttggcctcttatggaacagaaaagggtggatatcagatggggtgcgtcccttcctaaaaatttctcttttcgtctaaccatcccacctttttgtgctctatttcattttcaaaattgggaacatttttttgtatgtttttttgaaactaaaatgtaaaaaatttaataattatttttgatttaaataatgcttctgtttcgaatcttttggctttaagtaattaaattgtaaaaattcaaaactaaaaattttcctctgaagttttgaacttggctttaccctgcttttaagtcccaccgtgaggcgggacagttccaaaatttgtaccacattttactgtgcaaagtccaagtaccttaaggactacagaagagccaatgacgcagtcacctttggacagttattaaaaagaaataaggaaatattcgatggggtgcgatcctttcaaaaaattactctcgtcgtctaccctccctcgctttttgtgcactgtttcgtttctaaaattggttccgaattttttggcattttgaaattaattgcaaaaattcgaaacaaaatactctgaagatttgtaatttcacttcaccatgcttttaagtcccaccgtgaggcgggacagttccaaaatttgtaccacattttactgtgcaaagtccaagtaccttaaggactacagaagagccaatgacgcagtcacctttggacagttattaaaaagaaataaggaaatattcgatggggtgcgatcctttcaaaaaattactctcgtcttctaccccccccccctctttttgtgcactgtttcgttttaaaaattggttccgaaattttttggcattttgaaattaattgcaaaaattcgaaacaaaatactctgaagatttgtaatttcacttcaccatgcttttaagtcccaccgtgaggcgggacagttccaaaatttgtaccacattttactgtggaaagtccaagtaccttaattggacaattacttgtcaacgaacacagtcgcctttggcctcttatggaacagaaaagggtggatatcagatggggtgcgtcccttcctaaaaatttctcttttcgtctaaccatcccacctttttgtgctctatttcattttcaaaattgggaacatttaagtgtatgtttttttgaaactaaaatgtaaaaaatttaagaaagatttttgatttaaataatgcttctgtttcgaatcttt

SEQ ID NO: 22001 - DNA, 902 bp, Heterodera glycines
ccctgccctctagagtgcgcgagcgaggagcgaagcggagcgacgagcgagtgtaccgagtcaatacgaacctgatcaattcttttagatgtcacttagcgggcatggggtgaacggctaggctcagctgtcttccggtagctgctgctgcacgaacatccagatacgcatctgcgcctgagctgctactgcactaacaacctgacgcatctaccccgttactggctacaactcgacgggataggctcggctttctataaagcgcagccatctaccgggacgcctagttatctatatataaaaataacgggggggctacccactaaacgatttccctctccttaagggctcaacggatcgccacgggaccggtaccaatcgaaagagctcggttttctctacaaaatggcccgtgtggaaaaaattcgcaccagcaaaaattttttgtaaaatagggttaaagaaaaaaaacccggctttttacaattggcaaaaatgggttgtaaaatgtgtgttttcaccttatttctcaggaaccgtaagagctacgcttttgcggtaagcgaacaatttgtagagctcgtcgagaggaagggtgagaaaaaaatttcgtagctctacgacaaattcgaacaaagttataccccggcaaaggtcgaaaaaagccgattttttttgtgttttcgccttccggtttacaatccgtttacaattgtaaattcgtccggaatgtccggaatttcacggaatttgatgtttttcacgtgatttcttcacgtttacgtgtgtttttgacgtgaattctttaaaccagttccggtttttcacgtgtgttcttcacatttacgtgtattttcaacacgtttgcatgcgttttcaatattttacgtgtattttcgtta

SEQ ID NO: 22002 - DNA, 1008 bp, Heterodera glycines
  unsure (1)..(1008): unsure at all n locations
aaatttttgaaatttacagaaaaatagaggaaacttagggctatcaaaagataccaatattgtttaatttggatgcttctacaaaaagttatggcattgatcaaaaattgatcatttttatggtgatcatttattcaaccaagtataactttctatgtacaaatcgcagacccaccattccaaaagcaattcggtagaaaattttgtgctctttccagtgggcttgcccattttctctagaaaaaatttcccaactccctagggatttcgaaaatttccccgattttcagtgtcttttaagtgtccgggtcactaggaaggagtgatctaatcaagttggtgtaagagactatatttctctcataaaaatgtaatttgtttgggaaatattaaataataaatcgacattataataatggtctgcaaatctaaacccatcaatcatacttttttaggccccgtgcgattttcaactttcattaattaatgggcaaataaacgaactgccaaatgataaatcaaaggtggtgtgaccggccataattttttttaacattttcaaaagtatgaaatccgtaaaagcaaattcgaatctcttttcgcttttaaatgattgtgaattcgtcctactgtaaaaatcacgaaattcttactgtaatttattacccaaatatatatattaagctagagcgccacgagaccgggacctggtagcggacaactgagtacaactgagtaccaaggtcccggttttgaccgggaccgggactagtcccggttttcccagccaaaaattcccggtttttcaacccgaaaaggtccaggtcccgggtttgcccaaaattcccggtctcgtggcactctatattanacctctacagatgatcgaccatctttctaatgttggcaattaaatacataaaataataaatgaaaattccagagaattatccaacataatttcttatttaatttttttgaaatgccccatttgccaatgcttcgcgt

SEQ ID NO: 22003 - DNA, 1173 bp, Heterodera glycines
aacatttcccacagccgcttctctttcttcactttgtgtctggcccattttagcgctttttctctcctctctttgctctctcttattctctcaatttctttacatcccttctctcttcgttcgcttcatatcttttcctccatattctcattctcttcccctttaaaatcctcatactctctctcccctctctcactaggctttcctctctcactctcactctctctcctctctttttctcaaccaaaaatattattatcgcactatttcttcaaaattttacttcttccattactatttccactgcttaaaaaaatattttgaaaaacagccccagacccagtgaaaggcacgccaattggggtggagagagagggaggggggcaatgctttttccgctgccttctctgctgttggtgaaaatggggggggaggcttcatctccacagatgcacaaatgcgtggcttaacaaacccacaaattggcttccgagggataacttaatttaattggcgctgcttttttgtcaaaaaatttaaattatttttgctattctgcctgccgtttgtttcaaatttcatcgctttgttttggctttttgttctgtgccagataagagattcgcgatttcaaaatgccatctttttctttttttttggaatggcaccaaatttggccctttccgtcctaacccttctccttcactttctctcattcattcctttcccatttgtgtaccattggtccgttgtctgcttctgctctgtgatcgtttgtcagttgtccctccttccgccgtctgtcgctctctttcataaatctctccttttctctccttttcttttattttctttcctttccttttccttatgcttccgatcaaattctcattacgttacgacaacattatatatgtacatttgtgttttccttccttctatttggttccaattcctcctaaaagtccgttcttttttcacgtgtgccaccacggcaatcattactttttaattttgttaattattaataactcatttttttgcttttttaaatttgttaacatttctccttccctctgtccctccctttgccatttcccacccataacgcccatcaccaccacctttttcttaacagctcgttctgtccactcattcgtcatatgttttgtg

SEQ ID NO: 22004 - DNA, 1582 bp, Heterodera glycines
ttattatgtcattcatataccaaataaaaatctgcaatacataatagcatgcttttacctgacaaatgctttaaaatgagaaaattttcaaaaaaaaagaaatcctaaggaaaagaacacatatttttttcttttacaaaatattttttaaataaatctgctggtgtttgttttttaattatttttgtttttgctttggcgccaaaacgacactttcccgggactggtatgggattggcaaaaattcactgaatagagtgaacatttaaaaagaaattttggtacacttaaagaatttttaggaaaatagaaaaaggaatttaaattagagaagtttttgtttaaaagaaaaaggaaaattgggactttttcacgtaattcatttaattaggaaaatggaaattttaagtcatccgttggcggagggagcggcggcacgtgccatgcgggcccaatgatgacgcgataagttacgtcagttcagcgaatgtgcccacgtccgccttccaattggaattaaaaatattctccgcgataagcgctttaaagcgcagaacacccgaggaggatgacgcgacagagcgggactgggtggaggatgaggagtcgcacggcggggcgacgcgtgaggagtcgcacgacggggcgacgcgtgaggagtcgcacgacggggcgacgcgtgaggagtcgcacggggcgacgcgtgaggagtcgcacggggcgacgcgtgaggagtcgcacagcgggccgatggttgaggaatcgcgtggggcgggtgcggaaaaaaatgaatttagatcggatggaatcatttttagtgtaacagctggggaggataaggcggagcgaggcgtacgcggacccggaaatggcggagggaggggagggatggacgacgagttttacaaaatgaactcgatgatcactgatctgatgcattttcatttcaaatattagtatttaattgcttttatcacttcaaaggatgaattaacaaaattgagtccatgtgaaaaaaaaatttttttgcttaaattgggaaattattacttgtaatgattaaggcatccatttttaagtttttcgaaaaaacaatgaaataacagagaaatctccgcgccatcgaattaccattgatatttgtctttattaagttcagatgcgctaaattaccttaaaatgttagcaagtccataaaattacctaagcatgatacattttaattctttataacttttttaagaagcaacaaaaataattttcttttttttttggaccgagaccccgccggtaccgggacttttttaaaaatgatggaatatcgcttttggagttaatttttaagtagataataagttgtaggccagtccgtcgagtcaaagactccaggataattttcaaaatttgataaatttaaaaaaaaattaattattgtaagtgaaatttcggactcgctcagttgggcgcgcacggttgggcgctcacggttgggcgctcacgtttgggcgccagcatgcttttccacttaagcttttttcattggcatagagatccaataatcttggtatcattcgaaagctct

SEQ ID NO: 22005 - DNA, 2217 bp, Heterodera glycines
  unsure (1)..(2217): unsure at all n locations
attgggcaaattaactaaaaaatatttgtttttntggaatganncttatcggtcttcaatttaatgttcattaaaaaataatgtctggcagaaaaaaaattttagattttcanaatgcgttagtctcatatatggcacagattaagtagtaatatttcttaacaaaaagtctaaaaaatattaaattactaccctaaatatttaaataatttaaaaaaccactaaaatccttcaaacaaaaatttataaaaaattcaatgctcaattatataacaggaaaattgcttaatattttttaattataataaaataaatctatnagcattattcaaaaatggaaaattttatataaataggaattgcttgatttttttatattcaattagtttggttaatgatcagtcagatcattgataaaattttgtgtaaatatttaaaaatatttagccatcaaaatgaattaattggctcaaaataataaaataaacctatgttatgttttaatgaattaggatgaataaaaataaaattagaattaaattcgggccaagttaaacacgaaaaactggatttccaggataatattttagaattatgttattttctagtgaccattctttatttcaagttaacaaacaatgattaaaaaatggattaaagcgatgctatgtcgttataaaaaagccatcaaataaaaattttcatgaaaaaactacccgtaactttgctcaacccccaattaaaattttaattcttaatgtcattcgatagccttaacaattctctattagcctacaaaatttcaaagaattttgtcaagattgaacaaaattatggccaaatgtactcaaggaaccaggttttaaaacctttttggccataacttttttgaaattttgcatgccaatagaaaagagttagtgctactaaaagaaagcttagctttgttggttcgaagaaagttttaagaagaatttttaatgctcaaaattattttatttctaattaaaaaaattttagtttaaattatttatatttttttattttcttggtaatatttgaaagccctaagtgtttactaatggcctgcaaaatttctaaaaatctggtaaaatttatgtttagatgttcctaggcaataaatttttttcttaaatatttatttaccttttaaaacaaattaaataaaaacacacaggccaaagccctggatccaggcctcgattagcctggatggacgggacggtgtggtttgagaatgcaataaaaacttataaataaggaatacgcagccttctcctctagatttcctgaacgaatttattctccaaaagagaagcccccatttttaaaataatagtccttgaaatttttcaaggacggtgtggtttggaatgcaataaaatacttagaaatagcaatataatatgcagccaataaaaaagaaaaaaagaacagattgtcaaacttgggcttttgagaagttcggttcgaaaaagaaattatttaaatgaaatatttgggcaaacaaactaaaactttggaattgaacttaatgatctttcaattaaagtatattaaaaattaatatctggctgacgaattactgaaccaaatgatcatttagaaaaatgcgctcaaaaaacgagaatcacaagaaaataaaaataaaattattttaaaaactatcatttccaagaatttcacatattaacttttaggaaatattttttattaatgtttgtgaaatgtcgtagatggacaaataaatcaaaaaattaaaaaaaaattgtcaggacattaggaatgtaaattttgagttcttggcttaatgtaattggatagcctttaaaaggcgaatttcaattatatgacaggaaaaaagtgaaatatttggattaataaccaaatattaaaagaacaaatgttttttaattataaaaagacaaatgtaaaagcattaccaaaaatggaaaattttattaaaaaatggcaattactttatttttttaatattcgctcattttattaatgatcgatcagagctattcattcgtttattatatttaaaaattgggctgtttgggatgtgttttatgtaaatgattaaaaatatttagccttcaaaatcaattaattagcttaaaataatagaaataaaaaaaaactataaaaagatgattttcaattatataacgggaaaattatgtgaaattt

SEQ ID NO: 22006 - DNA, 308 bp, Heterodera glycines
tgcggacatctacattatttgaattgaaaaaaaattggtaattactctttctttttctccatattcaaccactcataactcatacatcccacccacacctctttcttctttccggccacgccacactaccccgcgactacagcagccgtctaccccatctcccatttcgatgcctcccttcttcttggataagattataagacatgcaagagcgggcaagcgacaatctgatccccatcaagctagcttctgcaggtcctgctcgagcggtcgcccggggatcgatccccgatctagtaacataaatg

SEQ ID NO: 22007 - DNA, 1274 bp, Heterodera glycines
  unsure (1)..(1274): unsure at all n locations
ccgatcagagcagttgaacaatttntggtcattgggaagcaatcgggataagagacgacccgacagacgacgcggatgcgcaagcagtgatacaattcgaacgatcagtgcgccaactcaacgacgggcgctactccattcgattgccatggtgggagtgccaccccgctttgcccaccaatttcagcatggcctatcgacggctaacgacaatgcttcaacggctgcagaagactcccgaggtgctcaagctgtacaccacagtgatcaccgatcagctcaatgcagcaataatcgaggaaacgacgatcggagctggtaaacacgaacacttcatccctcaccaagcagtgatcacgcctaaaaagttgcgggtcgtctacgatgcgagcgcacacacacgaggggcaccttccctcaacgactgcctactcagaggcccagtttggctgccggatttggccggcatgctcattcggttccgagcatgccgagtaccagtgatcgccgatgtcgagaaagcatttctcatggtcgggattgaagaggacgacagagatgtgtgcaaatttttgtgggtgcgcgacccatttcggccagtgacaacggacaatttggtgacataccgatttcgacgcctcgcatttgggctcacgccaagccccttttgtctcgccgcagttgtacgacaccatctgcgcaaatacgactccaacttcgcggaagaactcattcgggacacatacgtggataatgtgctcatcccggcggacactgcggaagaagcagccattaaaggacgagaagcgaaacgaatgtttgcggacgcgaggatgaaccttcgggaattcttgagcaatgacgagacactcaacagcagcttttcggacgcggaattcctcggcaagacgacggccaaagtcttgggactcgaatggaatgcggagacggacaaaatacgaatgaagtaccccgggagcgaacccggcactccgatcagcaccacacgcagaacggtgctgagcagcgtcgccagcctgttcgnacccgctcggcttggtctgcccggcgaccccagggggcgaagctgttcttccanaagcctgtgggacgacaaccacgaatgggacactcctttgtcccgggaggaagctcgagaatgggagcacttttggcaaagtgggaagggggaaagtaatctgattcctcgagggcgtactgcggggcaggggtcacccgcttcaactgcatgtgttcacggatgcatcgggaat

SEQ ID NO: 22008 - DNA, 906 bp, Heterodera glycines
tcaaacaggtgtttatggagaagaaatttttattttaccccaccaaattactcaaaaaatagacttaatttggtcttaattaatttttttccattttcggggtttggattagttaattgaggattgaccgcgatggggggaaaggaatggatatttgacgaataatttttggtctatctctgggatttatgcgcttttaaaaactttttcgccccgtgtgaatggtctgctgaaaagaggtgggatcgaattctggcattttatttttggcctgaattccaaatgcgtgaaaaattttgagcatccggtcccatatttgtcgaaaatatttgtataaaattttttttttaaattcgctgaaaatttctaccctttttcaacccaaaaacaacaaaccaattgcaggttctgtccgcgaatgcggaagcgtttgcgcaagtggagtgtgtgtttgaggaccgcgacttccgcgtcaaagtcactcgggacgagttggaggcgatgttccgcgactttgaacagcgtcacatggaacccatcaatgttgctttgacaatggcacaactgacgctggacaaattggaccgtgttgtgttgatgggtgccggcacacggatgccacgcctacagaccgtcctcgacatattcctccaggggttggcaaaaaaaaaaaaaatttttttttattgttgacatggaaatggaaatccttacccgagctgtaaattggaaaatgcatatgtgttacaccatactattggatagagcagggttgatttgtacaccaatttttttgaaaaaaaaattctgagggcctccctttttacattcgaatttccaactcattgtcagctttttcaaataaaaaagagatcaacatttagtagaaaaaagacctaatatttc

SEQ ID NO: 22009 - DNA, 385 bp, Heterodera glycines
aaaaaaaaaaaaaaaaaaaaaaaaaaattttttttttttttttttttttgttgggttgggggggggaaggaaaaaacaaaaaaaaaaaaaaaaaaaaaaaaaaaatccctctcctcctcttctcttttcttttttttttttttattttataaaaaaaaaagggggggggggggggggggggggggggggggggggggaggggagaaaaaaaaaaaaaaaaaaaaaaaaaaaaatatttctttttttttttttttttttttttttttttttttttttttttttttccctccccccccccccccccccccgggggggggggggggggggggggtgttttttttttttttttttttttttcccccccccccccccccccccccaaaaa

SEQ ID NO: 22010 - DNA, 1260 bp, Heterodera glycines
cccatttttccgttcccaactggccaaaggcgactgcctacttgtgaccgtagttgtccaataaggtacttggactttcctagtaaaatgtggtacaaaattttggaactgtcccgcctcacggcggggcttaaaagcattgtacagcgtaattaaaagctaaaataattttcgtatatttttcacaatttatttcaaaaagccaaaaaaaatgattcaattttgaaacgaaatagtgcacaaaagggagggatggttagacgaaaagaggaatttttagaaaagagcgcaccccatctgatattcccatttttccgttccacaactggccaaaggcgactgtgctcattgacacgtagttgtccaataaggtacttggactttccacagtaaaatgtggtacaaaattttggaactgtcccgcctcacggcggggcttaaaagcattgtactgcataattaaaaccgaaaataattttcgtatatttttcacaatttatttcaaaagacaaaaaaaatgattcaattttgaaacgaaatagtgcacaaaagggagggatggttagacgaaaagaggaatttttagaaaagagcgcccccatctgatattcccatttttccgttccacaactggccaaaggcgactgtgctcattgacacgtagttgtccaataaggtacttggactttccacagtaaaatgtggtacaaaattttggaactgtcccgcctcacggcggggcttaaaagcattgtactgcataattaaaagctaaaataattttcgtatatttttcacaatttatttcaaaaagccaaaaagtccggaaccaattttaaaaactaaaatagtgcacaaaaggggagccgccgcacggcggggcttaaaagcattgtacagcataattaaaaccgaaaataattttcgtatatttttcacaatttatttcaaaaagccaaaaaaaatgattcaattttgaaacgaaatagtgcacaaaagggagggatggttagacgaaaagaggaatttttagaaaagagcgcaccccatctgatattcccatttttccgttccacaactggccaaaggcgactgtgctcattgacacgtagttgtccaataaggtacttggactttccacagtaaaatgtggtacaaaattttggaactgtcccgcctcacggcggggcttaaaagcattgtactgcataattaaaaccgaaaataattttcgtatatttttcacaatttatttcaaaa

SEQ ID NO: 22011 - DNA, 1651 bp, Heterodera glycines
gggtaggcggacgaggagttcgagcagtacaatgataagccttccttaggttggattgtccatttagcccaccatttcttcggtgtccgttttgcgttggtccgctcgtccattccgtgctgatccgtcgtggcgatctgagcagcggcgacccgcgccatggcgtcgtctcctgcgctgtcgttctgcgttggatgggaatcactcgttcctcgggtcggcccctctgctccttcagcattatcggatgcacagcccattcgtccgcccttcggcgttcttcctcctccaatttggcgtctcttcgtggtccgacgatgatgttctccttctcctccatgttcttgcccaacaaagtgccatatccgtgcaaataattaaccaatcgctcattacggccccataacggagtcaccgatggctttgacacgggcggaacggacggtggcggaggaggcggaggacgtaacggatggacgcgggagggaagcggaagatgggaacgaagcggaggaagggactgttgctgctgctggtgatgggggagttgtgccgtggtcggaggaagggaggggaggggcagaggctgagaatggcgatgggcttcttctctctcctcccgctgcattccgttccgcaacttttgctgaaccatcggcggcggtggtggcggaagttcgtccctttcgtcgtccaattcgacggatgatgaggtggaagactgtctaatgggaggaggtgccatagagtcggtgagtgtgccttggtcgcgtcactctcgcgcacctttcgtgccgttcccacccttctccgccggcgggtgtcgtcgtcgccctttgcgccgccgttgggtccctccgcccctccggcgttgttccccccattgcccccctccctttgccctgggcgtttcctcctcttcctcccccatggcccttttgtgtgccgcgattaaactcgccgccattaaactctcgtccaattgcgggtccgaacagatggaatggtccaattgctccgattcactgaaagggcggcacaattaaaaatgggaggaaaagcattgtgaaaggcacaaaatcataagcattttgaaaattgttttgtttcatttatttatgttgcgcatttgtgtgatcatttgtccgcttaccgacttctgtcgagattaattgacatcgacggggaacggacgccgtactcacttagaaaatggatgattatttattttcaataatcttgacgaacttttctttaggacttttaaatatttgattcaatttatcgcgatcggctgccaaccgaagggaagggaaaacgccgcctgagggggcggacgacggacacccaaatggaagggggagggggagagagatccaaaagataagggcaaagggaggggggaggaaacgagttccatcggagggacggggggcttcgaatcattaagggcaaattaaaataaacaaagggcacaacggacggacgtacaattattacaattagtgactggctaatcatcctcccaacttgccttttttggcatttccttttcttttttttgtcattccaccctcacttttttatttgattcatttgactaactaatttaccgaatttgccattctccgccccctttacatcggcggag

SEQ ID NO: 22012 - DNA, 2589 bp, Heterodera glycines
ttcattggtaaattccgatttccaaggaattcaagacgcaatgcccagatccaaggatatacttataatccgaggactaatgtgaggccgcttgcttaaaattgacaatcaaaaattaaaataatttaagacttttttaattcagcggaaaaaactatgaaacaagacgaactcctcgcaaattttctcagcagccctctaccaccattgccaccaagaaaaaattcatcaacgaatacccgaaagagcacatcggtcaatgatcaacatgaaacgaactttcacaaacaatttggtcaaaatatttttaacagtaaggacggatcaactgaatctgaaaaacgatctaatcagcagacaaaaaaaaatccaattagcatatatggacgagaaggacaagaagtttccggcaaccaaagtgatcagaatactaaaaagacatcatctgataagcaaaggaacgaaaagaataaagacatttcatttgctaagaaagtagtcaaatatttatctgggcattcatctgacacccagaaagatcaaaagccaaaaaatggcaagaacgaagctggatcaactggaaagaatactaatcagtcgaatgatgtcccttctataaataaccagcgtgatcaaatttctcaaaaagcaaccaatgatttatatggacaaccatctgaaaccccaagttatcaaaagaaagcaaatcgcatgaacggagccggaccatcggagaagaaaagcgatcagaatgacaaaagcgagctgaatgaagggacaccatcagaaaatcaaattgacaaaaccaaaacaaatcgcttgttaaaagcaaaagaaattttgccctttcaacagaaagagtagatacatttattagggatgtgtgagaaatgaatttttaccgagaattgagaaatgacaccgagaaacaagaccgagaagtgaaaaaaccgagaaatttctcgagtcgcgaacctagaaatctttatgaaactaatttaaatgtaattttttaaagttaaaaacacacaaaggggttgggtcaatcggaattctgtgaaggagtctcaacatcaaattgacgaccttttatgcgtttaaaaactcttaaaaaatgccaattattgtgatttcgagccagtttatttttaaatgaaaaacaggatttttaggattcaggcagtgccgataggctcgccgtctgggaaaaattggaaatttgaccctttttaacagattttcaccgaaaatagcaattttaggtcaaattttgaaatttagatgaattttggggaccggcagtgcttatatgcgcagacggaagaaattttttgggatttttattgaattttgttagttcaaaatttcaataatttgacctctttacccccttctctggcgaccctcgcccgcaaaaaatttcttggtttccgagactaaaaaccctggaccgagaccgagaaccggaaaaccctagaaatttctctaatatagaactgagactctcgcacatccctaacatttattaacattgttgattatttggacagggctcccatttgttaggctttagccttgaggcttttttcctggtcaaattaaaaaaagagcttgttcttgctttttaaatgcaaatttaatagaaatttttaaattatcgaaaatgcgctacaacctgctaacaaagcaggcaaattattcaaaacacttaaatggcgcatttaaaactttcatctggaagcctttttattttgtgtatacatattttggcactttcctatctttcctttttattttttattttctttattcgtctacctcacatttatatttattattcgttgatttttttatttatgataaaaaaatgtaaattacttgacaacaatggatgagtgagtttaaagagaagttttaatttaaattgacagatgtttctaaagaaatatcagacaaattcttcagttatatataagcaatggctttcagcattaataattatttggggttttccgataatgaattttaaagaaaaaaagaaagcagtctgaaatatgttgtaatccaataaagaaatgttgaaatgttaattgaatcacagataatgatgcgcttttattcggtctcaattttttagatgtgtttacaacataatcattggcttatggcaatcttaaaaatgatttcataaatcttaatatatatttgttaactaactaaccttttcctttttttctctatacttatgcgtttttgtgcatttttctatgcatattctatctattcatgaattattataccccgatttttgagccattacattttttagggaactggggccaatcacaattacgaacgacaaacaacaaaacggacgacaaacgacatatttggcatttgtctccaaatttgtcgttacgacaaaaaatatttcgtttgtcgtttgaataagtcgtttttccgtttttcgtttgtctctgtcgtgtgaattgtcgtcaaatcataattgacaaaatctaccgtaaatttgtcgtttgtcgtcacttttcttaggaattaaccaatatttctcaagaaaatgtaaaaaaa

SEQ ID NO: 22013 - DNA, 2725 bp, Heterodera glycines
  unsure (1)..(2725): unsure at all n locations
tcgcccgtcacagcgatgcttttcggtccaacagtacttttttgacatttccgggcacctcaacaaataagagtaaatcaatntaacnactcatatttcgatagtttccatagctttcattgattcttacgttggatttccgcattcctttcaacaaattttgctttgcttcagtgaaattttgctcgtccaacgaccccttatcgtccggttgccgcatcttcattaaaatctgttcaaattccttccgagttttgaatgaagtaatatcaggaaacaaagctttgtcattggcttttgtctggctacaaaaaatgcattattttttacaattaaaggatttttggaagcgataattaaatttgtgcatccctccatttttgcaatttttttcgtttataagtcttgaaattcgtttccggtagtttcgctttttcgatttagtatttgcataagcagcgacacagaaaccgcaagaaaacatataattttttttgtcaaaaaagggagaactttttaacatttagtgaaattttgacctttttcgccatatgtcaatcgctttaagataaagaagcaaaaagggagtgtgtgagtgctgctcatgggtcatcgattcgaggttagtttcattggccaattgaagcagttcgggaaatgggaagtccaacctagtgaaaggaaggtatgttaataattagtggtcgagagttgcaaaaaatacccctccccaaactttagaaaatttatctaaaaatcgaagtaaacgatgagaaggggcaaccgtaccttcccactccccatagcattatgcttaccgcaagtcataagcagcattttctgcatgattttcaaaaatgtaatgttcccgaaaggacagtcgcaaatgacccatcattccacaaacgttggcatatacaaaaggaatggcatgctcaaaaagaaattggtccagctgacgcgcttcgttagcagttagactggtgccaatcaccagcgaaaattgcagaagcatttggaagtcctgtcgtttgaattccccgaaagaaattggatgatgctgaccgtgcacagaatggtttaattcctttaaaaacaaacacttaaatggattatatttatccaaaaaataagcaccttcaaagccttgacgagacattcggcacggctcgaacccaaagaaccctcttcaacaaaaaagttctgcccaaaatcagcgtggtccaccaacgccttgtcaattatatggaaagaaccgatgccagcaaggacgagactcttgagcgtttctgcagccaatgagttggagccaaacacacaaacacgcgcttgttggattgacaattgaccatcatcgccccaaaggcgaatttgcctgtcatatcttttttgttgctgatccatcaaagaagtttcattatccatttttttgcttaaaatacgaaaaataaaattgcaattgcaccatttatgggaaataaaaagtgaaaacgaaacttccaagaaataaaaacaaaacaatcataaatgtttgttttttttaatttggccgataataaataaaggcgcttaagcataaataacaaatcagtgaggctctggaacatggccatcgacataaaaattcctcgtgattttcgggagtgtcactctgatgccctccaaatctttgtttagaataatctgacaggagagcctcgagttgggcttcagcaatggggccatgtcgagcatgtcttcttcatcttccactgcagctggcaatttgtcgtagtatttttcatccacataaacatgacaagtgcaacacgccaacgatgcctcacaagctccctcaatttcaatgttatacctaaaaaaaagatgagctaattaccttattcaagagtaccggtgagcaagatacatggcattgtcgccgacttttccacgtatttttttctccgttccatctcttgtcacgtaggttatgttgaccacttcttcttccgacttagggtcttcgtattcgaaatcacccgataacattttcaacgtgtggacagtttctgggtgtttagtgtaataaatggaaacaaagaccgcttcaacagtgtttcagaaaagaacgctcgcaaaggaagcattgaattttaacaaaaatctagattaaagcatttaagcaggattgggattagtcttagatcaaatgacgtccttggatctggaccacaccaaatggaaaacaaaactgtctggatttgaccgttttaaaagattacataaagtgcccattttattcatttttcgaatttgaaccttttaacacagagtccagaaaatgaacacctgcatcaaaaatttctttgatgtgtagatgtggttttttgtaagatagtaaatggaaagggggtgaaagttcgtcggtaatactatacacagcggcccaattttgggctccaagtacaaatatgctgggtttttcgtcttagtggtctgtgagttagtcaacaaaaagggggtctcaagttcaattcctccttgtgtttgtgtataaatttcaattttttaaagcaaataaataaaataataataaatacagaacgccaaaagaacaaatacaaacagtaaaaggtacacactatattttacccttgattttatgaaatttttttagcttataacttggccaataatagaccaaaaaagaccattttgtgctcattttgaagggaaaattctgaag

SEQ ID NO: 22014 - DNA, 2197 bp, Heterodera glycines
ctgttccgaaatggctttcggccggcgcccatatgcccgaaaataatcagcggatgatcaacggcaatttggcgaaattttttgtttatccaatagtccatccggcgcagatggaccaccgtgtcgtcgtccaccttggccacccattcgacaccggcacagtgccgttgttgccaagtcagggcaccgaaccactgcaaaaatgtttatagggaaatgtaaatcagacatatttaatttgtcaaagaattgtcaaaataaatgctttttttctccgtttctatcatttgaaaacagattaattattattaattaattaaataattgtcatttgctgatcactttgagatgtaaatgcttgtacttatccacaaaaccgtgcaaaaacacaatgtctccatgctttttctgctcttcttttaatttttgttttacatctgccgcttctcctcccgatgggtcggcgataaaaaatcgttgtatttcgcccggggcctaattaaatgcaagtttatatttatccaatccaaaaaaaaattaatgtcaattttgctcaaattttaaattcaaataagtgcagcccgttctttttcgttatattctttaattatgatcaaatttttttttaattgaatatttcaattatttttttctcactattaatttattcgacatttctcattaattgaattccttaaaattcaaaattgattaacccaattaaataatttacacaacgtgtttcatcaataaaatgatgaaaccaacttaattagtgctttaaattgtttcccccgttatttcgccaataaattattaaattaataataataaaatcaattaaattgttccctaccgcttctttcatccatgtctctctcgcgcccgttcgcctctcaaatgagtccctgcccgacattgccaacatgatcagcttggtgccagacgcacatttattgccaatttccattgaacagttcatgcgaatgtttttgaagagaattgcaaatttctaaaaagtacgctacagcatttctagaactgaccaaaactgtaaacaagtccaaaaaatattaaattaaaatattaaatttaaatgcaaaaaacaaaataataattttaacaaaaatcgtaaaaatggcaaaggtagttaacaaattttattatttttccgtttttgccatttttatacaaaaaagtaaccacctcagttggaacaaatgcagttttgttggcaatctgcttcacaagcgggtcagccagaagctgcattttgccttggacctgtaaacaattcaaaattgacacaaaaaacatgtctaaaagtcccgtgactttcgataatttcatggatattctgcaattagtcttcgacacccaaaaagctgttctcgcccattggcttcaccttgatccaactgatagcccccaatggcattttgacatcggttggacaaataaattctccaaattgtgtgccattcaatttgagcataatagaacagtgctcgttaagcacgatgtccaaattgagcaggtaactgcctgggggcagccgtacgcctttgcctggcattgactttgactgaaacataaaaaatattcaaatggtgataatttaataaattaattattactccggggaatgctacttcaaaatcactgtcagtgccaattttgaagctcacttcagtttgtgttgaaccatctaaaaataattttgtcaaaattcataaattaataaaataatgccaatgtttcatttaccacttttggcattcaaaagttccaccaaaatgcttttaaagttggcatcggttaatgcttttatgctgatcatttgcgactgattcctgctgttgacgaatttgatcggaaaattttggtcagtgtattttggaatcgacgaaattgaatccaaagattggaaaaactaaaagaaatcatcaaaaattggaacattgtgtcagtattagcccattctcagaaaaattaaaacaaattgcagaattaatggtacagcaattttagttgaaaagattttttgttaattttattaattagttatccatgctaaatccatttttaaatatcatttgcaaacattatttactcattctttgacaattaaaattatcccatgctttgtctactaattaccattcttttgttaattaattcattctcatgctttgtt

SEQ ID NO: 22015 - DNA, 2367 bp, Heterodera glycines
  unsure (1)..(2367): unsure at all n locations
atcccacacatcgagctcgaggcggcgctgcgatccgcctacagagttacccatgtctaccgtgcgtacgtctggccgctgtattgtgactggagtaacggcctcttccactcctacctcaacaaattcctgcgcatcaaatttgagggtaagtagtaaattgatcaatcaatcaattaatcaataatcatttagccagcggtttccctgctgactgtgccgctgatgacattgacgaggaggagagggagcgcagaaagcagcaatacatcaacaacccctggaagggctgtacggtgcggctcgacgcaaacaacatcaagccgaatccgggcatgcggtacctttcgaagctgtgcctcaactcgctgtggggccgctttgcgttgcggaatcggctgacgaagacggaaatcatcgactgccacgccgacctggcgaagcttctgaacgacgtcaaaatcgacatcagcagcatcgaccaactgacggagaaattctggatggtgtgctacaaggcgaaggatgagcacgtggtggagcacgacaccagcaacgtcgccattgccctatggactacggcagcggccagagtgcacttgctcaactcactgcaattggtctacaggcaggaaaatctggttcagcgctacgacacgcgcattttatacatggtaagagtgtgacaataaaatattcataataaaatatttttttttcaggacaccgacagtatcttctacgacttcaagactgcactgggagacccgctgaagggaggcaacaagcttggggagctcgcggacgagtaccacagccataccatcgtcgagttcatctgtggtaaggactttgtccaaaataatttgaataaatttcaatcgatttttagctggacccaaggcctacgctctttggcttcggaacaacgcaaccggcgaggacgagtacaagctgaagctgcgaggcatcacgctggactcgaacgcctgcacccgcatcaactttgagaagatgaaagaaatggtgctggagaagtggggcacgcccggcaaccatgtgcggttcgactaccctacgaagaacttccgaatcacgaagcagggcgacattctgacggtgcccatcaccaagcagttcaaccccaccgtgaataagggggtgctccgggaccgtgggcttaaggttgtcccctttgggtatagctcatgggagtactgtaaggcccataacccctacgattgtctctgtaagcgcgaataatttattcattttgtacttttatttttcaaaatcctcatctgtgacccaatatttttccggaaatccgataaatttcaccaatatttccttttttccatccctcattcgttctttgtactttttctcgatcctatacattgtgttttcgtccacttgtacttttgttagctctggcaaataaaactttctctttaattttgtgccataatagtccttgagcaaatagtgcaagggtttggttgtgcgagccgcatcaacggtgtacacatggtcagaatagttgggaatatagccttaagcacaaaaaaaaatacagaaaaaaaaatgaaggagtcactgtacccttctcgaatatgtgtttgagctctgggattctgacagtttctcccgctttgatctttggtctcttctccgctggtacaagtccttcgccatagaccctcttccacacctctctcgcattgacgtcactgatttcgtttggcctaagtctgcgcggcacacagaattgttaattgcagacaaaaacttgggcaacacatccacccacgcagaggtgtttttggcagagaaatatttgtacagccgagtcttcaccgtacggatggctctctctgcgacggcagccttcttctttgagctggtctcatacttcttaatgccattctcagcgaagaactccttcatgggcttggccacaaactccagcccacggtccgtgtacagtgtttccggaagccttggcatttggcccaacacctcctcaaatgcccttttaacgtccgccggcctcttactctttacgggtgagccgaacatacgccgcgacaacacatccaccgccaacagtaggtaccgatagccgctgttctttcgcgaaagggcttggaagtcagccaagtccgcctgaacgtctgagccgatcacgtgaatttaacgtggacaaactcaccggtcatgaaccccgtaggcacagtgcgaaggcgtcggaacttctccctcnttggttaaacagcgtgtaggtggtgttcgctgncaaaggcatcaagtncgtctcttcagttttgggtgcttctcttgacgctgcatgagtgcactcgcacc

SEQ ID NO: 22016 - DNA, 2091 bp, Heterodera glycines
tttttttcaaaaatttcttttaaaccaaatttggggaattttttttcacacttcgagtggtgagaactttatttcccccaattttgtttttttccgcgagaaatttttttctttgagattttttttgtaagccaaagaaatgacaactgcttaaaactcgaaaaagtagtgaatttcccagattatcaagaattttcttgcttttctaatgttttaaaaaaatttttttttttaattttttggcttactgctaggagaaaaaacattttttagtgctcactgatgccgacgggatggcccgtgattttgtagtcgtacatgttgatcttgatcatacgatcgcgcatttcctccgacggaattattgcggacgaaatggtgtcgaagcgttgcttgtcaaaaatctcatcgggcaccttaaatttttatttttcatttatttttttttgtattaaatttagaggcaaattttttttatattggatatttcaaaataaaaatttgaagttctttataaattactttctttgttaataaaaaactcggcacggcaaatttattaataactttttcatttttttttgtaaaaaataaggaagactaggcgtttaaaatgtttggccaaacgacaatcgctcgaatttaaaaataaaatcttttccgttttctaaatattccatgaaaaaatagtttatttggtgaaattcataccaacaaagtttctgggcaacgtttatattttgccggagcaggttcttccccctcgaaatttttttaaagattccaatgaattactactattttccaaaaaactttcaaaaaaaaccctgcaaaaatttgtaacctttttcttaaaattacttatagaaaaattttgaatatttttttcacgccacacattcacttgatagcgtatcacacgtccaatgtcgttgtcaaactcggcataaatgatgctgcacagcttgggcggctcctggctgaagaagtgccgactgcaccgcttctgctgtcgttggggtcgctgctgttgctcctgctgttgttggtagtgccggctgtgttgtcgtccatgtccatcatgttcatctccatcaacatttccgtggcgtgccccgtcatgttcgtcttcgcccccactgccactgttgctcctggttgtctccgccggcaaagcttcctcaaatgacgaagccggtgatgccgtcgccgccctctccccatgcccgtcgaaatgtgcagtcgtcgccgtttccactcctcccacggcattgtccacagggtttgatgtcaaagatggcacgtgtttttgttgctgctggggattattgtccgtttgctgttcctccacgcccatctccatgttttctggtaaaaatatgtgatatatagaaatcgcggattcaaaaaataaaaaatattttccctcgactctaaaaattttcacttttttttatttcctgatttgcagatttttgtaaaatttattttatattttttctgaaaaattatatatttctcaggttataaaagtgctttaacaggaaatcccgggcacttttcttttagcagctgaatatacattaattgtaaattgtgtacattacacaccaacaattgcgctgctcctagaggtgtttgagtctgttgggccgatgttgcgaaaactgacgaaattggagcaacggctcactttggtaaggcgcaatggacggctttctgtttgttggatgggattaaattaaaggaaaagttagcgccgtatttagaatttttaaagaaattttagaaaaaatcctatttgtaaaaaaaaattttttctgtatttattttatgaaaaattggccaccaccttttttgcggacgcgcgaacggaggttttgtccaaatgcgaaaataggcggagagaacggccaacagaacgccaaacagagagccaaagtgtgagcagaggggccacgcttgccaccttaaatggcaaaaaataattaggtaacaaatcattccaatattctaatctacccgcgaatgacgaacctttactttttcagcaaaatattttgaaaatgtcgcagggaatttaatggtaaa

SEQ ID NO: 22017 - DNA, 1074 bp, Heterodera glycines
aaatctgggcgcatcggttcggggggactgccccgacaagggggcccccggaaaacaaaaaaaatttttggctccaaattttggcaaaatccaaaaaaaacgtaggagtcgaagggaggtccccataaattctgggcgcatttcggggggacgaaacaaaaaaaaatcgattttttcaagtgtccgtttggggtactcaaacaattatggggagcaaaaatccaacgcagaattaaagtacaggctatagggaagctattccggaaggattcggtctccccataaatctgggcgcatcggttcggggggactgccccgaaaacaaaaaaatcgattttttcaagtgtccgtttggggtactcaaacaattatggggagcaaaaatccaacgcagaattaaagtacaggctatagggaagctattcccgaaggattcggtctccccataaatctgggcgcatcggttcggggggactgccccgaaaacaaaaaaatcgattttttcaagtgtccgtttggggtactcaaacaattatggggagcaaaaatccaacgcagaattaaagtacaggctatagggaagctattcccgaaggattcggtctccccataaatctgggcgcatcggttcggggggactgccccgaaaacaaaaaaaatcgattttttcaagtgtccgtttggggtactcaaacaattatggggagcaaaaatccaacgcagaattaaagtacaggctatagtgaagctattccggaaggattcggtctccccataaatctgggcgcatcggttcagggggactgccccgaaaacaaaaaaaaagattttttcaagggtccgtttgggggactcaaacaattatggggagcaaaaatccaacgcagaattaaagtacaggctatagggaagctattcccgaaggattcggtctccccataaatctgggcgcatcggttcggggggactgccccgaaaaaaaaaaaaaaatttttttaagagtgcgtttgggggcttcaacaattatgggggacgaaaatccaacgcaaaattaaagtaaagggtttaggggaa

SEQ ID NO: 22018 - DNA, 2147 bp, Heterodera glycines
aattgagaaagcacaaaaagagaaaaatggacaatcgaataaactgcgttgagctggctgcttcagtgtctgttctgcgttttggcttgcgattcgctttttgtcctccgtcagaccgttcgataattgactagtcattttccaatcacttccgatcagtcattaatcactctttctgatcactcactgctgatcactctctgagaatttttttcaagcactgatcaatcccaatcgcttttccgtccactcactttcgcttcactcactgcacgccctcctcagttcgtcgcgactctcttccggcgaaacattcaatgaacaaaaaggcgccggagggcatggcaccggcataaaatattgttgttgtcgctgatgaagttggccaaaggaatggtcagaaaggcactgctccaacagatggacggcgtcggcacggcccaaaacgcgcaaatgctgcaaaaggtcgagaagggcacgctcggagccggcatggatggcctcccacagatcgagcagagtcagcgcggggcatagctcagtctcaattacctgctaatggacgatgaataaccaaccactcatagagcagcactttatgtcccagactttgtctctctctctctttttgtttatgccattcgccgcattagcctatcggcttaaaccaatggctttacctcgtgcatgaaaaacaatctcttacgtccgacattcgctgacaccttgcgtttgacgtcaccccccttatcccaggaatttttagggttttactctgcccggcttttctacctgaacgtggccacaaaggcccaatttgtccgcaagtgctctccagtctggcatgccctgctccaaaacattggccagtttgactcggatggctgctgtcagctggaactgtgtggagatgagagtgtccgtgccgaaggcgctcagtcgggacaaagacgagtcatcgcggcccatctgaggaccaaaaagagtcaatgccaaagtcagtgagtgatgccaacagagatcaatcattcgttggttggcatttgctttgtttgctcacccttttgccaaaaaggttcgggtcatccgcgtccacagcaaaagaaagcacttgacggtcagctgcgttgcccttttggtacagaacgatgcgtccggacagcgaacgcggaagtgccggggagggggcggacgacggcacgccggacacaatcagttggaagtgcaatccgttctgagcacaccaccgatgcacgtggtccggaatctcctgaacacgagaatttgagagatatgtgagagtctttaggttccaggtttttttgtatattggtctcttttcccggcggggctttggtttcgatccctccgatatttgaggatttatcatccttattggcttttgctagaacgatgaagatttttttagaattgaggatttcggtattttaggggtttgtggatttaaaatagccaaaatgtgttaactgttcgactgaaaattccaaagtttttcctggcggctcctatcagtggctcctctcctcaccaagtactggctgcccccgttggggtggccttcaccccccggggaacgcaatttgctcaaggcaacagcacaacggccctttgagcgccagcagaaaattgtgcgtttcggccagtaaaagtccgcccaactgctgctcctcctgctgccgaacattctgcacacccatcgcagtgtcgaggacgcaatagacgcgaagttgggccaactcagccgaaccgatgggcaccgggtcgtacgcattggcacagtccgcggggggcgcgacgggacgatggaagggcgccgcaggcggagtccaataggcacagagacggacctttgaaatgccatcccaacttatccatcaacatggcacacccttgctaattactcacccgtttctgtgcagtcgcgtgtgcccttctcggccttccggtcaacatgaactttccgctcctccgcgtcagcaaatgccactgttggcgttccatctggacaccaaattgactgtccgaacagcttccgtcgtccgattgccacacgcattgccaagcctcggcggaagtgccatcgccagtggttagttgggcgtgcagagagaagtgccagcaatgct

SEQ ID NO: 22019 - DNA, 1029 bp, Heterodera glycines
tcgtatgcaataaaaagaaatttattcaaatagctttgttgtctcgactttattcaatttaattaatagaagatcagtaatttttgcaaaaatttaaaaaaaattacatttgattttttttcaaataaaaatttaagtataatttggttttaattaaaaatcaaaaacaacagaaaattaaacttaaaataaagcagtcaaaaattttgaaactaatttgttttcatttttctcaataactaaatatttaatgaattttgaaaattacgtggttggttgatttaaaacaaagttcaaatcaaaaagtgtgaaaatcaaaaatctgacttttcctatgatttttttatcaataagagttcagtttttgcattttgaataaaaaataattacatttatttaatgttaaataaaaccatcggccagtttaatttgaattttgaaatattatggaaaggttaaatttcaaatggactaaaactaaaaattaacccaattgtaaaactgatatctaaggcatcccttcaactccagctaaaagtaagatgaacattaaatttgtcaaagtttttttctcaaaaaagatttaaaaatggtgggataaattgtggatcaacgccgtcattctcgcgcgttattgaggtgtactaagttttctctctctctctcttcgctctctctcttctctctctctctcttcctctctcttctctctctctcttcccctctcttctctctctctctctacctctctctctcttcctctctcttctcttctctctctctcttcctctctcttctcttcctctctctcttctttctctctcttctctctctcttcctctctctcgctctctctctttctctctcttccctctctctctttctctctctttctctctcttcctctctcttctctctctctcttcccctctcttctctctctctctctacctctctctctcttcctctcctctctcttctctctctctcctcctctctcttctcttcctctctctcttctttctctct

SEQ ID NO: 22020 - DNA, 1739 bp, Heterodera glycines
  unsure (1)..(1739): unsure at all n locations
atatttttcgtattttttgtcgattttcattcgtctcaactgcttaactcataaaaatcacattatatgaatttaattttgattacccaacccttcaaaaaattttttttttttcttagacaattaaatagtgtggtccgcaaaagtcggctaaccgtttacaacccttatggtaccgaaatattttgcttgcccaatgtcaatatcaatttctgatttgaggtcggattttgcaccaaaattgccaaatgtgaatttaggcacaattttaaaaacatcccttttttgtcgggctttaccgataggcggaaaattggaaatttgactcgttttaataaaagattcatgtccaaaatggccatttttctggattttaggctagtttttttaaattaaatttaaggcaatttgttgccactgaaataatttcatatttaaaaataattattatgcattttgcaaaaacttcattgctttaattggttacctatcatttcgtcactgatcattccgtcactgagaaataatttttaaaaaatgttggcaaaatgtcattaggtatgtaaattattttcattaaataaaatattttttatttcggaaacggttattaaataattatgttgaaaatataatctgcatttaaattattatttcatatttcaaaatatttttaaaattatttgttacatgcgatggaatacatgcacaaatgagtgcgaattggccagtacagtttgatttgggctttagacagctccacgtggttttagccaaatttttaccatacacgcagtcgttgaattgttaaaatattttgtgctgacgtatattgggccatcatatgttcttgcacatcctcaaattaatgccggagaacaagagggagattatgggggcaagggtgcgacggatggctgcgtgcttgggttcaatacgaaaatttgggacaaaggaacgctctgtttcaagtgaggctaatttaggcattttcgtgcatatattttagcaagtttgttaaaaggatgctaaaagaatttcagcggtggcaacacatcgttgctgattattagagaccgactaaaaaggcactaataatcgcaaaaaaggcactataaatggcacgaaaatcccgaaaaagtcatgaaaaaaaggcattcgaaattttgttattaaggatttttagggcgcaaaacatgtaaaacttaaccaaataacttaattttggtcatttagatgattattttcgaataagaaaatttttaaacctaaaatttgttatcaagaaaaaaatgaaattttggcgatcaatttttgagaaaattttttaattcttaggggtgtattttcagaaaaattttcgttttaggggtgtattttctgaaaatttttcaattcttgggggtgtattttctgaaaatttttcaattcttaggcgtttattttctgaaaatttttcaattcttaggggtgtattttctgaaaatttttcaattcttaggggtgtattttttgaaaatttttcaattcttaggtgttattttcccgattttattgcattttttatggaatttttcggaaaaaacgcaaaaaaggcaccaaaagggaaaaaagccaaaaaaggcattaaggcacgaaaatcccgtaaaagcaaaaaaaaggcataataaaagtcaacgtagaagcctcaatctcagtggaanatgcgttatttatacttaatatgtcgaaactagtgc

SEQ ID NO: 22021 - DNA, 3213 bp, Heterodera glycines
aagactttacgaagaggcaataaaacatgactcttcgatcacaagaaaagacgttgaacactttctcgagggagacagaacatatactttacataaacctaggcgtgttaggtttaagaggtcacgaactgtgcctgctggattcatgactgatgttcaggttgacttggcagattttcaaaaattatcacgaaaaaataaaggattcaattatatattgttgggtattgatgtgttgagtaagagggtttttgctgcacctgtaaagacaaagaaaattatagatatgaaagaagcgtttgacaaattgataagtcaaatgccgatggttcctcatagaatattttcagatagaggaacagaatttgaaaatagagaaatacataaatatttccaagagaagaacatacaaaagcacaaggctcatactagtacggtgaaggctgcgctagccgaacggtgcataagaacgcttaaacaacgactatatcgttattttagtcaaaaacatacaatcaaatgggttgacgttttgccaaaaattgtaaatgctttgaataactcaaaatcacgtattacaggtatgaaaccagttgatattaacccgggtaatgctcaaaaaatttggaaaagagtctatggagatgaattttcacgaaaagcatatagaaagccaaggttcaaggagggtgaccatgttagacttgcaaagtataagtccagttttgaaaagtcataccttcccaattactcggatgaaattttccaagtttacgatattaaaaaggctaaacctcatagatatggaataaaggacgacaaagaagagccctttgatacacgtttttatgctgaagacttggccaaaaccagaaaggacgcggagacgacatacagaattgagagggtgctgaagactaggacaagaagtggacataaagaacatttggtgaaattttacgggtacaaagaaccggagtggattaaagacaatgatattgagagatgaatgtatttaagtgtattgttattatgttttagaaaaataaaaatgtcaaatttattttacgttcttttacctagtgactctcctggttatgacaataagcctaataaatttagggttcatttgcctaggaccctaacttttggaggtcaatggttgtgtgggttgcacagtataatttatacaaattcttggcccgccattggtaccacagagaaccaatggattaaagtgcatttaaaaaatggtgataaaataaaaattgatattcccgctgggtcataccaaaatgagcaagaattggaaaatgctataaatgagtcgataaaaaatggtataaaacaaccagcaacaagaatgaaaagacaaacggaaaatggagtggatttgttttttcattataatccggatgactattgggataaaattgaggaagaaaggcagcgatacaacgaattgttaaaattaatagagacaaagtcaagtgaacgtgacaatgagatggacacacataggaagagaaaaatacaggaggaaaaaattactcctcttcaaaatcaatcattgactaagaaagcaagaatagaggcgttagaagaagcagcaaggcaaagagatgacggaaaggaggaaaaggaggagagaactggtcaagaatttctcaaaatgtatccagtaaactatagagagaagctaaatgaagttcgattagaattaataagagatttattcaacattcaagaccatatgaaaaaataccaaggagtaacagatggtagaacaattcaagaactaaatgaaatagcaataaagatgagaacagcaatgaaacacagaagaaaaaatttgaatgcttttaacaaggctgtattgaaaaatgatttacaaatatcagctgaagaatatgagaggacgagctatgaacaaaataaggattacgttgagccattttttgatagtcatccaacagattactgggaacatattcataaaaaatatgaaggccttcaagacgattacaaaaaaattcgcgaattaagagaacaacaacaatttttgactgatgaacagaaaaaacagtcaattcaggatgaaattgatcaacttcgtcgtcttgtcgattataggaaaaaaagatttgcagcgctagagtatgaagctaaaaagagggacgcactccaacaacaaccaatggctttagccttgactcatggtgaagcactgaaggaacgaataggaaaaattgagggaactaccaccacagcagacggggaagagacaaaaactcatggaaaatctttggttgagttaatagaacaggtacagaaagaaagagatgatagcaaggccaaaactgagggtaagacacgaggagaaattttaggagataaattaaaagccaaaattgatgaacaagacagtagtgcagatggtgcaacccatggtgaagcactaaaaaataaaccagaaacaactattggtgaaaaagtaatgacaagaggagaaattttaggcgaaaagttaaaatctaaagatgaagaaaagaaagaagaaagaataacccatggcgaagcattgaaaaatagaattgaacaaattcccgaagaagaaaaaacaaaaggaaaaataagaggcgaaatattaaaagaaaaaattggggctagtaaaccaatagaagaagaaaaaaaagaaggaaaaacaagaggcgaaatattaaaagaaaaaattggggctagtaaaccaatagaagaagaaaaaaaagaaggaaaaacaagaggagaactattaaaagaaaaaattggagttgataaaccaataagacaagaagaaattgaaggtgtgaaaacacgtggagaatcattaaaggatataattgtttcgaaacaaattgaagcagtattattcaaatatttgaatgagcgtaggaaattttcgatttattttaatgaccgaagaattgaatttattgaattatcagcacaattaggatacattcttgggtttgaagacacgacaaaaattaagaatggagatatagcaaagtattattgtgatttgaagggagggattgatagtctttgtgtttacattaatggaattactgagaatgtaatagtaggcgaccaactggcttcaattttaagaattgtagttgttgaaggaaaatttggagatgtagtagaaaagatttataacactcccaatgt

SEQ ID NO: 22022 - DNA, 1516 bp, Heterodera glycines
aataattaatttttaggttctaaaaaactccaaaaatagttgctaaaaactttcaaatttaggggtgtaaaatgacaaaatttattcaaaaaagtaaaaaattaggccaaatcagtattgagtaaataatttttaaaatcacaaattcttgtcaagaaataaataaataaattttggagattgatttttgagaaaattttcatttcttaggggtgcatttttgaaaatttgcgggccaattcttagggggtgtatttttcatttttattgcatttttcatgacaaatttttattcacaagcaaaaatagttgaaaatagtttttttcaaaaattttatagttttttagttgctaaaaataaaaaactagaaaatagttgctaataactcgaaaagtagcttaacaacaaccgaaaaaaacttgtttttcgtatgttttaggccacggagagctcaggaaaaaaatagtgaaaaaactataaattggagccctaattataataagcactttccattgcgtatattaaattttttttgatgaaaaaagttaaggaccgaaaattgaatatcgttttataatcgaaaatttcatatttaatatgtatcaaaaatcttcattattttataaaagctaaaagttaaagcaaaattaaattaaaataaatatatttaataatatttccaaatcaaatttacttcattttttccaaacaattaatcagaatattattaaaaattcagaatttcaaccttaatctgatcagaaggtaacaccgatttggaaaatcgaaaaaattttgtcgacaacttcataacttcggtattttccaaaaatccaatgtaagtgggggaggcagtgcctttcggcaccgccgtaaaaaatctttgaacttttaataaaaatttgttgacagaatttatccaaaaaatcgccaaacttttgggttttgagtcgttttttaagaataagggagatgttttgtttgtccagcagtcagggacggtcaacgggattttttgccttggaggggaaaccatcgccctgctgctggtcgacgacccttttttttttttttgcttttcaccacttttttcgcggaacgctttttccaagaaaaaatttcgagaagaaaaaggggggggggcggtgcgccgggcccgggaaaattttgaaaattgagtgcaatttgtcaacagattttgtccaaaaatgaccagatttggcgattactaggctcaaattcttaacgcgttttcttaaaaaatgataaaaaattgtcaatttaaaataaatatgaagaatcaaactttgtcgacaggcaattcctgagaaaaaaaacgaaaactaaacatttgcatgttttgctaacagatttgcacttttaaatatccatttttgcattttggctgaaatttttacattaaaaaaatggtaaatgtataaaaaaccaataaaaaatcaaaatatatttgattcctgcggagggattgaatccctttcccccaacctgtacagc

SEQ ID NO: 22023 - DNA, 1337 bp, Heterodera glycines
aaacgattgcaaagtgatcgatcactgatcagacatttccttcctcttttttggaccaaatttcctttcacattattatttttagcaagaattaattgttcgtttaatataatttaagattttttattcaaatttatgcaaataacaaaataattaccctaatttggatttaattaaccttttttaagtaattttttttctttaaaatgcgttttcttcacgcgccaaaaacattcgttgcaattttcggcacttttttaatttgggcacccaacggcgaagcgatggccaaagaatgcacaagtcggaaacggccaaattgcaaggatggccacaacaatttaatcgaaggacggaccgatcggagcagtaattgaaattattttaaaaatttatttgctaattatcattaattataattatactcagtctatagaaggtcatcctgtaaccatcaaattccttcggggcactgtgtacaggtcggacagtacgccgtcctgctaccgtaacaaacctaccgtactccttccaggcgttggtcgtctcgttgaaggttcaaaaattaaaaaaaatttgttttttcttggcatttttttatcaaattattaagaaattttgtacaaaaaatgacaatgttttgtggttttgagccgatttttgaaaataaataaggaggatctgggaaagattggaaatttggcaatttggcaatttggcaattttcttaacaattttgcaccaaaatgataaattttggtgagtttttaaacttataaaaaataagaaagttatattttttaaaatctaacaaatttttgagttgggaaaaatttattaataattaataaaaataattataaaattacttttgtgaaatatctgtgagaaagagaaatcgagaatttccgtcccggtccgtcaactctaagtttggacaaatattttttatgtgtttattatttctatttaattcaaatatttgcccccaggcgaaatgaccgtcccaccgaacaattacgacctggtcaagtcgggtactgtaaaaatgacaataaaaagtccgagtttcgatgacccactttgtgtggagggcgtcagtcaatacattgcgctgcccaactcaatgtggtgagcaaaaataggaaatgcaaaaataaatatgtaataaatatatttttaaataaaagatttttcaattttaaataattaaaattattttattaatttttaacgacggcttaaaattaattaaagagaattaactgaattattaacaaattattccttttctttatacctttttaatattaaatattcggaattaattttaaatt

SEQ ID NO: 22024 - DNA, 281 bp, Heterodera glycines
cgggggacctctatatgcggacatctacatttttgaattgaaaaaaattggtcttactctttctttttctccatattgaccatcatactcatactccccccaccctttctcctccttcattttttttttcctttccttctccaaccctctcctccctctcttgatagtttaaactgaaggcgggaaacgacaatctgatccccatcaagctagcttctgcaggtcctgctcgagcggccgcccggggatcgatccccgatctagtaacatagatgacaccg

SEQ ID NO: 22025 - DNA, 133 bp, Heterodera glycines
gcaaaaccgaaggcgggaaacgacaagcggagccccagcaagccagccacggcaggacccgcgcgagcggccgcccggggaccgaaccccgagcgagaaacaaagaggacaccggacccgagaggacccccgg

SEQ ID NO: 22026 - DNA, 210 bp, Heterodera glycines
tcatctatgttactagatcggggatcgatccccgggcggccgctcgagcaggacctgcagaagctagcttgatggggatcagatcgtcgtttcccgccttcagtttaaactatcaagagtatgagtatgatggtcaatatggagaaaaagaaagagtgattaccaattttttttcaattcaaaaatgtagatgtccgcagcgttattata

SEQ ID NO: 22027 - DNA, 2258 bp, Heterodera glycines
tttcgtaacagcctgcaataaatcactgtttaaaatgaattttgttgaaaaattttaaattttcatgaaaatagaaaacgttggtttcttggcaaataacttgttcaaaaaaacgggacaggatcacgcgggattaatccgagcatcttttgctgactggtatccagcaaaattccgcgcgagatcctatccgcgccgggcactaaaaaatacaccccctaagaattgattctaaaattccagaaaataacgcctaagaaagaaaaaaatttcaaaaatgtatctccaaaattatttatttactttcttgacaagttgcaattgtatgggtgaaattgataaaaaaaatctcatttttggaatttttgtgcataaaaacagtggacccaaaatcataaaatattaattgtgcaaaaaacgaagccctaatgattaataagtagggatgtcaattttatgtaaatacattttttttttcctggcttctccatgctctaaatagtaggaaaaacactttcttttttatttttgcaaacaaaaatcgggacttttatttacatatttcggggttttatacatattttacatatttcgggattttatacatatttggtacatattttggactttttcttacatattttgattttttttacataatttgcgggttttttacggaaatttttggaaatcctcaaaaaaaaatccaaaattttggtaaattttttatttttttatacatattttgagaatttttgaaaatttttagaaatttctagtgaaaaaattaaaaaaaaactttttttaaatgtacccctccaaaaataatttcttaaatgttaaaaggtgattctaaacatatttaggtcatttttatgccattttacgcctatttaacactttacgaaggttttttctcaaaaaataaccatttaaaaaaattttatttacatattttcgtacatattttgggtttttatacatatttcttacatatttggggattttttttacatatttatgtacatattttgaccaatttttgtacatatttttgacatccctatcaataactaatttagaaaaatgaaataaaaattcttttacttcgcagcctacaatataaaagccattggaaataagttttcatgatttttgataacaaaattttttccaaaaaatgtgttcatcaaaataaacattaatttcataattaagattaattttttcggtagaatatggccatttttgtgacatacattcaccagttatactttcgcaatggcggtaggggccaattccgtatcagcaaagttcaaaaagcttacacttttttctttgttgataaaattaacaaacatggtatcattcgaaagctttaaatcttttgaagatatttctagctatttttaaatggttaagcggctcacaaaaaaagtcgtcgcttgaaaaccgcaaaaaggcagaattttcgaagtttttttaaaatttttttttttataattcgacattctcagtaattatagtaggctattagagcctgtaaagagctttcgtttgatgaaaagtgttggattctgtcaaacaacttaaaaagttatattgactcaagttagctcagcagacggagttggcccgtttcgcccaatagaataatttgctccgccacgtttcatttcgccaacaatctctccgatctcgactcttcggttgaatacttttctgctcatgacttttttaaaacttaaattctttgaaattttacagctaatagaagactcttgtggctatcgaaagataccaagaatgttgaatttggatagtgtttaaaatttaaaatattttaagtgcctttacgatgtaactctctataggtctgagtagagcagcgcgggaccaggaattttgcccaaaaccgggacttgccgggacctgagaagccgggaccggaacctcgattttcgtgcgggaaccgggaatttttaaagataaaaaaaaaattcaaatttaatttattcaagtgaaaaaaatacaaaattaaatttttacacaaccagaacaagatttaaaaaaagaacaaacattaataaataatatatttatgaattcgaacgaaaaaagcaacaaaagacaatgagagagcatttatgaaaataaatgagcatcaaaaaatccgtttccaattggtgagatcgatcatttcacaaatataattaattcacttccgcacaatttgacattttcacaaatatcactca

SEQ ID NO: 22028 - DNA, 1362 bp, Heterodera glycines
ccccagcggttaacaaccgataaaaatggctttagtttgacggcaaatccgacgacggcaccaaacgaacttgaaaaataaatgattattctatttttgattttattaataaaaatgcatgattaattattttaaaatttatatatttaaaaataaataaattttcttacccgagcaaatgttcgatagcaatttcgaagtagaaaaggccgttcgaatttgcacagtcttgaatggaatgtttcgcaaagacagttcgccaatcttttgtcagggatatgtttcattaatcagataatgataatgctatggtaaacatacatggaaaaagggtgggggtgtaaaagaggtgcggggggggggggtcgtcggttacggggaaaagaggaaatttctgaaaatttggctattttcttaacaaaattcattaaaaactctgaaaatttttccccggcggcgcctatcggcaccgcaggccccccaaaaatcctaattttccttaaaaaattagccaaaaatctcaaaatttggtaatttttagacaaaatctgcttacaaatagcattaaaatttaaaaaatgaggtttgaaaagcaaaaaagtcgtcaaattacatggctggaccccttcgcaaaaatttcggttgacccccccccccccttttccatgtatgatggtaaattagcataccggggttatattttctagtagtataacggatcgtcctatttttagaatcaaggatttcgaggtcacataaaccgtagcagggataatcatgggaacgggcctcgtaatcccaaaaattgatttgtttcatcggtcccatcggctgtggtacgagaaaatttgacgcctaaaaaagatgtgaacacgagaaaataagacatgagaattttttctaaaaaatatttttactctatatttgtctaattttaagaaatgacaaaatatttgtgggatttgtaataataataataaataatttttctaataaaataattcgacgcataaatgcggatgtaataaagtgataaaaaaacatttttattcaaataaattttcaaaatttaatacttgcgcttttttctgttgtttggcattgcccaattttgtggactctttcgtcgtttggtttgccaactgaaaatttacgaaacagcaatcactaattagtcgaggtattttttaaaagaaatatttttatcaaaacaacaaaaataatccgaaaaaattaaatgatccacgcctcaattgaccatttgttgttgctgcgtctccaattggacaattcgtcccaaaagcgcattctgatcattttgaaactgagtcaattggccaactgaaactgggcaaagcatta

SEQ ID NO: 22029 - DNA, 1242 bp, Heterodera glycines
aattcattttggatggtttttaaaatatcgcacataatgatgatgtttatatataacatgacatcgttgtaaagattcaatatatatttatataagatcataatttctaggaagatttggtaaatgaactcagtaagaaggatgagtgtggcggcaaaggcagaaaatgtttttgttgggcacatacgaagatcagctcgtgaatctgctggcggctggtgttatatttatgttctgggacaagacacaatgatctcgatgtgaaacggtagccatggataatgacaataatttgattaattaacgagaatttaattgtcattcttttgcattggtcataattctttcattcagactggctttcgaatgataccaattttgaagaaatcaaccgacgaacaaaaaagttatggccattcccattcaaattgtacgaaacgccattgtacgaactgccttgaccccagtttccttcattgtttttaagtggtgttatgtcgctgaaaaattcgtttgctcttttttgatgcaattttattgaatttttaaatttttatttcatctacattagattaaaacattttgatatctattaatttttattttttaagatatctcataatgggtcaacatttttgcaattattattataatatatataaacttttttaactgaatttatgttttttatgatctgaaaacgaaaactttcatttttttctttaaatgctcaatattcaatgtaatttttgtaataatttatattatatgacccctcatgataagcagggctgcaaaaaagtatgcacgaaatggccaaaatatgtgtataaatatgcaaataaagtcgtgaaatatgcacaaaaaaaaaacttgaaaattaggggtgcaaattaattagaaaattttattccacgtaaattttatcggttgtttttgcaattgcaaataaagatttcttaagattttcggcagtgaagctcactgttgacccacttgcgcatccattcagatttcgatttacttttaggcataatcaaaattttttcaataagagatattcaaatcggaaaatatttgacgaaaatggcaaaatatgcaaaaaatctgaaaatatgtaaaaaaatgtaaataaaagtcacgatttttatattcaaacacaaaaaagaaagtgtttttcatactaattagagcatggagaagcctggaaaaaaatgcatttgcatattttttgcaaccctg

SEQ ID NO: 22030 - DNA, 1964 bp, Heterodera glycines
ttttgtatgtttgtcgtttccttttgctccaccatatatctcttcacattatcgtaaattgtggcggacgaccgtattcaaacgtctctttttttctatcgtttaaaaaagatgtaaaagcaatgtatttgagcataaaataacagactgtggaatgagtagaaacgaaagaggaaaaagatcaaggatgggggggggagagcaagcacaacaatagtccaattgcgtagccagacccttggcttcggggggggggggttgaagtcaaaaattcgatttttaggggtgtatttttcttttttcagtcgatttaattgcttaaaatttaaaaaaaattaactgaaaattttttacttttttgggtttcgggggggggggatttagcccaccctcagccctccccctgcctacgcccttgcagtagtcatcacagtacatagtccactctccttttcgtcgacaaaatgaatacgatcgtcttctgatttttgactttcattcactcaaaatccaaattaaagtttaaaattttggcgttcttcctttattgaaaaaataataattgtcgaacagacccaaattgagttgctttgtgcaatagagaaagccctacattttgcaatttagttccatattgcgagagttacaatttgactgccctattcaaaaataacaattttccttaaaatctgttaacgaatgtgctcgaatttgaaattccaggcgacgtctataaattaaataattctgatttgtttcgttcttcagttggtcagtgtctgttgcgccttgctgctgtgtcatcgtcaaaagtgcactttttatataattaataatttaagaaaaggtaaataattaggtaatttcgtttagacattttgttggacaaatattaaaaaacaaaaacaatttatgcgagagatccacataacattcaaaaaatggctgtccacaacaacgtattttattcagtttgtctggtctaaatttattcaatttgaaacagcactcaaataaatagcatacttcgccaatggtcgggcgcatcaggatcatcattattatcatcatcgtcatccgcgctgaattgtgttacgcgatttagtttaaaaggcataaacttttaccttgccatggaataacctccaccggctcttcctcggcttccggctctgccggaggcagccgattagcttccatccgctcctggcggcccctccgattctcctccttcattcgccggtgctcctccaaaccttctccctcttcgtcggtcgccaaattcgatctggcctcctaaagatattaggggtcaaatttaaggaaacaaatgcgaacaaaccagtattatcaaaacaataacaccagagacaaggaggacaactagaattgctgaaaatgatcaaatggaaattacactaggtcagtccctcccatgcctaccctttcttccacttcggttcgaaggaaatggacggacggcgctggcgataaaggcatagtcgacggtcaactgaagaaagtgtaacccatcaaaagatcaaagggaaaaacgtacactcaaagtgcgacgatggatcgccagtccacaccattgcaatttgtcatagcggcgaatgtgaaacattattcttagaaaaaaaagttgagggggaaatgtgaacgaaacacaaatacaaaatattcataaaagcaaaaactgtatactagtgaaactaaatgcaaaaaagcgtttattcagttcttctcacttagggggaaatagcaacaaataaatttgcaaaacaaaatatcaatcgaaattttcctgtccgtcattttgcgttttcgtcccccctctccgccggcgtatttcttctgttgattgtctcgcggctgttctctctgctggtcgctcgctgtggcggtgttggacaaaaaggccaaaattcccttcgtacaacgatttgcgtaatggccttttt

SEQ ID NO: 22031 - DNA, 1571 bp, Heterodera glycines
tattaaacttcggcttaatggcttactcatcagctccaacttttgcttcaccatctgatcaatgcaatttgtgtcgcagggatcgttaatttgttccaaaatttctgtggtgccaattgtttcgaataagtcattcaccgctgttggacgttcggccccgacactttgccaagtgtggcttggcaaaatcagaaaaatgccaaagtttgtcagttcaaccgccgcttccattcggcacaaatttttcacccatctcgccgtctgaggaaattgaaaaaattccaaacaaccaaaatacatattcattaggggcctggaccggatcggtagatcgtcgggatttccccagcctccggaaggaaagaccggggtcggcagttaacaacacaaaaaatctcgaatttttcggcttttatcttgccatctaaaagccaaaaatactttttctggtgcaaaataggttcagcaaatcttgattatattggatcaaaaagaaaaaaattggagattggcacaattttaatggttttagtggattgtgattggaaaattcggaaaaaggattttaacgctgttccggtccttccaagtcccttttccgggttttcaaactttttaattttcaaaattcattacaattggggattttgacagggcgttcagaagtgtgtcacccatctcattaagccatttcaacagagtgttcgtttcttgcacgaaggtttcgttgtctccgctgtcgctgatcaaagcccaccgcaaagcattggccaatttgcgatacaggcgaatgtaagtgaacaacagaatgtgcttttggcctttctgagagttatccccgaagatggcactttcctctaaaacttcggcaataatttcattgatcaccggatcccgcttctcctttaagtaagcgatcagttttgaaactgtctccgccccttttccgtgttggtcgttgtcccgtttattgaccaatttggcaaattcgtggcggttgttcatcaaatttttcaaatttccttcatgaaaaaaattgatttgaaagaacccaaatttgaggacgttctctcccatctcgttgacactccccgaggccgccttaatcactgattctctaatttttgcgcccgttctcggctccctttcttcaacagttttgcgaacaacaacatcagtcggcatatttgcacctttaaatgttttatgtgcccaatggttgtcctcatttgactaattgccattggggggggggactcgagaaagccagggtcttggctaactaatgacgggatagaaaatgatatacctaattattagggttgtaaattatatggattaacatattttttctgcgcatatgctatgaagaaaggggcttaaaaatagcatttctgcgttaaaattttttgatttggtgaaggtttttagtccatataaatccatattttgggggttttcgggaataaatccatatttcgccatttttgggtttttagtccatattttggccattttttggaaattttcacaagaaaaatgaaaaaatacgaaaaatacacccctaaaga

SEQ ID NO: 22032 - DNA, 2167 bp, Heterodera glycines
  unsure (1)..(2167): unsure at all n locations
cattgatgactcttttgttgtgtattttatacacccgaagaattgagaatttttggtccgacaacgacagatataacatcgatattattattatttaagcacagcacaaatttgatccatgcgaattcacttttgattatctcaagatattcagaacgaataaaaaatatttttagtgtttttatggcttttccatttccacaacgcatgcaaatgtatagaattggtgcattaatcgcaccagcaattgtgatcaattgtgctgctaatcgattgattagaaactgcagttaagtatcactggtgatcagtcctcgtgccaaaatcttgttgatcagtgcaaacaaaaatctgaaaaggcattgttttaatttaaatttatatgaaatatttttaattgtgtaattaaatttaccctttagtataattcccatgacaatataaatgacaattgtagccaaagtaaaaataaccgttatatgagaaccaagcataattacatttgggatgttgtagggcaaatttaaaacacaaataaaggatataaaaggtaattgacgatgaaaaaacattggtaaatatgacatatttgccggctgatctggagctgttacggaaactaaaaatacaaagacaaattttatttaaatattaaataattacaaaacggggaatgccaatgccaccaatcgatcaatacttatccaaaacagattatgaaagaattaataactgctgtaggtccaaaaaattgggcataaacccaagtaaaaagtggaattcgcacgcgaaataaaacgaggactaaaaatataatattaattaaaaaaaagctgttgcatcgcctgccaaaggaaaagtaattttcattcaatttataatatttattttataattttctcatttttaatgaaaatgtatcaataataatatttacaatttgagtacaccgttgctccgtacgcatttatataaaatcttcttatattttttcaattatacaattttctatttcaagctacaacttgtgcactggatggttcagtctctacaggctcagcctttggcttggcttaaatcgccaaattggcacaatgccattcattaagttagaatttaatgagtttacctgctgctggtacctttttgtcctttgttttgtctaaatttcattttttaaattaaattattcttacaatattacctttcttagctgcatctttccctttgcctgccttctttgccggcttttctttcttttctagatttcaaaaacattttcaaaaaatctttttcaaataccaactaaccctttttcacttttccgtcctttttgcccgctttttttgcatcttttttcccaccttattaatttaaattattatttaatataattaaaaacatattaaattcgttaccctttgcagcttttccttttgctgggctggcaccttttggcgaagcttttcctttggcaggcgatgcaacagctccttaaattttaatatattgttattttcaacaattatattcaccttttttaccgtcctttttcactgcttttgagttcgctaaaatagatatattttattattgtttatttttaaataatttttattaccagtctccaaaataacagccatcaccagacaaaccatagccaggaagagaacggcacgcatttttttagatttttaattaattattaagaattaatattattgtaaaatccgaatctatgtttgtatgtgtttatttaattccttttatacacctttaatttgatgacctgaaaagatgccaacataacttatttgcttcatttcgacttcctttaattacatcatcatcttttttgccaattatttattttattatgcctctataatgttaaattttttattanaaaaatataattaaaaaataaataacattaaattactaggtgccattctctttnttgtcggatatcattcaaaaaattatnggtggcaaaacataaagatgatganattcattaacatcgatagacgaaatatttataatttngcatgacatttgcacganannttggtggcaccatttccgctacccgattatggcatnnattagcagcnaacattaataatanagtaaataatttaaatatattttatctaaattaaat

SEQ ID NO: 22033 - DNA, 2249 bp, Heterodera glycines
  unsure (1)..(2249): unsure at all n locations
aaaaaaatttttatttttgtttttgtttgtagatttatccgggagcgttcattttcaatttataagaatattttagcagacaacaggatgagcttcacgcccgaaaaccttgagaaatttttaatttgtaattgcaaaaatagccgatagacagatgggatggcatctttttttgcaactcaccagtcatgcttcttggagataacacattggaagacagaaaagcacaattccaaaaaccaagcacaagcgtttgtcgtacaacgctcttgtgaaaaacaactttggtgggccactttgatggaccgactcacttttggcaatagagcagcatttgttataattggattacaacaaaaaatggaccacataacagatttaatcgccagaataatttgaaaaaaattaatagttatttcgttgggggaaaatgttcccgagcagttcaaaaatcacaaatcgctcaaacaaatcaccgagacatcaccagccaaaatattaacttctttgatcagtttggatgtgccatttgagtaccaaaagggagggcaatctaaagaacacaaaccacgacaaaatttgatgacaaacggttaacagtaaatgtgcaggatgataatgacgatgtaaattttactgttgttttaaatggggaaattaaggcataaaacggtccttcgtggccatatccgtcacaggacgttagacaacagacaaatttctttcgaccttcatttccaaacccgaatttcgtccttttcgatcacaatttttcggcactcaaaatttggcacgaaattttcaacaaaatttgaatttacgcgacaacaaaataacaacttttgacgacagctacaaaaaataaaaaagcactttgtctgctaaaatattcttataaattgaaaatgaacgctccacccttgcgccgattgaattggagcatatttgaactttgcaatcacatcgggtggcaaatgcatttgaacatattcgccccataagaccattccgatttcctaactttctttaattaatgctgtcaaacttcaacttttacccgcatttgaaaattataaagacatttaaaattcaatacccagaacaaacagtcattggattgatcgaaaaattttttaattttttgatagctttgactatcaaacatttaaaatcagtattcgacatggcgagaaatctgaaagagaagtaagggatttatgatttaatgtaatcgaagaaccctttgaccaattttcaaattcgccaaaaaattctttcagattcctgcattacagaccgagaggcgtcaaatgatatatcattcgtccaattcggtgaggtacacatattcttcaatttttcccacatctgaattgaaatattttaaaatttaaatttattcgcaaaaatttcacaaaaataaaatgcgataaatgagaaaccaaaaatttattattaatcgacaaagcatgaaaataaaacaaccacataatggaacttaattttggtaaataacaaacaaaacacatttacatatatattagctaggctttggacaatcgaacaataattaattaatcagttagcgaattttgcacaacaacaaaaaataaacgagatttcttttaccatgaaattccatttaaatttttgatttgccacaattttttgttggtatgcaaaaaaaaatctgaaattttggcgttgatttcaaaatgtttgattgcaatatttggtgttttattcagtgaaaccctcgaaactcctcccaagttcagtccgtttccttccattagtgccattaatcaccaatttgggtggtgccgccgccacttctcacggtgtgctcacatcgaatgccactgtcagcgcttcgtcctccgctcggtaaccgttggagttctgccaatactgtggtgaaattagcattttcaattgggcaccaaattaaaaatgagcatcaatcattacgttaaacagcatgaaatggtggaagaacgcgcctttgttcggcgagtgaatggcgccgactacgccctcttgcacatagtccgccttgccctccgtccgcgccggaatacgacgtgtgacagtgcaattgcagctccacgtttgaactaaattcccaaaaatttaagggggaaaaagctcattaacctccgctcccgatttttttanagactaagttttttgattntttctttaaaaatcgaaagaataaaaaaattctttttgaaaggaaatactat

SEQ ID NO: 22034 - DNA, 2208 bp, Heterodera glycines
  unsure (1)..(2208): unsure at all n locations
aattcagcagcaatgacgatgtgggaggaatattccgagcgagatntgattaattttgcatattntatgctcgccgggtccggatttcaggcaaatttgtgcattntaatgaaaaaaatanttaacttattaaaaaacattcaccaattttttcgggttaaaggtacgtctttttgaaaagttatgggcaaaaaaatatnttcttgttgattgtatgaaaagaaaaacttttaaaagattgatagttgaacgaaaaaaangaaatttaattttgaatttttcttaaaatttttcttaacaaattattttttaaaaaatttagaaaatggaccacaaatatttcaatgattcggagaaaatgcggttgaacaatttttacgacagatttcgccacaacttaagcattgaccaatttttcaacgaattttttgataattttggcttatcatgcaagcaattttttcaattctgccaactcggcgacacagttttggactgttgcaaggtgaaatatttttcttcaataaccttggaaaattatgaaactaagttccaaagtcgaacgcataaattttgcccaacaaaatatttaaccgatttcaatgacagaaaatcattttaaacaaaaaaatttcgattcttattcgttttatggtggaattttcagcccaattttttttcaaaaaatattaaaagtcaaattttaatgaattaccaattgcacgctttaagaatttttttaagaaaaaaaaaaacttttgcttttttccttttcggacaatttataaaatattattaaattaaacaatttaaagatttttgagccaatttatctgatcagacggggccgttgctttcgtagcatcaaattgtaccaaagcaattttgatgagcttggaaaattgcgtgttcaacttcggcagccctacaaaatggacccacaaatgaaagaccaagaagtaataaaaatgctaaaatgcctttcaaataataaataaaatatacaaaaactaaaatttttaataaaaacgatttcagtctttaacttagggttgatccacgagtctcaagggaagaaaagtcgagattggtaagggaaaaatctcgatgcaatttattgggagagaaaattttcataaaaaattgagaaaaagataacagaatttttgatagtcttgggaaattcaaaagtcattttaaaagatgaaaattttgatattcgaatgaaaaaaattacttacattttccaggaaattatggcatttattgccgaatataagccccaacttgcgccattcccacgccattatctgcagcagggaacatggacaaaaatgcggttgaatgccaagcatatcagtctgtttccggcagaagaagtggggacccaaaaaaaatcaataaatatttgaaaaaattatcgattgaatttacaaaccttttcgcctgttattgattaaaggtgtgcagtcagacaaatgatcaattgggcaaggacacatgctatgttgaaaattggctacaaacacatgtggaaggcccactaaattgcacttttccgtatgtgcaagaaattacaaaggataggcaattagagaggtaattaacggcaattaatttttaattaaaaaatttgagtgttcaatttaatgaagttgtgagccattgaaattggttgacaattatataaatgctgtgcagacaacaaattacacaattcattcggtgagttagagaaaatttaaaggtttttttgtggattattcaataaaaattaatttatttatggattaaagtaatataaaataaatttaattgttgcgttttttagtgtgtgttggcttgtgaccgttgggagtacatggtttccatagaagtaattaaagattgtatacattttttaaaaataaattagctgttcaagaaaatcgacatgaaccgggtttacaaaaatgttaatgttttaccatttgtctaccgtatcgatctgtcctacaatgatttacagtatgaactgattgaggaagtgagcacattgacactggctgggcttatagcgcagattggaggccaagtaagaaaaatataaaaaacaaaaatatatatcatatttattttctattttataataatttttataataattctattttcgagtataattttttacaaaaattctattattgtcaataaagaaaaagcccacaa

SEQ ID NO: 22035 - DNA, 1426 bp, Heterodera glycines
aaatatgtaaataaaagtcccaactttgtttcgcaaacacaaaaaaagaaagtgtttttcctactatttagagcatgagaaaatccagggaaaaaaaatgtatttacataaaattgacatcccaattgatgactgcgtcaaaatattaaatttaattttaagaggaaatttttgaatgttttttaatttatttttcaataacttaaaatattattttgttttattcattttttattttcctatgtttttcagttccatccgaagtgttatcagaagatgaagtgatcgacatttatcagttccatgcccttccaaattgtcatggaatatccgacggatttttcccaatgcaattttcgacaaatgaacggtttatgaacacgggcacacttttgctggacattgaaaaagtgtcggaatttgggcaagaggaagatagtagtcggtgcagcaaaaaaatgtacataaatggactgtcatggaaaatattggcacaaattggaacgagaattgaatccgatgagagacgtatctacatttatctgttgtgcgatgctccaaatgaaggtgcaaattaagggctaattaatattaattaaccaattaatttaaattgagcagaaaattggagttgcaaatgttcggcaaccattcgaattatctcacaaaagtgtgatgtggcggatgtacggaaagaatacgatgtcgattttggaaaaaataaaaaatatgatagctggggatgccgcgattttagaaggagatacctcgatttggttgaatttgctgtgggtggcatttaaatgtctttctctaattaaaatattataattaagaaactggttgatccgaaaaatggcttttacgacaaatgcatggacaaagtgacattttccattgatgtcaccgtgaaagaagcacaaacgggcaaagaatgctgatattcataatcagtgatcccgaaaacccttcgaaaacatatgtattttcatttgtttgaataaaaaaaatatgataaaaaaactgaccaaaaaaggcgatccaaactaacactagtttagctaactttctttgaacaaaattcaaacaaaatttattattttaattattttttgagtaatatattagctttaacccaccgtccaaaaattcctacgcatttgggttacttttttccacctcatttctgcaaattatccacatatttcaagttcaaatgcggaactgcttcctgctcctgcttgttgtctgctgctgttgacaacttcagttgcaattagagggggggggggggggggcttttccccccggtgatgcttttattccaaagccttcgcaaaccccatagttatatagaagaatgcattcccttccagccaaagaatacccccacccctttcctaatgctttttacaccttttcttaa

SEQ ID NO: 22036 - DNA, 1475 bp, Heterodera glycines
  unsure (1)..(1475): unsure at all n locations
cttgaaaaaattttattaagaaaaatttcgactttttcgcaattttcatgcataatttttgtctactcgcgaaacaatagcttaaaaaaagcttctaaaatgttaagctttcgatggatttggatgataaacaaaaaaattatagaggaaaagcatgctggagcctaaacgtgccggcccaactgaggtgtaccgtttcttaggggtatatttttgaaaattttggcgttttgaacagtaaaaccgcatttttgtagttacatcgaccattccgtcgtcgcatttctccgtgccaacaagcaaatttgggacaaaggcaccaaattgaatttgtacatatcctcaactgacaacgactctgtccagccgctttggaatgtttttgtccgtgaaatttggcccatttttgcgccaaacattggccatttgaccatttcaaatgctgagcatttggacaatttgcgtcggctcatttcaccaacaattctcaccgatctgaaccaattgacttcaatccattcatttggtctgtcgcccgctgcgtttggtgatgattttgatgggccaaattcaacaatttctgcaggccaagcattgtccaaatggttgcactctccgagaaaagatgggcagccaaagcgattgcattgcatagattacaacgaacaaacggacttcgattgggtcaacaatttcaaggaggtgtggccccacattttcaacaaaaaagttatggttaaaaatatttagaaaaccagttttttgaaatcataaccttttttaaacccacccaacgaaattttttgaaattttgcaggctattagatgactcttaacgctatcgaaacaaataagaatctttaatttggatgcttttaaaaaagttatggtgcattaaaattgtcgaattattttatggtcgtgtctttttttgtggtcgtgtgaaccagggttgttccgggacgagaaaaatgtcgggattcggacaaattttgattttctttttcaattgtttaggcatttctctgtgccatcacttcgtcttctgcctgctacacaattcaattatatttgtccgcctcattgccaattgtgccatttgaattggtgaacgaacgaacccatgaaaagctgacaatggccaaagacggcacatttggatttactattcgatggataatccggcgatgtccaattggggagacggttcgctggactaacgagaatccgccgaacaatttgaacggcacattcttccatttttatggtggcaataattgcattgggtgagcagcaacgacatttgccattgttaaagtgttcatcatcaaattcaaattgacacataatttagaccattgtgtccaccatcaacgaaagaagcggagaagagcgcatgaattaattatgtggtagccanattaattacattagcttaaatggcgatcatttcgaattattgaatgaaaaattgt

SEQ ID NO: 22037 - DNA, 2607 bp, Heterodera glycines
cgtgccgtgccctgtgcattatgccaatgtgttcgtcgtgcaaataggcaatgccgtagagcatttggacaaaataatggcgcgggatcagctccagctggggccgctgctcgtcctcaatcactaaacgcagcgacgagtcggccaaatcgagcaccagcgacacaaacagtggcggctgcgactgctcgccacgctcgccggcgccgccgttgtcgctgcgctgctgttgattagccggcggcgaccacaaaatgtctaacaggcgaatgatctgctggcgaattggcaaagatgactgatttgttggcatactgtattgtacagtacagtatacagtacgacttatccaatcatcttacggcattttattttaataaaatgacattttaatttaattggacaatattcttagaaatttttatttggtagagacgaggctttgcattggcaccaaaataaataatttcgaaagctaggccttcgagtttttttttgggggtctccaagttaaaatctcgactcacagcctcggcatatttcagtctcgagtctcagcaaattgcccctcaaaaaatgccaggtgtcgccaaagcgactaagaaagtggagaaaatgaagaaatgatggagagagagagaaattggaagaaaattgaggaagagaaatttaattgttaatttggaaaaaataattattagtcattgaatgtgatctttgaaattgtgattttgtccctccattgaacatttttagcattagtcactactattttgtgcacaattctctgtctaaaattgctcctcctacgctttctgtctccacaaattgctccacccccgcattttctctcctcataagcatttgcgttttcacacattttcttattctgacatcttatccagacatcttattcattttatattatatttattaaataaacttctttcttatttgggaattattttcccttattccaccccgccctctctccgtcgcgccttcccatttttgcccccattttgccgtccgagccaacaggatgcttcgatgacaattttgccaaattttaaggcctttacctaatttttgtggtccgtttcaaatatcagcacccaatcttaagtagattcaatgatcacaaaaaatctatgaacaaaatgctcagaaaaagtgagtccatttttgtgtatttagccctaattagcaatcaaaaaatgttagtgcaaaatcatccgtccgcctctgacatttggtctaacgcgacctttttccatgctgtttattaaattttaacgaatgaaatgacaagcaaatataataacaagagcctaagaaaatttacttttcattattagggccccgacttttagtgaaaaaacttttttttttgctcaatgttttgaggaaaggagctcaaaaaacgcatttccgcgtaaaaattttttcctttggacgtcatttttcgtcactgtgaaaattcacttttttggcgttttgtcactattttttcactatttcgacattttttggaaaatttattaacaaaaatgcaataaaatcaaaaaatacacccctaagaatcgatctaaaaaaatttcaaaaatacaccactaagaatcgaccaaaattttttttaaagacaccactaagaattggaaaattttttcaaaaattcttcccccaaattttttttcttgacaaaatttttgatttaaaaaatgtcattatttgctaagagaattttataaaggaaatgtagctcatttgcaactgcaatcagtgaataaaaattattttttgcgtcactttttcgaacttttttcactattttgtcacttttttggcactttttcgtcattattttagttaactattttgagatttttcgtcactaaaagtcggggcccttttcattataaatgaattttagcttttttttctttttgtaactctgtttaaaaatcattttaaattaatcgtaataaaatttttcgaacaaataaattattagaccattagacgctgatgaccactttgcttaatttgttggacatttaccatatttgtacattttggaaataatactcatcatacagtcacggtcaaatgtattgcatcaaaaaattttttttgaaaaattcgattttctcaaaaatgaatggtgtgaaaaatgtctaatttatgccataagaaatgttaattagtccactaataaaaacccaaaaactgcccccgtaactgctttgttgacgaaaaaattggtcatgacccgaaccacccccctttttggtgggacaaaagtaatgcatcaaatgtttaaccgacccaaactcaattttatgttgagaaaaaaatctgaaaaaatccctgctaagctaacttttgatactggtcaaaaaagtcttttacaccaacttgatcagatcactccttcatggtgatctgaaaagccaaaaatggactggaatcggggaattgttggactcattttcaacaaaaattcctagggggttaggaaaattttttttgaaataaactctttaaaaacaaaatctccagcgacaaattcaagtgattctaacgatgaatccaacggaatggatg

SEQ ID NO: 22038 - DNA, 1335 bp, Heterodera glycines
gtaccttaaggactacagaagagccaatgacagcagtcacctttgcacagttatgtaaaagaaataaggaaatattcgatggggtgcgatcctttcaaaaaattactctcgtcttctaccctccctctctttttgtgcactgtttcgtttaaaaaattggttccgaaattttttgactctaagaaattaaattgtaaaaattcaaaacttaaaattctcctctgaagtttcgaacttggcttaaccatgtttttaagtcccaccgtgaggcgggacagttccaaaatttgtaccacatttaactgtggaatgtccaagtaccttaattggacaattacttgtcaacgaacacagtcgcctctggcctcttatggaacagaaaagggtgaatatcagatggggtgcgtcccttcctaaaaatttctcttttcgtctaaccctccctctctttttgtgcactgtttcgttttaaaaattggttccgaaattttttgactctaagaaattaaattgtaaaaattcaaaacttaaaattctcctctgaagttttaaacttggcttaaccatgtttttaagtcccaccgtgaggcgggacagttccaaaatttgtaccacattttactgtggaaagtccaagtaccttaaggactacagaagagccaattacagcagtcacctttggacagttatgtaaaagaaataaggaaatattcgatggggtgcgatccttacaaaaaattactctcgtcttctaccctccctctctttttgtgcactgtttcgtttaaaaaattggttccgaaattttttgactctaagaaattaaattgtaaaaattcaaaacttaaattctcctctgaagttttaaacttggctctatcctgcttttaagtcccaccgtgaggcgggacagttccaaaatttgtaccacattttactgtggaaagtccaagtaccttaattggacaattacttgtcaacgaacacagtcgcctctggcctcttatggaacagaaaaggggaattatcagatggggtgcgtcccttcctaaaaatttctcttttcgtctaaccctccctctctttttgtgcactgtttcgttttaaaaattggttccgaaattttttgactctaagaaattaaattgtaaaaattcaaaacttaaattctcctctgaagttttgaacttggcttttcaatgtttttaagtcccaccgtgaggagggacagttcaaaaatttgtaccacattttactgtggaatgtccaagtaccttaattggacaattacttgtcaacgaacacagtcgcctctggcctcttatgaacagaaaa

SEQ ID NO: 22039 - DNA, 3371 bp, Heterodera glycines
  unsure (1)..(3371): unsure at all n locations
gcccgcttccactcacaatgtcccgctgttgctccccactttcgcgcgtctctttctctgcaattgcgcgtcgcgtggtcgtcaccaaaaacgcccncctcggcggcccaccgccacccaattcttcggcatttcttccccctccgcctcctcgtcgccggggagcaccggtgccgtttccgtgccgccgtcttcaccgcctacttccacaaaaggcaacgtcggcggtcgatgtgtgctgctcggggaggtaagaggcaactgattgttgtggttgtccagctgatgacggtccccaacagttgaaggccccgatgacgtcatcttcctgcggattgaattcagatttggcacttttggcgttgtgcctttctcgtcagcctaccgtttccgccatgggctgaaacggcgcgccgaaccgaacattcccccagaagttctgcttgtgctctcatggcgcagcttgcaacggtacagtttcatgatctaaagttttataaattaccaaagacaattaacaaaaaagtatttgttgaaccctcgtattctttttgatattccatgcccgattattattaattcatgaaaacgaagcattcggtcatgacgtgacgacattctatgtaattagtccctcccccctcatttacctttgccacgtccatttcactgagttccatcgctgttccgattacatttgtgaactgtaaacattcgcattatgaatccgttgcataatcattttcaataaatcattttaaaatccgtttattaattttttaaatgaaatttaaaaaagccattaattttatgactgtgctgcttgctcacttggtcaacaactgcttccaatgtgttccgaccgtttcgactgaatgccgacgacccgtaatgcataattgacctgaaagatgacagcaaagagtttaataatgccatgataacttatcagttaaagcatatcaaatagacctgtaatcgtacggctcgccaagtgtgtcctgaattgccgaggaaacgatgtcaaactgcgagtccatccctgggaaagaaacaattaaaaactatggattaactagatatttaatttatttttttaatgattattcctttaaacatgccgggcaaaatgttctcccatcggatgacaatgtgttcgtctctgtcttcatttgcttttacagtgttaccgtacgcccaccactaccgtacctgcccggctatgttcgtgccaaaagcccagtgaatgcattaactaagaaagagaaatattttttgttagaatttatggttaggtgttatttgagctgaaaatttcaagaattggaatgagacctcaaaactccgtgaatttaggccaacactttttgaacctaattacaaggtaattaatcgaaaatggtcggacaaaattaattgctcatttgtcaatgttatataataatcataatagtgcccctccgtttttcacttcgtgtgttatcgtttcgttgaacagacagccgcgtcccagcgacagctcctgctttccgcctgttctgcccacctgtgaatagcatctgatccgggaggggaggggaagggaatggaattggcacggcacaaatgccactttttgagcgatgtacgcaggggaaatgccgctttgagttctgtgagtgtttttcgacaattacccctcattcttttaggcctaatttcaaatcttcgatcgggttggaatcatttgtataaagcattctgaatttcctggcacccaagcggccgtgcccaaacatctcggtccgctttcggccgtgcccaaatgtcccgtccgtttttgggccacataagcattgccatttcggtcccagttttcttctgtcccagctcacccgttgcccttcacaatgcttaaatagtccgtttcgccgcttcgcctcggtctgaaacggatgcagccgaaggtgcggcggcggtacgtgcgaaagacgcgctgcagaagacgagcctcactcagtgctgtgtgtgtgcccaaggcaattgtcggggtacggtcggaggagagcaaatacggtatagacttacgtacagaatgccacgtccaattcgtacggtacaacgcctttgggcctgaaccggggaaaggcgatcaatgtatttgatagcacacatgtgtgacgttttattcaaaatgttccgatcagatctgctgattatttaccgctgtgccctgactttttgtgccaatttttaccatttttcatagtgccaatgccaattttttcgggactctttctaagaaggcaccgcccttttctcccctgttggtgattaaattttctgatctaatctgttccacaattctcttcatcaattaccaaatcagctgccgatttcgcaatgcgttgaattgtatggccgggttttgcagcttcaaagttcagggaaatttgccaaaatgtcatcattttgccaattattttatttacttggcgcagcaaatgctcatcaacgccatcgatgtcgccttggaatttcccttaaatttgttttattttatttgtttatgcttaatttttctatacacagaaagtaattaatgagttaatttgatcagttaaaataggaaagtgtttcaattaaaaataagcgaaaatgaagtgccaaattatatttacaatgtcaatggtttggaaaggaacgcatttgaaattgctgacccgatcgaagccaagccggctctctgacaatggcagttgatgccggaattgggttcatctcttcataaacttctatagaagcggagctttctgcggaactttttaattgatctgtcggcaaattccgatgggattcggaagtgatcggaattgagtcgggaatgatttgtttgtttttctgatcagttggtggtccattcgggcgctgaatgtcgtccacccgttttgctccgccatcgtcaaaatttcccccgtaagaattgaacgcaactgacggcgaattggacaaaagttgcgcaacggcaccaccagcggaagaaacggatgaatcaccggcagaggaggaaaacatcgaattgcgcaccttttgaacatttttgacaatgatcagacatttttaggggtttagaggatatagaattttgatcagccaaaaggagagggatggaaaagtgaacaaaacaaaccgataaaaaatggcgttgatcggcccaagcgttgtgaagcggtacaaaatggaggagcagacggatgaatttggagatcattgacaaaaagagggaaaaatgggaagaaaaaattgataatgaatggccaaggaatgatcagcagcagaacaccaagtgataattgaatgagctgatgatgagtgatggcgatggaacagaa

SEQ ID NO: 22040 - DNA, 1988 bp, Heterodera glycines
  unsure (1)..(1988): unsure at all n locations
aataaaaatgcattttntagcgattatgncataaataatcgaaaatgaaaagaaattattttttacatatttaatcataaagccaattttttcatatctcttttcttcagacaaagtaaattttttaactgaaaattttgccgggaaaataagaggtgctagctagtcgtttcgtaaaactgccaaatttatagatttttcgactttcagaagttttctgaaagatatctatgtctttaaaattttattcagaactttctaaaaacaaaatgaaattttcagaaaattttatgctaatagagtaagtcaagagctatcgtatggtatcaagataatttctggttgtgtttaagaaaagctatgacgggttttcctcgaaaatctgtaaaattggcagtttttacgaaacgacccagcacgaaatgagagagacctatagataagaaaatctttttaattctttaaattttctaaaattacaatatcaatattggtaaatttgttcaaatcagttgcatgatacctggttcaaaattcaatccttcagaaaaacaaaaagcgggaacaaattgcaagtgaattgggtgtgacgattcatcaaattaaaaattggacaaggaaatttggcttgggtaagacatatttttttcttaaaatttttcacgcacccacaaaaatagcagaattcagcattacgtttttaggcaatcaaaaatggttgacagatcgccaacgaaaaatgcttattaaaaaatttgacaaaatcaaagaaaagcgcactcaaaacggtttaccagctggtgaaattcgagaattggaagaaaaaatcgcagaagaaataggcataaacattcggacaatttacaaatggagaaagaaatttggcatctcaggaagttggcaaaaataaacaaaaaatattaaaaattaataaattattttataggaataaaaaaatattattcacaagaagaagcacacaaaatttttaaacaaatgaagaaagaaagaatgaataagaaacaaacaaacaaaatgcggggaaattaattttcacataattatccccaattaaaaatacccatttcccctttttatttgttaaaaaaagtaaattctttgctttttttaaactatgtgggattggtattacaaatccgatcaattttattaattcgtttgttattgtcagcatttttcgataaatgtgacagatttacttgggatttattcttgttatttcccaaaaaatgctttttcctgaaaaacatatcttttgattggctgaatttcgaagaatatttaaagccaaacaaaagttggtcatggcacattcaaatctttctcaaaaatattccttagaaaaagtcaaaaatattaacccaggaaaaatatgtatttacgtatttttgccatcctaaattttattttgatagtttttgaatgcattgttgtttctcttaaatgaatagaaatcttttttaaatccttggaaaaattaaagttttaccttttcaactttgcactattaaacataattagtacttgttttttatcaattagtttgatcactgtactgaatatgtggaaaatattgatcttagtccccaaactcaaaaatgcttaaaaacaggcagaatcatgtaaaaatgttcgaaatgggttggaaaaatagaattagtggcgcgcttgccctttttcaggctgaaaagtgccggaattggagtgccaaactcagctgggacgactcaagtgaccgcactataaaaagcactcaaacgactttttctttttaaagaattttctagggtaatttgtggcgctgatcacgaatatgacctttattttgcaaaattccgaatcccgaaccgaattcgaacaaaaactctaaattcataaattaaaagaaaagcatatttttaggggttttcgaggttgttgacacctagggggggataggcttaagcaagcctaagcttaagcctaag

SEQ ID NO: 22041 - DNA, 3138 bp, Heterodera glycines
  unsure (1)..(3138): unsure at all n locations
ttcgacttagcacaaataaaaatgtacataataattcaaaaatttggatgcaaaaaagattaatttgagtgttttttaactcctgtaaaatctgtanacaaatggaatattggtggccaaaatcactgtgaaacaccccattttgataacatcgtatttttcgacttgaatgaaaggaacagaaagggttaggcgatattggaacaatttaattattttttttgcttttccggcacaaaattttttgccagtgttttttaaatttttgctccatgggaaaaaaaggaaatttagccaaattttgttagaaaggattctgttttttaagcgtaaatgtttcttatttaattatttttaatccttcaatttgattaattcccattagccttgttttaatcattgtttttaatttttcattattttaacttatttatataaatcacttaatccaattattgtgcattacctacagtatgaagaacccttgaaaaattaattacagtatcttttgttgctttttgttgattattatgtaattaattcctttgctgtttattataagtttttattctctttcggtaataatattttgatttcatgaattttttatttaatgattattctaaaattcatttttttttttttttgcttttcatatttaacccattaatttatgagtttttttttctttgaaaaatttaatttattcatttatctctaatttcataatattttattttattaaattatgctaaattccttcaaatttctcatttacttttccattttttcaaactcacgttcgtgatactattcgctggaaagtggattacaacttcggaataatttacaaatttaattatgaacgtcttctataatgattctttctaatgaatatttttaattaattatattcgtatatttataaaaataaataaacaatatatttaaattttacatttttgaattttcaacaggattagaggaagaaaagttaaaaggttttttctatgttaattgagccatttttttaatattttaaattaaatttaatttttgatgctttaataatgtattgagggtgaacagcgagaataataatgatgttttaattttcttatatattatatttacttaatttgattcattaaaatataaaaagtaaattcttttgattattattatttatttttaattattatatttagttttaaattgtatatatatttattgaattatatattttttgttgattttatgtttttttaattttgtcaatttttaaaagtttttattatttctttgatttaatctttcatccgatgcttctttggtcatttctgctttttaaaggtaattaattatttcttttcgcgtttatttattacagttttcagttgatcattcccaaattagccttctttaattattatttttcttttattttcattcttttttaagatattattttttgctaattgttttttgcttttttgaaaattattattttactttatgtaaaacaataatccaattcttgtgccaccttctccatcgaattattccatacattatagttttatgttctccaatttttcacgattttcaaaaaaaaaatttttatttttttgacttaatgtaaatcaataaattatatttacttttaattatgtctaatatatgaatgtccataacaaattcccaatttttcagtataatttttaattaattttcattattcttttaaaattttttgaaaatcgaaaacaaattcatttataaaaaaattgcctaaaataaaaaaaacaattgaacgaaaattagaaaattaaattaaaatgagaaaaaaatcgctgttttaaacaaatgagaaattgtgtctactgacaataaacgaaaataaacattttttaattttatttttagtgccttaggcatcaaatggaaagataaattaaaaaattttaattccagcttggatttttttggtgtttgttttatatttcctacatatcaatccgaattgaagtactattacacgagaaaattgtttttttccaaaaaatgtttcatttaattaatttaaatcaaaaaaaaatattatttttttatttcctttattatcatttgtagcctaagggttattttttattagcttgcaaaattaaaaaatttttattgtttttcatttttatttttgattttgctatttttttgtttttcagtgccttacgcaaaaacactatttatatattcttttaatatgtttctatttcttggattttttcatttatttggtaatttatttaatttttattanattatgcttaattctttccaaattctcatttaatttcactttttttttcaaattcacgtccattcgaccgttcgcatcagcgaaaggatggataatttgtagattttataatgtgtattttctgcagtatttccttctgtttattcttataattattttactttcatttaaaattgaacaaaacattttatttaatatattctcattatgacaattgcaaattaaaaaaatattatcaaattttatttaatgtatttagtatttgtaccaatctactcgatcgatgtctgtacaacagattaactgcatttcgtgggttctttttaaagtctcaaatttagatatattaattattttcttctggtttattaggatcaatttttactatatttttaatttttgtatttaaaattaaaaaaatatttattaaattctctatgaaaattgcaaataaaataattattaaatcgatttaatagtatatttatttaagattttatcatttttgtataattacttttatcctttttattaggttgaattattttacatattttaatttttgtataaaatattgccagcttcactaagttaatcaaataaatttatttttcacttttatttgggaacaaaaatcaaaaacaaattcatttataaaaaattacctaaaataaaaatacaattgaaagaaatttagaaaattattttgattaaaatgagaaaaaaatcattgagaaattgagtttattgacaataatcgaaaattaaatgttttttttggttttcagtgccttcggcatcaaatggaaaaaaactta

SEQ ID NO: 22042 - DNA, 1293 bp, Heterodera glycines
  unsure (1)..(1293): unsure at all n locations
cgaaaatttatacttttcattcatagaaatattagaacatattcaaaaattacccagtcttattatgtatgagtatagaaatcaagccttagttatggaaaaattagaaattggcattaaagaaacaaatatatttaaatgtcaaaaagcagagattatatctaataccaatttttagaagataaatgagttccaaaaacaagtgcgaaattgttgatttgacataaaaatgttatacaataaaattaggataactgcattaagccatttgtttaaacccgaaaacgaaatattttttagcccaaaacgaaacatttttgcagatattttttcaaaaaatttgagcaaatatcgcagtcatcttcgcatttgccttttaattttctcacaacttccttcttcattttgtctgcctttgtagtttctcctctctcacgttttgacccttgtgaggaggcactggagcttgcggcactcgttgatgccgtgatggcttgtcgagcagtttcacgctcttcaggcctttcgattcctagtcggctgtacgctcgtcgtacgtgttgctgtgtttgtttctgtgtggaagtgcttttttgtgaataggtagatcgctgcgatttgtcgctatcgagttgctaaaagagaatataatttttgcgacaaaattctatttttattacgtccaaaatgctccgcattacggttgtctccaccgggaacgattcactttcggcaatttcaagcactggcgtttcggaaatttcagagaatgcaacattttgatgttgcaatggttctttaaagaaaattagattacctatttcgatagtttatgaagccacagaaggattttgtctcaaaatcaggtcaataaaaatcgggtacccggattaagcaccttttttattgtaggaggtccaactgtgccgatgtgttttctgagaatttgaattaatatgaaaagaaattatgaaattttccaaaactttgcccgtttttactagaaaaataccaaggcccatttaatgaaaagataaataagatttcccctaagtccccccaaaaaatgtgtaccaatgtttgtcgtactacttgtacttgccacattgttcagaggctcaaattgaaacattttcagcggtattgggcgtagaatttgttgttgttgttgatgttgttgtgttatttgtgtttgtgtaggttgagtttgtgatggctgttgttgatgatgtttttgttgttgattttgttgttgttgttgngtttgtgtttgtatttgtttttgttgtgttg

SEQ ID NO: 22043 - DNA, 1465 bp, Heterodera glycines
aaccttggcgcgtattgttcaaaacgatctttctaaatataaattttattcttgcaaagtttataaaaatagttatgaaatacatttgccgggctcgggcaatgtccaacatgttataaaccagcgctcgagcataaattgttgccaggaggtttcccaacaaaaagccgctctaaattaaaaatcaattgtttcttgctcattatttacgtgttcccaaacatcttcatcaaggaggtagacgtttgaccaacgggtcgtgaggacatttttccgacttgtttgaaggtaattatataacatttgcgctcttccctacagacggcacattctttgatgtcatacaaagatgctgccaacacttcgaaatttttttcggccgaatccgccttatcgaattttcgtttttaaattctgtaaaaatagattttaagattttgtcaattatatcacttaatcaaatatttattatgaagctaaacaaccaatttgctaattaatatttttataagcatctttaaactaaaaaattcataaaaactatgccatttcgcacaacaaacttttctatgaaggaataaaacgaaagtttgatacattggtttaatggcacttaaatctgtcgaggacggcggtgccaaaagtgggtaattattatttaaactcctccattgactagtaaaggaattaatgagtacacttaatgaaagtgaaacatacaaatgccaacgcgtagaagccaatcatcgtatgctttgggtagctaaaatctcattacattcctctactcactgtctcttctgtttatcattgaaattttaatccaaaaactgagattttatattttgcaattttaaaaatttttcctttcttcgtgaagttattttcaaatttttataaaatttatttttaaaggttgtttttcatttttccattttgttaaagaaatttcctggaaatcccggctttttaaaatagtttttcatttttaatagaaatttcatttggcgaaattttgtgaagaatggaaccgtgccaatattggagctaagcggggtctatgccaaggcagacggactcattttaattgatcggaacagattcatatcatcacagacaatagaaaattttagatttagactttgacctttagaaccaaagattactgaaaagcgaaattttattggaaaggtacagcacaatggaaaagtaccattttttgcaatttgtttaattcaattgctctatacccaaagtaaaaagcaaaatttaaaatcatgtctcttaaacaatgttcttgtaatttaagataatcacgtcaaatacaattctgaggaatggcaatgacaattcattaaaacggacaattaatgtaaaaccagggaatgaataaatcagaaataatgagtacaaatttgaatgtcaaaagatgttcaatttctttaatgcttacatgtttcaaatt

SEQ ID NO: 22044 - DNA, 2124 bp, Heterodera glycines
ccccgcgctgctgttgggtaggtttctataacttggctgtaagagcaaaaaatcaaaaaatcgcgtttttgaaatgttttaataattcaagaaaaatttccccaaaaataagagaaaaataaattttaaattaaaatattgaataaagcgtatctgagctaatacaaactctcaaattgtgagtcgtagtctgtccaagcattccgtcgttcgtcctacccccccccctccctccggctctaggaaaatccgacaccggaaaatccgacactggaaaatccgacacaagcagaaaatccgacaccgctggaaaacccgacactagcggtaaattcgacactggaaaacccgacacgacaccaaccttaaatttaaaaaatattttttgattattgagttaatatctggctatgtttatcaagttttcgaattgaatttaaaaaaaaacggttgcgccattcgatgggatattgctggcaaataataaaagggttgtcgattgttgcgagtcgcataaatctctgtgagattcatgtcttgcaccacgtacactttcttatgcttcatgccctttcctctgattcgatttgccgcattttttacaattttttgagatgatcaaaaaagggcattgaaataaatataattattatatgcctaccttaaatagattttatagcaataaaatatttattttaaagaaatagtttttatagcaataaaaatattaattttaaagaacttaagttttgtaacttttattacatgtattttaaatattcactgactcaaacaataaaaaattattttttaaatttaaagttggtgtcggattttccagtgtcggattttccgggctcccggcataacaatccagaaagggccgagggttcaattcccgcccagggccgctggcgctcaacccttacagcactcacatatttgaagccaatgctgaccaaagcgggcacaaaattcaggcacagctcaaagcatattgtgacgatgatcatgcaattgttcttataaaacattacaaagaaaaaaagaaattaattttttcattaatttttcgttgaattttaccattttcaacagcacattgactgagtgtaagctgcgcataaaatacacacagcaaacaatgttcaaaatgctgattgtacatttgaaaaacagttgtggcatgttgccccattttagcatcaggcaggaaaacgactcgcaatcacttgcctgtactgaaaggggaaggaaattgcgtaattttttaagtacagcataaacgacaatttggggaggtgatcaaaaattcagcgtaaccagcaggaaaatgcgtcagtgatacgatacttacagagataaggtacggtaatgttattcagacggcggctgttatgaagccaagattggtcatggatagggaaacagacatgtcagtctcaaacatcatatacgacatacaattggtgatgttcaacggcagttcgtctatgtaaatgaatgtactggctgaataagcggccaacattgtgccaatgccgacccagcacaaacggcgctcaattcgtgcctgtttggtcgggtttgtggccaatttgatgatgaagcatcgttccatggtcagaaataagacggccagcggtgagattagcgtgtacgaattttgccactggcccaaccagtaaacggtgtaaattgtgccagcggaatgctgcaaattgttttttaaatttttttgaaatcttttaattggaagagctagggttagcatttttaagcaaattcctaaaattcctgcgcaaatgtggggggagggataatcgggtagggtccccgaattttaatgacataatgctttcgattcagtaccaatttttcaaatcataactgaggttggcaccagagatggaattaggaatccctaaaaaaatttcgaaagtcggaattccgtcccaaaaaatggtatactgacaactcgtacaaaaggcaagcctacaatgcgtaggctaggtttaagctaggcttaagcctaagctttaggctaagcctaggcttaggcttgcttaggcctatgcttaaactttggctttattttgtaaaaaaaaagtttattgtttgcat

SEQ ID NO: 22045 - DNA, 2163 bp, Heterodera glycines
  unsure (1)..(2163): unsure at all n locations
tgttagctaattagtcagcgtctatttattttctgtaanaatttgcctcttantttaaaataaanttaatatattcnnatgaaataagacactaaatgtatagagaatgaattaacgtggtcgatgganataaatggaaaaaaaagcaaagtcaaaacacaaaaccttaaagcactagccgattgaaataaatggaaaaaaaagcaaagtcaaagacaaaaccttaaagcactagccgattgaaataaatggaaaaaaaagcaaagtcaaagacaaaaccttaaagcactagccgattgaaataaatggaaaaaaaagcaaagtcaaagacaaaataggaactttatacaaatttaaaaaagtaatattttgtatattgtatatgcatttaatcaaatttctactttctttataaatgttagctaattagtcagcgtctatttattttctgtaaaaatttgcctctttatttaaaattaaattaatataatttcatgaaataagacactaaatgtatagagaatgaattaacgtggtcgattggaataaatggaaaaaaaagcaaagtcaaaacacaaaaccttaaagcactagccgattgaaataaatggaaaaaaaagcaaagtcaaagacaaaaccttaaagcactagccgattgaaataaatggaaaaaaaagcaaagtcaaagacaaaaccttaaagcactagccgattgaaataaatggaaaaaaaagcaaagtcaaagacaaaaccttaaagcactagccgattgaaataaatggaaaaaaaagcaaagtcaaagacaaaataggaactttatacaaatttaaaaaagtaatattttgtatattgtatatgcatttaatcaaatttctactttctttataaatgttagctaattagtcagcgtctatttattttctgtaaaaatttgcctctttatttaaaattaaattaatataatttcatgaaataagacactaaatgtatagagaatgaattaacgtggtcgattggaataaatggaaaaaaaagcaaagtcaaagacaaaaccttaaagcactagccgattgaaataaatggaaaaaaaagcaaagtcaaaacacaaaaccttaaagcactagccgattgaaataaatggaaaaaaaagcaaagtcaaaacacaaaaccctaaagcactagccgattgaaataaatggaaaaaaaagcaaagtcaagaacttattctacctaatttcatggtgactgacgaggcatttgactcccttaagagagccttcccttctcatgtacttgtacctaaaatgttgttggcacaaaaagtaaagggggaaaaagaagacaaatcatccgatcaagggctaagtctcaacagatcgcagtgtaaaagctgctctactgctaacaaccccctgaccagtagtcaagtcgtatacaagtgattttgcgccccgacgttccaccatggcacacgagtgctacggctttggcaatgtgcgagcaattaagcacgcacatcgggccagatgctggggcatttgtgctgcaccgcaagcggcgcataagtagtgcctcccgacaccggggagcaagaatattgctatcttgcctaggcgggattctgacttagaggcgttcagtcataatccctcagatggtagcttcgcaccattggtctatcgaccaagcacatgaaccaaatgtctgaacctgcggttcctctcgtactaagcaggattactatcatagcaacaggtctttagtagggtaaaactaacctgtctcacgacggtctaaacccagctcacgttccctattggtgggtgaacaatccaacgcttggcgaattctgcttcgcaatgataggaagagccgacatcgaaggatcaaaaagcgacgtcgctatggacgcttggccgccacaagccagttatccctgtggtaacttttctgacacctcttgctggaaactttacacattcaaaaggatcgataagccacgctttcgcggtccgtattcgtactgaaaatcaggatcaagtaagcatttgcctttttgctctacgagaggtttccgtcctctctgagcttgccttaggacacctgcgttacgctttgacagatgtaccgccccagtcaaactccccgcctgacactgtcatc

SEQ ID NO: 22046 - DNA, 976 bp, Heterodera glycines
atggccttctattctacagggaatttttaaatttattctctatgccagaaaaatggctatctcttttttgcgagaaattttgtaccatacaaatgttcccagcatgggcagaggggcgcggagagcaatggccattctattctacagggaatttttaaatttattctctatgccagaaaaatggctatctcttttttgcgagaaattttgtaccatacaaatgttcccagcatgggcagaggggcgcggagagcaatggccattctattctacagggaatttttaaatttattctctatgccagaaaaatggctatctcttttttgcgagaaattttgtaccatacaaatgttcccagcatgggcagaggggcgcggagagcaatggccattctattctacagggaatttttaaatttattctctatgccagaaaaatggctatctcttttttgcgagaaattttgtaccatacaaatgttcccagcatgggcagaggggcgcggagagcaatggccattctattctacagggaatttttaaatttattctctatgccagaaaaatggctatctcttttttgcgagaaattttgtaccatacaaatgttcccagcatgggcagaggggcgcggagagcaatggccattctattctacagggaatttttaaatttattctctatgccagaaaaatggctatctcttttttgcgagaaattttgtaccatacaaatgttcccagcatgggcagaggggcgcggagagcaatgggcattctattctacagggaatttttaaatttattctctatgccagaaaaatggctatctctcttttgcgagaaattttgtaccatacaaatgttcccagcatgggcagaggggcgcggagagcaatggccattctattctacacgggaatttttaaatttatttctctatgccagaaaaatgggtatctctttttttgcaagaaa

SEQ ID NO: 22047 - DNA, 1147 bp, Heterodera glycines
cattatgaaaggagttatatccaaaaaaccggcatgcggctcaattgtatcagtggaaaatctcgtaaaattttgctctcaaattgcaggcattgtcagtatgagtatataaaatacagtatgggcatgtgaaatttgttaatattactaattaaaaaaagcataaacaaattggtacaaaataagcaaaaattttgatgagggttcaatgattgatcagattttctgctttggatttgattttcaatgattgatcatttgtgactgacagtgatcaatgttcaaaaaggcgagaattatgagtggcccgtcaaaaactggccgtcgggattcagatcaaatgaaatgctagccaaaaaacttaaattttctgattaaatgatgactaatcattaccaatttctgatcttgagcattgaatgattattggtctcataaaagtgttcagatttttttcaaattattaaaaaaaaatttttttttgacagactgtcaaatgtgtgttccttgtcaaaagcattgtgaaaatgatcagaacaattcctgataaaacttcttggcaacataattccgatgaaagaacatgaagcgggcaaattcttgaataattaatacctaactttttttgaataatgtaaacaaattcgaaatcattcgtcctccaaattaactaattaggcagttgtgaaatttgtagtactttttggacgcatatccacaaaatattcgagaacttttatgcttaccgatcaattccaatgatacgaatttggtgagtgaagaagctgatgctatataatgtaatgaatatctgttggtttctttgcctccaattaatgcttaattgaaccactaaactaccgtatctcactttcaaacattttgtagacacagttttttttcttgaatatttgctcaatgttttgcaaagcattttctgatttactgttgtaatgtctctgtttgttgcaattagcctaacattcaaaatgatttttttttaaatttttattattcttttatgttttgggaggtggtgctggttggttattcttaaaatataaatttccgggcttcctcataatttaggtcgaccatttggccccaccaaatgttaggaaactaaatttttgttcattttggcact

SEQ ID NO: 22048 - DNA, 2092 bp, Heterodera glycines
tggtctaattaaagtatggccgccaaattcaatttgtgcctgctgctggagcgcggccatttcaactacattggccgcgttgaacaactgttcgatgtccaacgctactgcatcgactgtgaacggcgagcacacctgcgctaccacttctccggttgtaaggttgtgtgccgcctttgtttacggtttgggcccgaatatccgtgccaagcacaacaggtacttttcgaaataaaattaaatagaaaaacgtactaaaaaattaagcttccaaacggcgcaagtactgcccgacgttgtgctgcgtgccagttcatctttccaaacgatgactgctacgactaccacctgatcgaacatgctccagctccaatggatgcccgtggacagcgtcagcgtcagccaatctgtcaatggcgccgagtgtgtcgtgattgcgggcgtatcgcctaccagggcaagcatcaatgcccatgccaacaccctgatggcaacaggaactgcaaacgttgtgacgggccacacacgaccgacgagccctgcttcatccagccaatttgcgatgcgtctgctcgacaacgcgcatcaattgctgtcgataacgatgacgacaactccgatgacaacgacgaagacaacgacgaggacaaagacgacgttttgccgcttcgactttgcttcttcgatgcagagacgtcgcaggacagcccgctccagctgaacaaccgattggtgcagaagcacgtgccgctgctgatcgtcgctgaagtcatctgtgaacgttgtatccaggcaggcatcagcgttaacgatgggcttggaagaagagcgccggattgtgtttgtctgtgtcgtatggtgaggggacaacagttgcgccagtggtcttcaccaccgtttgccaacgcacccggagacaacacagctgtgccagtggaggcgccgacattcaaccagcgccgcttctacttccactcattcgacaacgacggcaacgacccagtggaccaatttttggattttttgactcatcatgggccaaaaaaggcccacacggtgtgcgtcgcgcacaacggtggcaagtacgacttccatctaatccttgaggcactacatcgccgaaatatgccaccaaagcgcctgtgcacaacggggctcaagatttactccatgcgtctgtcgggacgtaaccaacgacgagtcaccttcaaagactccatcaattacttcttctgtgaattggatgcgttggtgaagagctttgaactgcccgaacatcaggcgatggttaagcccttcttcccctacctctacattcagcgacaacatctgtcgcagcgcctcaacggtctaccggctcaagagttttactcaccagacacgatgaaagcggacaaacgggccaaatttttgcgttggcatgccaacaacaacggcaacagatttcaactgcgcgaacaactcatcatgtactgcgccaacgacgtggccattttgagggagtcggttatccgatttcggcagctcatcgccgacaacacgcagggcctcgaccccttcctcaacgcatccacggctgccggtcttgcgctcgccacgcttcgtcgttgttttctggccccaaatcgcctggtgcactcacccgagggcggctacctgcgcggacgtcgtgcttcagctgagtcgcagcgctacatacgcttcttcgagctggagaaccccggagcgcaagtgcaatgtgcaagctggtccgtcggggaggcgcacattgaggacaccggctaccgcgtggatggtctttggcgacgcgatgcgcctctccgtcccctggccattgaatggctcggctgttactatcatggtaatttttttttccttaaccaaaataaataaaaattaaggctgcccaaagtgcttccccgaccgacaacagcgacttgcggcgggacgcaccgcagaagacctgtatgaacggacggagcggcgcctatttgagctggagcatgactatggttgtgagatccacaaggtgtgggcatgccagtggagtgaacgaatgcgccacgacccggagctgaagcgacggtacgat

SEQ ID NO: 22049 - DNA, 923 bp, Heterodera glycines
  unsure (1)..(923): unsure at all n locations
ctgcagagattctatgtcaatgaaagttggacagatatcccctttattcattatgttatttattgttgcagaactttattcaccagtgtatcgagtttattgctttttcattacccatttaaacgcatcgcttcgttttttattacggtaaaatgtcaacaaaattctttttcgaaagtgtttattctccagttaaactcggctcttccttccccgctgccgttaattatcttttatagtggtatctgagcgattcatctctttttttacaccttcttctcttttgtgtgcctttcttcctcttttgccagtccattttctcttttttcgcgcttttatacatatatttacatatgcatagctttgcgtttatgctttatgtacatattcctacatttatagtactatttattccccaaaaaactcattacacgagattagtttcacacatgtatttatgtatgactaaaaaaagatattttattttatcataaaagttaaatgttaattttattattacggcaagtgtttgttttagttttagggcttttaaataggaatttattttttaattactcgtattttgctccccccccccccccttcccgtttcaaaaagagcttatatttgaagggctctccaaggaattaggtaggtaatcaaagtgatttcaaaaaattttatttgacttttaagtaaacaaaaatccaaggcacacacctaaatgatgaattctagagatcgacctggacctggatttttcctggatccaggtcattttttggcaacctggatttttcctggacctgnatttttgtccaggtcaaatgtgaaaaaaaatccaggtccagggcaaacacgaaaaacctggatttccctggacaaaattttagaattattatttcaagtgaccgatgtttttt

SEQ ID NO: 22050 - DNA, 1110 bp, Heterodera glycines
ccccccccccccccccaattacaagtgcactttttcatcggcaattggttttttgcacattgacaagtcgtctcgctttatatgtataaaggctctttgattttgatgcgggacggaaaagatttttaaaaaaaggaaatacaaattctcgagtcgggagacaaaattggtggccaaactgttcgggagagggggggggggggatggtggccgtggttacggtttttttgttgttctgacggtgatttaatgtgccattccatcacaaaattggccagaggatcaccgaacctcataataaacacaattggcattggggcgtgggaagggaattgagttttgtcggatgcgcaagtgaatgggcggcgtaaaataaaagtgaatgtgcggaggacaaacgaacaaacgaacgaaagtgagggaggaaatgggcggtgggggggggagaagcggagaatcgatggatttgggagagcgcgacggaatggaagggcatcggacggacgatggaaatcggtggtcggacgggacggacggaccggagggatttggggggggggaagaaggggaaagggatcggacattgttggataggggcggatgatctccccatttacactcccttctttcttcttttcatcccatcccattgaatccgccgattttctccaaaatttgtgtttgcgcgagcggaacggaaaacagaaagcacttttggggagagggggggggggatttgtgtataaaaagagaccaaagagaccgaccaattcattcattcaatccgtccgtccctccgtcttcccgcttcgtttgctctgctggcggagatgaagcagtcattcacattcaatttgaacgtttttctcattggagaaaaaaaaattatttttcatagaatgctaatccaaaaaataaaatcatatttttgtgcatatttaacagtcaaaaaaaaactgaatgaataggcaattaaaaagaaatatttattatttcaaaataatttatgcctctcaaaatcttttgagaattatttttaaaaattatttttgcgtaaatcgaagcattaacaatttgaatcttttagtgattgcatgaattcttttgact

SEQ ID NO: 22051 - DNA, 2551 bp, Heterodera glycines
tatcggttattttgattgcttctcttttgacatacatatgtgtatttattgaaaatttacgctgttttgtttttcttttctctctcacatacaaatgagtgactgcagagacaacattatttaagagaaacagtataatagaaaacgacgaaaaaaggaagagaaatgcgagggaatgaaaaagtgcgttgaattttggaggttttctcttgcatttaatgcaccccatttcataaagacaaattatttttccttcattttcccgctttgccttttgttttgggggttactacttacttgactgtcttcaaaggatagtcggaatttttggaacggggccaatccggaatggcccttaaattaatagattttaattattattttcttttgaaattattttcaatgtatacaaatgcaaatttgtatcaaataaaaaaggaattttaaaatagtgcataatttatattcatgctttgatgatcggatgtttgagaggaaatttgtttgtttgtttttttaatttattctgaattctacgaaaatgagtaaagtaatattaattaaaattttgtttattaaatttagtggtaagacatccacaagatttattttttttattatcaattttcattaatcattatgttttccgcttttttaccctgatcacattttatcctttataataagcattggttctaattttaaaaattatcaaaaaaaattcatcaacttttacttatcgacgacccatcccaattgaaatgcccttgccgccgcccatgttcattgccaccgcttggcaccagacgccgtctttaatcacatggcaaaaattgtccccggttgctgacagccgcatctttttctggaaagcctcgcggcgatcggctggcgaacatgcaacaatgaaagttccgcgcacggcacgcgacaatgcctaaaaaatgagaaaaactttgggatttcaaatcagcgccgtatcccgtatccagaaaaaatcaatgtgtcgattggcggcattgggaaaaagctttaaaatttttaacttatttttactataatatataggtaaaaattgtttcaaattcaaaaatgtacacaattttctcttacatttttttaatctttaatttcaatggacgtgaatgcttttaattttttagaaaataagcaaaataattaatttttcatttttctttaattggcacagaattagtcattcttgtttagaccaaacaaatatagaaaataattctttaatttttaatacaatttaaaactttgaacaaaaataaataggaaaatgtttaccgtttgcactttgttggtcgattcatttgggttttttgtgattgcctttgggaaaaaacatatatatttaaattaatttttaaatttttttataattatttcactttttccatcgcttccttccatgtcggttgtgggcagggcggcgcttcatccgaaaaagccatttctgtctctttttggggttgtgcattttgtccacccaaatggggaggtgccatcatcggtggaaggtcagtctttttgattaaaaaataattttgtatatttaattaaattagtttttacaaatatttaaattattgtcatttttaagaatcacttggcgttggttgaattgtggtgtcattccttggtttgtaaattgttgctaaaaagaagtatttttgtttttagaatagatttttgcctattttgaaacctgatttggcattggcattctgttttgttgagggataaacgtttgcggttgttgcaatgctacgaatccctttttaagatttaaacgatgcatgatgcaattaggcataagatttttctaaccgcctgttgagtttgttgtgcctgcggtggtgttgcaaaattttgtgaaaattgttgctgctgaggctgcatcatgttttgctggcgatagatattaattatatttttttaaattttaatatttaaaagtcataattgttagtttattttcctaatattcaattattaattttgttttggtcacacaaatttgcgcattctttcattttttaattttagaaaaatctaaattcggcatccatttaatttaaaagctttgaattactaagttttctttttcaatttttaagatttatttaaattaaaaaataaataaattttacgatatttctaaaaatgccttaccgccaaatttcctcccattccgctggattgaacctgggatgctgagccatccaatgcgtttgtgtcccgttggatgacgaaaaatttctgtccattgccacctaacatctgttggctttgtgccacacgggcattgccattatttacccggacattttggcatttgcacattgccagaaataaaataaaaacaaaaatttgggaaaacattttctgaaacatataaataatcgtcactttgttactaatttgacgaaattatgaaacgcaaaattagttaaaaattttcgtaggtagctatttttgattataagcaaattggttttaatcaatgcaaaatatgaacatgaaa

SEQ ID NO: 22052 - DNA, 1293 bp, Heterodera glycines
ataactattttttctttccatacgttcttgtagagctcgagctgctctttccaatggtcttatcccggtctcgatccgtgccgaactcacaaagttatggagtgaaatgtgaaatattgttttcaccacaaggcattttttctgaaaaccggattcaaaaatctggggtttggtataaccgttttagaaatagcgtagaaaacagcttcgatatcaagaaaccaagtcaagtccagaaaggaatattttaaaacgatttcgttttgttttggcattatgataccgaataactttcggaaattatggaaacaaaattggagaaattcgaataattttttgactgcaaatttttttccttttttgaattgggttcaaaaaaattttaagagaatttttgattattaatttgaagtcttgaatttatttgacaaatccaagacttaaaactgggagaagcaaggggctgtggctggggcctaaaatttgggccacattggagaattaattctgatttctgaaaaagtcccagaaataactattttttctttccataccttcttgtagagctcgagctgctctttccaatggtcttatcccggtctcgatccgtgccgaactcacaaagttatggagtgaaatgtgaaatattgttttcaccacaaggcattttttctgaaaaccggattcaaaaatctggggtttggtataaccgttttagaaatagcgtagaaaacagcttcgatatcaagaaaccaagtcaagtccagaaaggaatattttaaaacgatttcgttttgttttggcattatgataccgaataactttcggaaattatggaaacaaaattggagaaattcgaataattttttgactgcaaatttttttccttttttgaattgggttcaaaaaaattttaagagaatttttgattattaatttgaagtcttgaatttatttgacaaatccaagacttaaaactgggagaagcaaggggctgtggctgggggcctaaaatttgggccacattggagaattaattctgatttctgaaaaagtcccagaaataactattttttctttccataccttcttgtagagctcgagctgctctttccaatggtcttatcccggtctcgatccgtgccgaactcacaaagttatggagtgaaatgtgaaatattgttttcaccacaaggcattttttctgaaaaccggattcaaaaatctggggtttggtataaccgttttagaaaaagagtagaaaacagcttcgatatcaagaaaccaagtcaa

SEQ ID NO: 22053 - DNA, 1969 bp, Heterodera glycines
ctcctccgatcgttcgatgccttggcacgcgaacttcgcttgccctcgccggctgcacttacgtccttttcctttccggcttcctctttgtgaacacattctttctctacttttcttctgcccttctcggattgggagctgctggtaagccataattatggcgagatctttaattgattttaatgaagtgatctggacagcgcaaggcaaatatttggcattgaacagctccgagcagacggctggcaagcacagctcgctatttctggcactttccctggcgtggtccgtatacttcctccattcatccttttccgtctctctctttcaattgccctttcatcctttcccattttaccatcgcctttttcttgtccgttcagtctctcattcggtggtttcttcctcctaatcatcttcctggtaaatgacggcagtgcttccctctcctcctcctactcttcttcatcgttttccctcaataattcttcctcctcctcttcggccgatatttctccttcctttgaccatcccaccatcaaactcatctatggcagcttcactggcattgccctgctcggtgtggctgtgctcgcacttttgccgcctactcggacaaattcgaaggtgagttatgtgaatgacaaagatggaataggggtggaagagttggagatgaagaagagagaggaagagcgacggaagaagcagcaggacgacataactgatcagccacggcgggaggagagcagcttggagcggatcagtcagtggcaatggcacaattccaattttccgcgtcccctcccctcttcttcagtggtattggccgcatcgcgcaaaatggccgcattggccgttgtcttcggctacaccggcattttgttgagcttttggagcaggtattacataagcggtcaattgacccctctcttttcgcttttagcatttttcctaccgcactgatcaacactcttcaaatgcgttcccaattcagtcccaaaattctgattgctttgaatgccattttcaaaggcttaggacaaccgttttgttcgttcttcgggagatccgtcgatgacattccctttttaagtgagtgtccttttcgaatggttccgtctccaccgcgtaaagcgcagtcggctggtgttcgtcggcatgcttctccacctgttggcctttgtgctcatcttcctcatccttccaaatgaaagtccgctcggtccaaccgacaaaacggcgatcattcggccaaagtcacttcccccactgtcatttctctgctccattaatctttgttggtggtcattacagtgttgtgatcgcacttttctgcggctttttgctcagtttcggcgacgctttttggagcactcagatttttgcatttttgatcacaaattaccccaaccgaagtgccgagtcatttgccctcttcaaattctatcaggtgccctccccctcccctcccccgtcttcatcgccaattcccttcccaaattcagtctctgctcacttccattttcttctacctgtcctctcatcttctgctccattggcatcttctgattttgtccatttccgttatctttggttatttctcttttgttgtggctgaaaaaatggaaggacaacgaaaaaccaacggaacaacggagcaaaaataaacatttaactaattgcataattacacataacctagggatgtcaattttatgtaaatacatatttttttctggcttctccatgctctaaatagtaggaaaaacactcttttttgtgtttgctgacaaaagttgggacttttatttacatatttcggggttttacacatattttgggattttatacatatttggtacatatttttgactttttcttacatattttcatttttttacatatttcgaagattttttacggaaaattttgaaaatcctcaaaaaaaaagccaaaatttcggcaa

SEQ ID NO: 22054 - DNA, 1274 bp, Heterodera glycines
atttcacagagaatttttaaatttatcttatatctaagaaaaatgactatctcttattttgagaaattttatacgttacaaatgctctcgagcatgataggaagtgcggcgcgcaatcgccatttaatttcacagagaatttttaaatttatcttatatccaagaaaaatgactatctcttattttgagaaattttatacgttacaaaagcgctcgagcgtgagagggagggcggtgcgcaatcgccatttaatttctcagagaatttttaaatttatcttatatccaagaaaaatgactatctcttattttgagaaattttatacgttacaaatgctctcgagcatgataggaagtgcggcgcgcaatcgccatttaatttcacagagaatttttaaatttatcttatatccaagaaaaatgactatctcttattttgagaaattttatacgttacaaaagcgctcgagcgtgagagggagggcggtgcgcaatcgccatttaatttctcagagaatttttaaatttatcttatatccaagaaaaatgactatctcttattttgagaaattttatacgttacaaaagcgctcgagcgtgagagggagggcggtgcgcaatcgccatttaatttctcagagaatttttaaatttatcttatatccaagaaaaatgactatctcttattttgagaaattttatacgttacaaaagcgctcgagcgtgagagggagggcggtgcgcaatcgccatttaatttctcagagaatttttaaatttatcttatatccaagaaaaatgactatctcttcttttgagaaattttatacgttacaaaagctctcgagcatgataggaagggcggtgcgcaatcgccatttaatttctcagagaatttttaaatttatcttatatccaagaaaaatgactatctcttattttgagaaattttatacgttacaaaagctctcgagcgtgagagggagggcggtgcgcaatcgccatttaatttctcagagaatttttaaatttatcttatatccaagaaaaatgactatctcttattttgagaaattttatacgttacaaatgctctcgagcatgataggaagtgcggtgcgcaatcgccatttaatttcacagagaatttttaaatttatcttatatccaagaaaaatgactatctcttattttgagaaattttatacgttacaaatgctctcgagcatgataggaagtgcggtgcgcaatcgccatttaatttcacagagaat

SEQ ID NO: 22055 - DNA, 1807 bp, Heterodera glycines
  unsure (1)..(1807): unsure at all n locations
tttcatcctgaaattttttaataaatattttcaaacttcctccacattaatttaaggagaattttgccttttaataaattctcttgtgaaaaggcaaaaaaataggcttttttaaaatatgcctatttaaatgacttaaatttttttcacttttaaatttatttaaattttcaattttttttagctttttccgaaaaattttgtcttttttttcggcaggcactgcctctgacaatgttttttatttatttagaaatataaatttattttttttctttttgatttattttaattatatttcatcctgaaattttttaataaacattttcaaactttcaccttattaatttaaggcgaattttgccttttttaataaattctcttgtgaaaaggcaaaaaatagtctcttttaaatatgcctatttaaatgactttaattgctgtcctttcgcttacgaccataccacgttgaaagcacgccatcccgtccgatctggcaagttaagcaacgttgggccttcttagtacttggaacggagacgtcctgggaatcgaaggtgttgtaagcttttttacttttttcacttttaaatttatttaaattttcaattttttttggcttttttcaaaaaattttgtctattttttcggcaggcactgcctctgacaatgttttttatttatttagaaaaaaaaatttattttttttctttttgattattttaattgtatttcatcctgaaattttttaataaatattttcaaactttcaccttattaatttaaggcgaattttgccttttttaataaattctcttgtgaaaaggcaaaaaaataggcttttttaaaatatgcctatttaaatgacttaaatttttttcacttttaaatttatttaaattttcaattttttttagctttttccgaaaaattttttgtcttttttttcggcaggcactgcctctgacaatgttttttatttatttagaaatataaatttattttttttctttttgattattttaattgtatttcatcctgaaattttttaataaacattttcaaactttcaccttattaatttaaggcgaattttgccttttttaataaattctcttgtgaaaaggcaaaaaatagtctcttttaaatatgcctatttaaattactttaattgctgtcctttcgcttacgaccataccacgttgaaagcacgccatcccgtccgatctggcaagttaagcaacgttgggccttcttagtacttggaacggagacgtcctgggaatcgaaggtgttgtaagctttttttacttttttcacttataaatttatttaaattttcaattttttttggcttttttcaaaaaattttgtctattttttcggcaggcactgcctctgacaatgttttttatttatttagaaaaataaatttattttttttctttttaattattttaattgtatttcatcctgaaattttttaataaatattttcaaactttcaccttattaatttaaggcgaattttgccttttttaataaattctcttgtgaaaaggcaaaaaaataggcttttttaaaatatgcctatttaaatgacttaaatttttttcacttttaaatttatttaaattttcaattttttttggcttttttcaaaaaattttgtctattttttcggcaggcactgcctctgancatgttttttatttatttagaaaataaatttattttttttctttttgattattttaattgtatttcatcccctgaattttntaataatattttcaaactttcacct

SEQ ID NO: 22056 - DNA, 1470 bp, Heterodera glycines
tttgcccatattttacattccttgtcagttgtgtattcgtcaacaatgctcttttcctccgccctaaatcaacagaaggtagcgccaaatgcaagcgaaatcgcgggacgtggcaacgcaaaaggatagaattccgtcagaggtggagccgagcaacattcattttgataaaagcttatttttactctttttcagtgaaccgttcagtgcaatcaaacggagacgaaggaatggaaatggttgaaatgaccggtaagaatggacgaagcattgaaaccgttgaaaaacgattgacaattttcattttcagagattcgctacgaacagaagcaacaggtcgccgccgggggtctctgctgctgctgcataccgtgtggctttttcaacgaatcgtcaaacgaggaaccgccgaaaatcttcaaattcttcatgacaaaaaagaagactccacaaccgcctccagcagcagaagtcgtgcaaccgcaaaactccgttccatcgccaaaggcccttcctgtcgaaaactacacactcaacgcgacgtttaggaaggaagaggcgcgtggatacgcaaaaagtgaaaaataatgtctaaattgaatgtttcccaattattactcattttcagtgacttttaagaagagcaaaaagcgtgcagcacagaccaaacagccgaaactcgtcagaatttcaattttcttcgctttcccctgcaaaatttccacttcttttaggtttcggcctccagtcagcccagcgaaacttcggtgttgggtacggcttccgcatttgcagcaggtgtcgttgctccgcataaaaaacaacaaatatttttttcagcaagcatcagaacccctcagtcagtgggaagccatgtcggtccgtcgaaaagcaaacacgaaatggattctccctccgtaagacactcattacccacttatcgtccgctattatatttaaaattgtttagaatccgacttcaaagggcagcgcatacttttaagaaggaaggcccatcccatttcaactgtgagagatgatcaaagaaagcgcgaagaattgccgataattattttgaagatgatgatattatatatatatacagtcatggtcataagtgttgtcccatcatgctttgaaaaaaataattgcgtataaattgtcattttccaatttcaacagataagtagcataccattggatagcattttttatgggctttccaatgataccatatttgcatttgtgacataaacatttatttgatttattttaccatattcacaatttgatcaaaatataggtggacaaaagtgttgtcccatttcatttttaaaatattgcttctctggatcagcattaaaaaaatctaaagaaattcaggtaagcataactttggatgctgatcaaaaaaggtagcaacacctagatgatcagatcactccttcatggtgatctgataagcccatt

SEQ ID NO: 22057 - DNA, 715 bp, Heterodera glycines
ttgttgtgtctcaatgtcggacacacaataaaataataaaacacaatttatgtcggaggtcaaatgcagtacaaaatgtaaaatagcaaaatgaataagggggagggattgacacgtcacaacattaatcaataatcgatgcgcgccaaattcaaattctttaacactccaacacctcccttctttaagctgaaccctcaggggtttggcgagaagcggatcggcgctttccgttggcgttgcgatcgacgcggggccaaaggaggactcggagatcgtcgctttgcctgagtccgtcgaattggtgccggttgcggaggaggctcgcggatcggcgatgggtcccggtcttgctcttcttgagcctggggtgggatccttaccgtatcattaccgtcctcctcaagaggataacggcgtcgcagttggtttgcgtgccggtggacgtttcttccgagagccgggacgtggacacgatacgtcggggacttttccaatctttcgatgatctttccatttagccaaaatctctttccacggttgaaattcaaaagcaaaacgggatcttttggcaaaaactcaaccgattttgatccttggtgttgatcaaattgacgggccatttttcgcgcataatcagcttgtgatttgcggattttggctgggtcgatgacttcggcttgttcttccttcggatggacgagagacagctgag

SEQ ID NO: 22058 - DNA, 1294 bp, Heterodera glycines
cttccctctttctcattctcatcaacattgctctcctcccagtggctattccttctcgggtatacccagttctgggattgttcccaaatttttaagtttgtccacatccctccgtcaaaagccaattaaactaattaggtgatcattagtcccttcctctatgattaacatgtcccttataacattcatttccactcaccccgggaaaaacagatgatttaaatgctatttggcatgctttttccattcttcaatcattataaagtcttcggcccccctacacccaattaagaccaacaaactaattgctttttcattccgtttccccaattttggctttatcaccccacccgactgttggaccacctctttggccttggttctttcctttatttttctttgtttttttgaactttttgcacaaataataaatgtgttcgtcacttcgtcagtcagtcccaattaattaactaattaattagttagggccatcaatcagcaattattattctttcgttgtcactttgtcttttttcttcccccccccccttttttttaaaccattcatttattcattcgttcattctcgtgttttttagcaaaagagttcgccatttgaaaactgacaaaatttttgttaaatccttagagacattccattttttttgcggtttagtgttaattaccaaggcttttcctcccctcccccttacactaatgaccctttcattattttcttagatcattgccattttccaaccgcttttgcccttttgctgatcattctttcccatcaaaatggtattcattaactcattgccgtctctgttgtgtgccgaagagactgtgaattgtgagtatccgctcgactcgggctccatgttggcctacgtggcaccgcaacggtacagcaccgtattggccgctgtcaccaagggcgaccaactttgctcgcttattccgcccgcacatccgcgccgcaagctgagcattgcacacggcggtggtggtcagttatttgatcacttttaagtgccaatgccaagtcagtgtttgcaccgatcgggcggcacgagaaatagtggattctgataatggatcagtcgctttataatatcagacatatggctaatttttgatcatttttgaattttatcagttaaagtgagtaattgtgtaaacacattggttttcttcgctaaaatgatcccattgatcattcctctcccttcttcaggcattgacgacataggaggttgggagggcgttttggatttttgcgatgctttggact

SEQ ID NO: 22059 - DNA, 2270 bp, Heterodera glycines
acttttatttttatatctttttttaaaatgtttttcttctggggaataaaatttatattatagagaaaaaaattgcgcttttttgtagtattttacttttctcaaatagcttttcagaagggagttacgaatttttttctgaaaaatcgaatttttccagaaattctggaataatttttttattttggaagatagaaattccaaataaatctcataaaattctcccaatttttctctatttttaaagctttattccactaaatttgaccaaaaacgaagagatttatgaattttcgaaatttcacaggattttccggggctcaaattttgacgatttttcaaaaaattttaaccaccttccaaaaagtctgaaacacaaaataaagcgtatatacgtattcagcacctcaaattatgccataaaaatgcattttggctaatttaggagcaaaaaaatttttcatgaaatgcaaaaccatggggtcccccctatggttttgagttttaaaatcacaattaattttataactttttttaaactcatggtaaaaacatgagataaagcacattagatagagcttaaaattctctacaaaaatgctctaagacaaattttcgctaagatcaacgcctgacgagttataagccttgaacggaaatggggagctcaattccggaaaatttttctatttccggaaaattttgaaattttttcaaaaatgccaccaatcgatagagctcgaaaaacggttgcttgaaagtggtctccgttttcctgggaaaaatctgcaaaaaataataaaattcaaaaacgaaaaattttcgagggggccaagctcgaaaaattttgaaaattttcaaaatctgaaaacgtcatctgatgcagctttaaaaactacacaaatgcgcaagcggcgccaacccgctccgcttaacccccagcgagttattcacgaaaagccaaaaccggcattttgagcgccgttcagtcgccaatttctacaggctcggcatttgatctgatcaaaaagtgatcagtgacaaagttgtagccaacatgtctggggtgtgccctctcagcggactttttccgctcccggttccctgagaaaagttacagtccgaaaaccgcgacgattttttttatttggccgtttcagcgccgctggcgctcaactggccgccggaccgaaaaatccttatttttcccagatgcgcctcaaaaagttgcttaagcaatgccgcactttcaggagcctccgggcaaaccacggggacttataattttttctacgagttgcaccttttctctatatatagtagaaactagcgggtgcgtgaaccgtcggctatttagctgggcaaaagcgcttcgcgctttgggagcttcgctacctagactgtgaagcgattcaaattgatcgaattggttggagatttttttttgaatttttaaaaaattattatgggtttttagtccacatcgaggctcaagatgggctcttcgcgcccttcgcgtcctcgaacggcgctttgcgcccgtttctaatttttgttgtgcttttcggccgcttcgcggcctcgaacgggcgcttcgcgcccgttttttaaattttgttgggccgcttcgcggcctcagtcgggcgcttcgcaccggtttttcaatttttgttggccttgaacgggcgcttcgcgcccgttttttaaatccgttgaactcatacgggcgcttcgcgcctgttttttagcttgttaggccgcttcacggcctcagtcgagcgcttcgcccgttttttaaattttgaggtacaacagcgattagaagagtgattagaagaggtacaacagtgattagaagaggtacaacagcgattagaagaggtacaacagcgattagaagagtgattagaagaggtacaacattgattagaagaggtacaacagcgattagaagaggtacaacagcgattagaagagtgattagaagaggtacaacagtgattagaagagtacaacagcgattagaagaggtacaacagcgattagaagaggtacaacagcgattagaagaggtacaacagcgattagaagagtgattagaagaggtacaacagtgattagaagtggtacaacagtgattagaagaggtacaactgtaattaaaagaggtacaatagtgattaaaagaggaagaacagtgattaaaagaggtacaatagtgattaaaagaggaagaacagtgattagaagaggtacaaaagtgattagaa

SEQ ID NO: 22060 - DNA, 1632 bp, Heterodera glycines
ttcaaatattaataattagtgaatataatgcccacaacattaaatgtaacattacagaaattcttctgtttcagtagaccagttatctctttctgatcaacatcccaatttaaatagaaaaaatcaaatagcgattctttaaaaaaatatcactgcgtttgcgtttaaacaaattttaattttcatttttttcacccccttttctcataatttgaactcaattgaatgtttaatgatgctgcatccatcaaatttttcttaattcgataagccctcacaatgtccgcgtcgaatagcgatgaaagcattgaatttagtctttggctccattctgtccaattcgtctgctgattatgcttttttccctctgctgatgaatgctcttccgtaaaaatgttgtcctctaattctattccgaccaaccaaatttttcggtaaaattgtctaaaaataaaaaatgaaatgccaaaaagtgataattaaaacagagatgaatacgatgtaatccaaattggaaaattttaaaggagcaacaatgaatgatcagaggacattgaaatcaccgaaacaaataaaattaatcagagtttcaaaagcctcattagccagacaaaaaccttaaaagtcgtaaaatgcaatcaaacaaaggcctcagcataaatgccaaattttgaaaattagcctcattattggggatgggatttataatccgttagtctcacgaactatgccttattaattttttttttctaaaacattctatcgcttttacgttaaatatttatttatttaaacattggcatttttttataaataaattaatacaatccttaattatcagtagagctcgcattttgaggcatatgcctttttttctacgcactagtttcgatatattaagcataaaaaacgcattttccacttggtttgaggcttctacgttgacttttattatgcctttttttgcctttttcgggattttcgtgccttaaatgctttttctggcattttgccgttttggtgccttttttggcgtttttccgaaaaattccattgaaaatgcattaaaatctggaaaatacacgcttaagaaatgactcgaaaaaatttcagaaaatacactcctaagaattgaaaaattttcaaaaattttttgctaaaatttcattttttcaataaaaatttttgagttgaaaatttttccttattcgaaaaagctataaagaaaagaggagggagagagaagggagagacagaaaagagtagagaaaaaaagagactgagagagaggtgaagtagaggcagagaaaagagagagagagaggagagagtgaaatggagagatagagaggggggggaagagagtgggggagaaagagaattagagaaagaagagaagagagaaaagaggagagagaggacaaatgagagagagggagagagaagagagagagaaacagagaaggagagcgaaaactaatttgtgagagaaaacgatggggattggggaaatgtaagagaaagagagagcgaataaaaaggaaagatatgacacaagagagagagagagagagtgaaaagagagaaaaagaatgaaataagaatcgcgagagaaataaaaggagagtgagt

SEQ ID NO: 22061 - DNA, 1301 bp, Heterodera glycines
  unsure (1)..(1301): unsure at all n locations
agtatatgttgtgaacttttgtatttaaaattgcagttggagaacgcattttgcaatactccaagaaggatggcaagcaatcaaaagattctttctttgtgggaatggccatgacgtttgtcgtgcgttcttctgcgtagcgagtaattaaaaaaattattcaaaaagattagtgatgaacgatgctttagaaatttactggccaaattaaccctaaccatcaatcggaaactgcttcttacattgacattagcagttttagtttatattttgccgattttctgtcatacgtattgattgggctgatcatttggacacgatcaacacaaagtctttccttttattaaaaccaaattttaacgagtttttggcattgacgcgttaaataatgtaaatttaaataattagtttcggcacaaacgaaaaaattgacagtttctgtcagtgttctcatggcaattgaactcatctgctttattttggtcagcatattaaatgtttaataattaaacttaaatattaatcatttcagaatacactctttgctcgtttcatatttccattgctcaattttgacgcatttgcaattggatttttcgttatccaattagtagaggtgcgccgtgactgagaaaacctgtgaaatgtgaccgtgaattttttgagttaaatttttccctgtcggcgaactttttcgttttacactgtattttgtggtataattttccaaacaatttcttttgtgaaaagggggtccataggcaccgataaacgccgccacaaaaaattttgaaaatttgaattcactttgtgcacagattttgtccaaaaatggtcaaattttgagaatctgaaccaattttttaagaaatgaatagcttttggagcccggcggtgccgataggcgccgcagggggaaaaatctaaaattttagtttaatttgtgtacagattttacccgtaaaatgagccaattttgcaattttaatcaatttaaaaaggcaaaaaacgatgaaaaaatttaatattttttcaagtaaaaaaaatcgggtacataagtgtgcattggcacgcgcgccataatttgcattttctcatcatttagcgttctaaggttttgtgagacatatgtaattacctaatttttaaagaaaaataggggttttagtggaaatttttgaaaatgggctttgttaacagcttttgcccaaaataactttatttcgagcgagttttttttaaagaatttaatgagttttattntanatgtggtcatccttgaaactttgctttttatttgt

SEQ ID NO: 22062 - DNA, 2169 bp, Heterodera glycines
ttaccctgtgaaaatggcccgtgaatttacccagtgaaacatatccgtgaatttacccattgaaacatgtccgtgaatttaccccgtgaaacatgaccgtgaatttatttaccctgtgaaacatggccgtgaatttacccagtgaaacatgtccgtgaatttatttaccctgtgaaacatggccgtgaatttacccattgaaacatgtccgtgaatttaccccgtgaaacatgaccgtgaatttatttacccagtgaaacatgtccgtgaatttatttaccctgtgaaacatggccgtgaatttacccagtgaaacatgtccgtgaatttacccagtgaaacatatccgtggatttaccccgtgaaacatggccgtgaatttaccccgtgaaacatggcccgtgaatttacccagtgaaacatatccgtgaatttaccaattgaaacatgtccgtgaatttaccccgtgaaacatgaccatgaattacccagtgaaacatggccgtgaatttaccccgtgaaacatgaccgtgaatttatttaccctgtgaaacatggccgtgaatttacccagtgaaacatggccgtgaatttaccccgtgaaacatgggtgaattactccgaaccatggctgtgaactgaagtcgtgaatcatgactgaatatatcccgcaataattattaattattactattatgaaaaatatttttgaaattttgttgatttctagctgtatttttaacattccatcttttttttcactttttacacatatttaggtgacaatttagcgatttaattatttatttatcgtagctctaatatttattttttatattaaaaattcattaagataaatgcttctacattcttatattctttttgccattttctgtggcatttctctttttgatatgatatcttcgatgagtgaaaatgtttttcctgcaaattttcagacttatgctggcacagtttcaccgcctgggttctacaaaattatcgtttgggacaaactgacaatgagcaaattgaaatccgaaaactgcgcagatttatttttttataagcctataaaagtcttttttaaagatttatattaatattttattgcccaaccccggaaaaattcaaaaaatatcctttaaaattttattttattgtattctattattagggttaaaagctttttgtaagctattgcttggcaattcgacaaatatcaaaaaagtaatagcatgaaaactaaaaaaatcaatttttttgaagtttttcttcataaattttttgcaggctagaaaatctttttgctttttgtaaggctaatagagtatgtgaagagctttcgaatgatatcaagattgttggatttggttgacaaagaaaaaagttatagatcaacaaaaactgggctggggccgaaccgtgcgggccgaaatgagccggtccggttcattttgtttccaccgttcagtaaagaatgggtcataagtttgaattttgcgcaatgccttggcatattcaatttcaacatttagaataaataatttttcgtcaatttaactttttgattttttcacaaacatcagaagtcggctaacccattttcagctgtgtttcaaggatatattctccatttttgctaaaattccattggtttgctctcactttgtttatttatcagtggcatttttgcacattccatcggaaataaatcgaaagggcggggcattgggtttgaatttgtcactgatcacatatattcttggcattttgtcctcagttttcgtctccgtccgtccatcggtcggtcggttcggctccttctcagtgcgcttatccattctgagcaatgttcacattcgcaatgtttattggcacccagcgctgctgttgcggactccaacgccattgctgttgctgccgtttgacgcgcttcttaatgagtcaaaggcaaaaatgccaaaaacggaaattagaagccagagcatggcgcaccatgccaccgttgtcggccgcgtccgcatcaaaagggttgttggaattagcagagacgggagcgaccaaagacccctgaagcatggcacttttgaccgggtgttcaatgaattgcttataaaaggtgcctacccaaaaaggatcacaagcaaaagccaggagggccaattt

SEQ ID NO: 22063 - DNA, 2142 bp, Heterodera glycines
  unsure (1)..(2142): unsure at all n locations
gattttgattttaaatgaataattcttatttttgttctttaaggctatgataatcaattctgcaaaagatatgttccatcaagaaatggatcaacaaatattggaatcattctcgaacagtgcagatcacaacttgactgagcactcaacaaatggtataaatcaagaaaaattacaaaattaattactatttatttaatcgcattgtaatggatactctgaaaacttattaaaaatagtattttagaaattaatttttgagaattttttgttctcactcttacagataggacgtatactgtaaagaattttttgtaatatcgctgaagtcaacttaaattattaaatttttatatttttatttaatttgttataaccattaaagatggcatgactgatgaggagatacaattaatgtttgaatataaagacaattggactaagcaatatgagcaaatgctgagtagattaacgccagaaaaacaggtaataaattaatatttttttttacaaacattttgcatttttttaaaattaattttattacaatggaaaattcattttctgaaaattccttacacaaacgcaataaaaaacgaaaaaccactcttaataagttgaactaaaaaaatttcgtacaacaacaaataggcatccgttttttgtgattttgtacctaatttgtgcctgttttgacattgccgatttatgcctttactggcgattttttgtgtaatatgtataaaatatcaatttattcataaaaaattgaaatttaatttaatttaactttttgaaatttttttaggaaatggttataaattatgttatcacacaagaaaatgatattgaattattgaaacgattcttgaaaactgatcgttacgaattgcttcgggggttaaagagtgagtttaagttgcttatttgtgccatgacaaaatgaacataaaattgagcataaaaaaaataagaagccaagctacagtaggacgagaacggattcgtttttcgctaattagtttttaattacaatgattttttttttgtttgaaaatatgaaactctaataatttttgtctaatttcgtttttcgatggaaacaatacttttttaaatttgaaaacttgcttcgggggtttcaaggccttggccatgattatgatatcctattttttatcgaaaatgaataagtacgaattgaaaaatccgtttttttaatctaaaaaattgtaaaataaaaatttataagtttattgaatttaaattatttttaagccaaatttaaattgctttttgtagatatttataacgaaaaacgtcatttcataaaaaatttaaaagtgacatctaatcaaatgaacatatgaatattttatgataattaaataaaggaaaattcaatttttttttttttgttaaatgaatttataaatttaaatttagataatcggcttaaaaaaaagctaattgaagagatgcttggcaaaatggagcttgaagagtttaaaattcaaattgcacaagcgattgcgattaacgaatcaaacaacccaccaacagatcttagaaaggaatcaaaaacaaaaccaaaaattcgagttggtagaaaaaaaattatttttttaaataataaatttataatttaaaactaattagatatttaaagtaaaatggaacattttttacattattttaaggaacttaaaattgatgcccatcaatcatcacaaaatttggcaacaaatcttcgtgataaaggcaaagcgaaactggaagacggacataaatctccaaacattcgggtaaattcagttgaatcgcatatatttaaaaataataatgtttaaaaaatttaataatcaaaatggagcaaaaatattttattttttaatgaagagtttgaacttttaattttcaaaatgctaaacttaaaaatattataaacaaaacaaaatatatttttaatattttattttttaatgaagagtttgaacttttaattttcaaaaatactaacttaaaaatattataaacaaaacaaaatatttttttgcggcctaatttattgtttaattanataattaaacatttttgtagaatatttttttaattgtttggactttaaggaacgccaatctt

SEQ ID NO: 22064 - DNA, 1158 bp, Heterodera glycines
tttcccggggcccaaatagtgacgatttttcaaaaatttgtaaccaccttccaaaaagtctgaaacgcaaaataaagcgtatatacgtattcagcacctcaaattatgccataaaaatgcattttggctaatttaggagcaaaaaaatttttcatgaaatgcaaaaccatggggtcccccctttggttttgagtttcaaaatcacaattaattttataactttttttaaattcatgataaaaacatgagataaagcacattagattgggcttaaaattctctacaaaaaagctcttagacgattttttgataaattcaactcctgacgagttattgcgccagaactgaaattgaggtctagcaaccaaaaattttctatttccaaaaaaattttgaaaattttttctgaaaatgacaccaatcgatagagcatgaaaaacggttgcttgaaagtggtctccgttttccccggaaaaatctgcaaaaaatactaaaattcaaaaacctcaaaagtgacgagggggcctagctcgaaaatttctgaaaatttcagaaatacaaaaacatggttggatagagctcgtcgagctgtacaaaaaagccgcttacaccgacctcctccctcaaaaccccgacgagttattccgccggcgctgaaatggccaaaaaagtaagcaatttttccacgactgtacacggaatacagtaggccgtagagaaaaatgattggaagcgaagttgtagggcacacttcaacttaaaatcctcccagcaagcattttttgatcaaagcaaaagaaaaaaatttcgtaacagtgagactgaaacgaaaagccgtttcagcgccgtcggcgctcagttggccaccggaccggaatgcccatagttttcctggatgcgcctcaaaaagttgcttaagcaatgtcaacatttcaggtccccccgattagccgttcccgagatttttgttttagcaatgagttgcactgttgttctaaggtatataaactagcgtgtggaaattgacgggggcggcgtaggccgttgggttttggatgaagataaaatggacatgctcatttgttattttaaacagacaaacattaattgcattagtgtgaagttttaaagcgctatcgcgctatgggacgcggtttc

SEQ ID NO: 22065 - DNA, 2555 bp, Heterodera glycines
cgcgaatcgcggatcgcggtcgcgtcccagccctgatgcactgtctgctttttatccgctttttttttaaacagcgtaggaacaaaatgaaaaaacaccacaaattaggtaggtgcaataacgtaggattatgcgcagtgaagaaatacctacatatgtagtttgagatttctctcacaaattcacgccattttatactcaaaatttttccactgaaaaaagttcgttacagaagtgtataaaagggcacgattttgcttggactgatcattcatattattaattcaacacatcttcaattgcctacctacctaaatcatattttgctgataatggctaccacccatcagcataatcccacgcccgaggtgtccatttttgtccatgtttttttcaacacatttaattttttttcgtccaggtgaaggagctgtgcaagtgcctggcgctggacgacaatcagctgcgcgacattatggcaaagttcgagatggaatacaaaaaaggccttgacccagtgaccggtggagaattttgaccatttttacccccttcgtaacctccctctcccattttcagctccgacagcttgcgtcaaaatgcttccgacgtacatccgcgcgattgctgttggcgaagaaaagggcgaattcctggcactggacctcggcggaaccaattttcgtgtcctgcgcatcaccttggagggcggctgccgttctacgatgcacaacaaaatctacagcatgcccgacagtgttcagcaaggcaccggcacggaggtgagttttgcggatgattcagaatttgttcaattttaatgtttcaacaattttttcagctgttcgaccacatcgctgcgtgtctggccgactacatgcgtgagcagaatctgacgagccattcgaagatgccgctcggcttcaccttttccttcccgtgccaacagaatgggctcaccaatgccgtcctgacaaactggacgaagggatttacggttagaaaattgatttctgaatatttagtaaactccatttttcaggcttctggcgttgttggggagaacgtcgtccatatgctgcacgacgcgttcaagcgacggggcgacgtggacatcgacgtagtcgcagtgctcaacgacaccacgggaacgatgctcgcctgctccttcattgaacaacattgctacgtcggggtcattgtcgggacgggtaaagaaacctaattttttgtttgattttcaattaattcccctttttttcttttcaggttgcaatgccgcatacatggagcgactggagaatgtgccgaaactcaagggaattgtcaactccgcggaaggtaaaaatgggaggtgacgggagcccgtaaacggcattaatttttgaaacaattcagatggtctgccggcggagatgtgcgtcaacacggaatggggaggattcggcgacgacggagcactggaccaattcctcaccatctacgaccagcagttggaccagcagagcctcaaccccggccgtcaacgcttcgagaagaccatctccggcatgtacatggtgggaaattttcaaatttaacaacaaattatgttaaagaaagttttcagggtgagatcgtccgtcttgcgctggaggacttggcacgtcgcgggctgttgttcagcggcgactccactcgaatttccgaacgcggctgcatctccaccaagatggtgtccgacatcgaagggtaaaactctgctctaaaaagtgcttaatttcccttcatttgcaggtttatgcacagcaccgacgggaacccattcgccaaagtcggcgagatgctgcgcgccattggtgagttgtcatttgatcactttagccattcaacatcccaatatcccattttaggcatttcgaactcatcggccgccgactgtgcaaatgtcgcctacatcagctcgttgattggcacgcgcgccgctcatctctgcgcctgtgggcttgccgccatcctcaaccgcatgcagaggccccgcgtgactatcggcgtcgacggctccgtgttccgcttccatccaaccttcaaattcaacctcgaccagaagatcaaggcgctgttggccgtcaaatgcgaagtgagttacatagtttctaatatcgtttcggaatgatatgaataaatctcctctaatttcagttcttcatggtgctcagcgaggacggaagtggacgaggcgcagcagtcgcagcagcagtcgcattgcggatgaatcgccttgtgggagcgtgaacagcctgtgacgatgccgtccgatgtcagatgtgtgaatcttaggccccataatgtcatatgtattgtaatgttaggcattttgtcccatgtctgtctgtatataaggttgaattcctaagcacaatgatgttccattattcacaatttgtatcaattgttcatttgtattgtaggtgtgataaatgagaaaacatttatgtcgttgcaaagaaaactggaaaattggtttgcctatttcagtttcagaagttggcactcgtttagttgggttttgttca

SEQ ID NO: 22066 - DNA, 908 bp, Heterodera glycines
acaaaaatttcttccgaagagcggcaatttcaggggtgtgggagtggagaggaaggaatttttcggacagattgcgtttttctttcacactctctcttccctcctttcaagtctgccgaaattttaatacaattgaattgaaaaaatgttgatacaaactccataagcttagcggattccaagacaattataaaaaaagaaaaaaaaaagaaagaaaaaggttttctgtaaatcagcagaagagccgataagagcgatggatagatttaataataacaaaaaaaaaggagtagaaaaataataattggattcatttttttaccaagggacagaagcgccttaaagagaatatgctggcagttgcaagtaatcgcaaaattaaaaaaattgcgatatgcaccaaaagggttcgaaccggcgcatagtgcaaaactgcgcgttctacgttattaaagaaaaccagcaaaatttttcagtctcttctatcccacctatatcctagcgcagaggaaagaaagcgcctaataaaataaaaaatcaaaaaatcatattaaaaaattcgtctcagccaggaaaaccggtgcgccttgtgatgctttgtccgtccccacccatggggggggggggggggggttctccaaattggcttctcctcaacagtcaaaaatccacaatgccggcacagctaactcttcgccaggagcgccacgtgctaaataatgcttttcgggtcgggctaatacactgcttctcctccacaaatatttccaagacggagacaaatcactttatttaaaaccgcaacaataaaatgggagaagagtcggaggaaaataagaacaaaatacaaatatgaaagtgcactgccaacagaatgaattgaagggaagacggggggggggggggga

SEQ ID NO: 22067 - DNA, 1247 bp, Heterodera glycines
  unsure (1)..(1247): unsure at all n locations
gaggaaaaagaagatgatcaaagaccaattaagcacaaaaatatggccaaatggatggattancaatagaaaagtcatacataattntacacaaatgcaaattttaataatttttttgcatttttgcttgagggcactgtcggattttttttttcttagtacaacagaaaaattcatgtggcacaactggttaaatttgtgttttttggcaggtcacggttcgagtccaaagaccgaaaatttgtttaaaattccttacaaaggctcgtgggcttgaaccatgcacccacccctccgaaaaaacacaaaattaaccaactgagccacagtaacttcgttactgaaaaaaaaaaaatttttggtgccccaagtaaaattatcagttttattggcgtaaaatagcgagactgtccccatcacaaaatacaatgaaatgacactttttcgatggttctcggaattttcaggttcaaatttttactcgtttttcgagttattaatggggccccagactcactattttacaccgtgccaaaattgtatcgaaatttatcggcttaaaaattcaaaacccacaagtttttgctccagtcgccctggtcgtaggttttgactttgttcagcggagtcgcccaactgacgccgccgcttggcctcgagtttgtgttgttattattattcgagctgaaggacgaagtttggttcgatttgctgaagcctccgcttttgttgtctgaacacggaaaaagggaaaattagggagaaaaaaaagaaaattgtgagaggagaggggggaattctttagagaatttttggaaggatttgataaaaagaagtaatttttgtcgagtttaatgggtatagaaaaaaaatagtgtttttgaggggggggggggagggttttgggagtagcattagcataagttggaatatttaggggaattgaagggaaaaaaaactgaaattttaatgggggagggggaggggttaaggagttaggagagaaaaaaggggcggtgagttggcaggggtaggtagaaaatttttttttgttagggaggtttgggtcgaaaaacggttttcaatgttgaaattttttttttgttagggaggtttgggtagaaaaatagttttcaaactaaaatatgcaaaaactcagacaaaaagaccccattttgtttgacaattttggtcacacccataaaagagctacaataaaaannttgcaacaaaaaccanaatttgat

SEQ ID NO: 22068 - DNA, 2063 bp, Heterodera glycines
  unsure (1)..(2063): unsure at all n locations
tcttttgtaaggattttgtgccaaaaactacccttcattttcaaaatggctctaaaattttttttccaaattccgcgtatttttattaaagtgtccgctttttagggtttttggtaccacattttttgatttaaaaaataaattttttaatgatttcaaatttttaatctttagccgatatttcggacatatttcgtccatttacaatcaatatttcactcttgatttttttgtttttagattgatttgcaacgacgtttggatggatattttccccctttttgaccgtcctcaactcggtctcaaattggcattgcttttgtcacgtttcgatgtgctgttggacaaacatttcgatgccaaaaaagtgaattatttttaagggtttttgttctattaaggattttgtgccaatttggggcctccgattctgcccgttttaaaagatttttgcacttttaattcttaacattttcagcaaccaatgaaaatttcttccagtttttaatttgaaaaaaaacaataagatttaccaatgcagttatatatacaaaaaggcagaaatttttcattgcacatttaaagattttcaaaaattttaatagttttttatgtgttttttgaaggattttatgcgtaaaatatttaatggcctccaagtaggcaagtttttttgtttttttttgtgtgtaaaaatgagaatgtttcaattttttaaattatttttttaggatttttttccaaaaaaccgaacttcaattttcagaatatcaaagtggcggacattctcccctttttgaccgtcgttatcttaagagaacatttttttcttaaaattaaaaaatctttttttttggaaattttacatttttaatttaattttttggccctttttattcattaaaaaatctttttttgtgatttgtacctcttctaatcactgttgtacctcttctgatcactgttatagcttttttcccattttttaaataactagagcgcaaaaaaccttttttttcagcgacgaatattgattatattttattattcattttctcagtatcaacattgctttcgccccgtttcaatgctctggtggacaaacatttcaatggaaaaagcggattgaagtcgtaagtttcattttttcaaattggcaatgaaaatatttctaagctctaaaattttgattggattcggtgcttaaaaaggaatttgtaaatattttttaagaaatttgcgattttacttatgtttcagcatattttatctatgttttaaattattttatttgataattaaaaacggtaacaccttaagggaaactttttctcttataattaaaacttattttggaaatttgatattttaatttagttttatggcccttttactcaattaagactacaaatggattttctatgaacaaattttctcatttaactaacatattttttcaaattttcagctgggtttgcaatgatgtttggatggacattctcaccttttgaccgtcctcaactcggcctcaaattgacactgattttgcctcgtttcaatgtgttggtggaaaaacatgtcaatgcaaatgcgaattttttcaaatttcggtaagtttttttgtaagtgattggttttttggttacttttaactacaataatagtgtttttatggaatttaggcaccacatacctttctcgggttcaaaaatgactcaaaattattattttttactaaagtcagtattttttgttaaagtgccgggtttttatgggnctttttggttacttaatttaattgggatttgaaatgcaatataaataccgattctgacatccattttgacccaatccgaactccaaacccagattcgaacaaaattcgaaaaaagtcgaaaatttttttttcaccaaaattcacgttcattgctcaaaattgatttttaagggggttttttcgggtcggngaaaaccgattcntgacatccatttaaaccaattcgaaataattgaangcgattttgtgcataannatgtgaatttttttgaaaaatggattttga

SEQ ID NO: 22069 - DNA, 1797 bp, Heterodera glycines
ttttaatttttcagggaacattcgaccgcttcgcgacctcaggacgggcgcttcgcgcccgtcctttttaaattgttaagaacattcggccgcttcgcggcctcaggacgggcgcttcgcgccccttttttttaatttgtagtgaacagtcggccgcttcgcggcctcaggacgggcgcttcgcgcccgtttttttaattttcggtggacattcggccgcttcgcggcctcaggacgggcgcttcgcgcccgtttgtttaattttgtggggaacattcggccgcttcgcggcctcaggacgggcgcttcgcgcccgttttttaattttaatcgcacagggattctgaggtcttaaccatctctaaagtaaaatctgattgcatattcgtgatcagcggcccaaataacccctaaaatcatatttttggaagatttttggtgaaaaaaattttccactcaaaaatcatggtcacacccctgtggtcccggatgccaaaatcacttttatttctataactttttttaaaaaagtgataaaaagctaaattaaaatttgtaaaatagagcaaaaaattgcggattttttgagtatattatttttataaaatactttttcagaatggagttaggaatttttttttgaaaaatttaattttttaagaaattatggaataacttttttattttggaagatagaaattccaaacaaatctcataaaattctccttattttttgctatttttcaaactttattccactaaatttgaccaaaaacgaagagagttatgaattttcgaaatttcactggattttccggggctcaaattttgacgatttttcaaaaaattttaaacaccttccaaaaaatctgaaacgcaaaataaagcgtatatacgtattcagcacctcaaattatgccataaaaatgcattttagctaatttaggagtaaaaaaatttttcatgaaatgcaaaaccatggggtcccccctatggttttgagtttcaaaatcacaattaattttataactttttttaaattcataataaaaacatgagataaagcacattagattgggcttaaaattctctacaaaaaagctcttagacgattttttgctaaaatcaacccctgacgagttatgggcctgggactgaaatgtcccgctcaggccaaaaattttttctatttccgggaaaaaattgaaattttttcaaaaatgccaccaatcgatagagcttgaaaaactatgttttggaagtggtcttcatttctctgggaaaattcgttaaaaaatcaaaaaattcaaaaacgaaaaattttcgagggggcctagttcgaaaaattttgaaaattttgaaaatttaaaaaacccatcttatagagctcatcgagctgtacaaatagtttgctggcgctgacccgctcagctcaaaccccagcgagttattccgggagtaaaaaaaaacggaaaaaaacgaccaatttttacagagttttccagaacgcacgtttgttctgatcaaaaaatgtttgctggcaaaattgtctggcacatccatcttcagggcctttaattagccgattttcaaattatgcttttaaaaaatatttatagcccaaaaaaggcaaaaaaattttgaaaaaagccgtttcagcgccgctggcgctgaactgtccgtcggatcgaaaaacctatagttttcccagatgcgcctcaaaaagttggttaagcaatgtcacacttaaaacccacccccggcgcccgttcccgagatttagtttttggaaacgaa

SEQ ID NO: 22070 - DNA, 1688 bp, Heterodera glycines
tccgttgcgagcggatgggtcggttggaggaagacgggggcaacgcatgggcggcgccggacgcggacgaagtcggctgatgcccgctcggctcctgccacggcttcgggctcgtacggtggtcatccgtccctacggtgttcgtccgcctcctcccctttctttccgcgtccgcttcttccacttcgtccgccgaaatgcaactgagcatccgcagcctctgctcagaaagttggtactggtcctgctaaatgatgccatgccgattgcccgacttttcacgtccttcgcttttcctaccagggcgaccgttgccaattggtggagcagcagaaatgccgagtcggtgctgcaccgcagcacattttggccaaatggcgtgccgacaatgccgtgcccatcggtgccctcctcctccgccgtcttttgcccattgtccgctgatccgacggcgtccgccctttgcctttccaacccggcaagtgccttaatccgtttcgtgccaatttggtccgtttctcctctcttttttcttacatttgccatttcttttgagctaatttcagtcccataaatttttcttaacatttccaaatgttcgccgtccatttttctataattgacaatgaatattttaactgttaatgaaattccacctaaagcagcaaacaatttgaaaatttcctacgattgaataaatgggaaattaaaggggaaacttccgaattaaatggacagattaagccgaggaatttgggggagggggaggggagggggaatgatctccgagcaaaactaaataaataccccattaacaaggaatgtgttgctgaaggcatttagcgggggtaaagtggaaatgttcaattggcaagaaaacatttggccgctttttatgcacttagaaccgattctaaggtgaaaatattaattattgggcctattaattgggcgaagcaaagagtgaacgaatgaatgggtggcttatgcctatgcttatgagtaaggccaacggcgaaatgcccgggggcatttgtccaaaagaaacatttgtcgcctcagcaacaaaagcgaagaaaagtgagaaaagggcgacggggggagcttaataataataataataataataataataataaagtacaaattaacaaatgggtaaagcaaagggaagaaagaaaaagcaaaacgaagtaaacacttttataatggcaaattaatgggaaaagcagcgaaaaaatggagggggcaaaggggggacattggcattggcattggcggggaggggggaggggggtggcactttgtgtgtattgtaacgaaagaaacagtgccaaatgccacggcaaagggccaccgattgctaagcatttaattagcaccgatggcgcaatgtgtgcatgtcattaggcattcgcacaacactgccaccttataaacaataattcggtgttatacccttctgttacttttcctcttcctctaataaaaatagcattaaataacctgtataaagaaacaaaaaaaaaagaaaagaataattgcaaaggtacagtatttttgggttcataaaatactgtacaatttttggaaatagcttgtaatgacattaattaccaataacaatcacttcccaacaacagcccacttttattgcacattcacacggcaaaacgaaccaacgcata

SEQ ID NO: 22071 - DNA, 2661 bp, Heterodera glycines
cagtgtttgacatttgagtctgatttgtggaacaaccgtcaaggcaccaacatggttcagaggtaaaataagaaataaaattttgaaaattttaaaataatttcttaatctgttatttttagccttttttaagaaatgtttttatgttttttttaaactgaaaaaaataaaaccatagaaaaaaacaaaaaaaataaataaataagtaaaaaaaacaagcaaaaaaaattattaaaaaaaaaaatattcaatttaatctaaaaactttttttctaaaaaaaaaaagcaaaatattattatcaggattcaaataataaatttattattaattatttaaaaacccaaaaataataaaaatttattcattaaataaaaactaaaaataaaaaaaacagtttctttacacgcccttatgtgtctatctgaagaagggatgaattttgagggttttgcctatttttgtctgaactcccctccccgtctgaaacatttgaggtgtgtcattgttttggcattttccgagtgattatattttgatacttttgcctttttagtcaatatttcgatcatttttgtcaaattttcataagaaaaatgcaataaaaacgaaaaatacaccctaagggtcgacttttttgggaatttaaaaaatacacccttgaaaatcgaaaaattttgaacttcttgtaagaacttttgaaaaaattttgatgcaaaagatacaaaaaaagtaattttgtttgagcataaacaaaaaaatttgaaaaaaaaaaaattcaaaattgcataaataaattttgaaattcaaaattttttgcaattgtctaaaaacgctcattagccattgttttggatgttttaaagtcaattctaaatttttacacaatttttggcatttttttttgagggctaaagccatttttggcagtttttaagacatgttttagtgcatgtttgggcatttttcgggtttttaaggcatatttaagggatttttagtgcatattttatgcgcatatttggcattttttagtgcatataatttatagccctatttataacacaaaaaaacgaacccggtgatgagcacagagtcgtcgaagacgaagaatttcatgtgctgtaaccccacaatttcgttggtcagttcgggcagcgcacttttgaggaggccgcgcaatttgggcgtatgaaagagacggacctgggaaattaaaaaattttaaagaatttgaactacctaatttaatggcgttattgaaatggaaaattttaagaaattgcgaaatttttcaactttttttggagcaatttcattgcccaaaaactcaacattacccatataaaatgcatttgaaatgtcagaaaaaatgttaaaaccggagggtaatatataataccagtgtcccgacctttgcgcctttgtccaaaatctggttcaaaactaagttttttcaatcactgatcgcataaatagctttaaataagcgattaaaagtgattgtacatgatcatttgatcttcaaaaaaattttgaaaaaataataaaattttcaaacaaaaaattattgatcataatgaaccataaaaccgtgctttcttaattttaatgcatattaggctatcaggggttgaaaaaattcaactttgagtccgattttggacataggcgcaaatgtcggggccgcaaaagtcggaccgcaaatgtcggggccgcaaatatcggggctccctctgcaccattgtcagtcgtacctttgagtccgtgcaccaagtctcgaacaattcccgactgagtccgttctgcaacattccggggctggccaacaccacgcatgggccaacatcgtcgaaatggtcgatgctctcaaagaaatttaatttattgcgccatgtttgatacctacctttaggttagagacgtgtttaaacacgaagggattgttgatcgaaatttggcgtttgatgttctgattcattccgctgacaaatgtctgatagaccgccatacatttcttggccaatgaactggcatctgtacaaaataagcaaatgaaagcacattccaactcaaaaatgataaatactcacagtaaacggggatgtcgtgaagttcggggtgttgttcccaatatctgaaagtcggacagaaaaccatgctcaaaatgggcaatacttaaaaattactcatccaaaatcagcagcaattcctgcgcccttccgagtgcaaaggcggggatcagacagcgcccgccgcggcccacaatttcgtgcactgtgctggtgaagcggcgttcgcgctcttcgcgactctcgtggatttgcgtgccataagtggattcctgagcagaaaattggcattttatgaattatttaatggcttataaaatgattagcttacgcaaatcatcacatccggcgaaacgttgggaagttcggcggcgcaaagatgccgatcctcaagccgagaaaagtcacctggaattggaaatcaactcattgttagtgcaatataaatgataaatggaatgtcaagaataatatagcaattgaatgtcgcaattaatggttttgaaccctgaccaatccatcgcgagacaatttttcgggagagaatattttagtcatcaggtggaaaactatgtaacaaattgctgcgct

SEQ ID NO: 22072 - DNA, 2499 bp, Heterodera glycines
tgtcctttgtaaatgcattcgcccgtttcagagacgctcaaatcctaaaatatttttgtaattaagaaataattagtatctttgaccgggtcccatttttgctctttttcaaaagacgtgtcatttctatgccatgaccattttgaaagtgcaatttattaatattggattaattctttccttaccggtgcaactgtctcccaaattttcttcttcggatttaattgctgaggcggacggcgtacgaacggttcacagacgacgagatcaccgggcacactgtccgggctcacttccaacacttccaccttttcaggcgtcgacgcacacattaccatcgcctgggactcaacgccacgcattttggccggcttcaaattgcacagacagacaacaagacggtttttgagctgttaatttttaaacttaaaaattttttttgtggaaaaattagtaattcatcataaaatttcgaaagaataggagaggaaatcacgggaggtggggtggggaatgatgtacatacacccatctaaatcatgaaactctgctgctgacctgctcaagtgggacaaatcggaccaggccggacaccaccgtccgcggcttctcctccccgaggtcaatctgttccacgtacagtgcgtccgcgtccgggtgtttctgtgcctcaatgatacggccgacacggaggtcgaggcaaccgacgtcgacggtgtcatcggccggggcagtcgcttgctgttgctgcggcttcttctgtttcggctgctgtttctgttgcgtttgttctttgctcgcatttgacgctgctgtcaatttgggcggtgtttgcggggaagaaactgtccaaatgaaataaattgcttattttttaatagttcatttaactgaagcagaaaatgaggccatatgaattacaaaacgaattaaaggaaaaaaatgcaatgaatgcaaaaaaagaggggggggggggggtaaggtatagtaaaaattttttgagtaaaaaataaataattaattttaaaattgaacaaaaagtccaatcgccgtacaaaggatgagagagggagagaaaaagaaagggagagagagtacgaaagaaagggagattcacctgctggtggcacaacgattgccggcgttgcttttggcatcggcggtgagaacaatgcgccggtgaagcccaggcgcgccttctgctccgttatttgttctttcaatgcggcaatttcggtgtccaatttttcagattcatttgtgacgaaaagtgcttctagaatttggaaatatgagcaaccattgacagaaattaaaaaatccaatttagccaagtaattttttgttatttcccattgttgcaaaaagaccattgtgggcagaatgccaaatggataaaagaagaggccgctcactcgctttttcgaatttggccatcacttccgcgtaaatttggcccacttcgccccgctcttccgccatgttttcctttttcttcttctgctgctgcttctccgtcgtgtttggtgcctttttgctgctgctactgctcatcgccgttggtccgttgttcttcggctgattttgctgctgtttcccactgccaaagagttctttccactcggccaccttcgccggttcaattttggtgaacaaagcgaaaggctaagaaagggaggggagaagcaatcactgctgctctaagagaaccattatgtgatagtcaattagcgtacgaattccttaatgggcttttgcgccgtttcaacccacccaaatgcaattcatcaaataatcaatttgcctccccctttttacactctattttcatcggattgacctgtgactataaaatagagagaaagggtgagagaatgaggaaagaaaaaatgtgagaaaagacaaaaaggaaaagagaagggagaaagcgagaaagagcaaaaagagagagtgagagagaaaggagcgatttagtcgcaaaattaatgaaaaatgattacgcattttggtcaatgtttcgctatcattttcacggctgcaggaaattaaaaatgattttgagaattataataaacaatgggcaaataaaaaaatgaaacccgtgctgttctttgtgccaatggaatttcccttttctcccctttaaatccgtcaaaatgaatcggaattatgttgctgctgctgctgctgcatcattgtcaccttgttgtgtttgtgtccagctttcagaaacaaaacgaagtgctcgggcatgacaatgtttttcggcagattgcactgttgttggatttgtgcgctgatgttgggcatgaaaggatagagcagcacggacagcagcacactgaggttggcggagacgccaacgatcgtttcggcccgcttccttaaaaaacttactaaaactctccaaattcttcggcttttatcgaactctgtgccttcccttggttaggggaatggcacaaatgccatcatcgccaaactgaccgttcttcggca

SEQ ID NO: 22073 - DNA, 2101 bp, Heterodera glycines
actgtaaaaattgctctacaaattggcagttactgtccgatgtgaattcgccaaaaaatttgactttaatcgctttttggaaggggccagaaaaaagaagcgaaatggaaatatgattaatctcggttctggaacagctcgaacaaattgctgatttgtcatttggctctaatttaaagatagaatggtcttaaattgccctttttcttaataatttattgctgaaggtttttaaccggcgacatggctttcatatgcgcttggatggggcacatgggaccagccttgcacagcgccggacgaaaatgcattgattttttcgaaaaaatgggtcaccagcagaaaagcgcaaattgcaagaaataatggcaaaataaaaacgaaatttttccaaaaattgattccataaaatataatttttttttacaaaattgtaaatttcgaattttcgtttaactttaaatcatcatacaatttaaacaaaaaaacttaggaagaagagagaagagtagttaaaattatctagtacaatttttcaatttttaaacattttttgatttaaattgacatttttctcgcaactatccccctctcgatgaggatagtgattttaatctgcagataggtagctgctaccctatccttagcattgtacatatgtagcctagctgcagctcaagctaaggattttttttgaaaagaaactgtcattgtgcatgcggattttaatccttagcattgtgcatacggatttatctgcagatagttagcattgtgcatactagcataagaaagacggtcccctcgtctttaagttcgtggcttgggcactgtgggggcgccatgtttttggctgagctcggcgaaatgtagtcgtgccctttttttcatttggaataatttacaaaatgttcttctgtattgtctacttatttgttaggaggttttttcggcaatcattaagaattgatgtcccgacgaaaaatttttttctaaatttgtcgagtttccttcacttactgtgttgtatgtctacatttattttgaaattttgcacttacaaatgtcaaatcctcaaacgtacgtccattctttgattcccccctcttcctgttgatgctgctgctgttgtgtttgctcctctccgtctttttcatagcgttttattcgacccttccccgtcctctccccccccccccccccggcgtccctttcctccccaaacaccacagccacaccaattcattctcttctaactttccaaaatgtgacggcgtgcaatgaatttccctctcttccttttccttcatctttcagcagagctttctttcttccaacccgccgttcgttgttcttcgttgccttccctcgcctcatcaaaaataattcttacacatatagcagaaaaagcagcgaaatggcgggaggggggggggggggggggaagacggaggagtggtgaaacacggtgatgggtggggtgagaatgactaactcaaattcccattaatttttaaaatgggcaagaccaaaattgatcacttcgtcagcaagaccccctctcgccccatgcagcaaatagcaaatgtgtgacaataaattgccatcccgcgctatttgaacagtccgtcgcccaaacaatcaatcattcccgacaactattcatctcgctcctttttttgtgtacaaaatttgatgtctcatttacaaaagtatttttgcgatttgacccaactcacgccattggccttgttgcactttcagcaaaatttgtaggaatattttcaaattgaccatcataaatttactattctttaacattttcgcacacgctttcgtttagcgggagaggggagagttccaaattagaaaaaaaattaccgagagaagatttgaaaaaggctgaattttaataaattcgtcaaaaaattaaaattaaaaaagtaaagattgagccaaataaaaagtgtaaatattattaaattattaaagattggggtccttccaacaaaaaaatgggaaatgtgtttcaacagaggtggggaaaaacagctgaggctggaacctgaagtttgttgttttttttaaaattctttttgat

SEQ ID NO: 22074 - DNA, 792 bp, Heterodera glycines
atagagcatggttaacatagtaataatataaattttgggatttttttgggctggttcgtggagagcagctcgggaccgaaaactcgagaccgggaaatcggtcccgatgaaaccggcccaaaaaatccaaaaatagtggcattcgatagagcatggttaatatagtaataaattaaattttgggattttttgggctggttcgtggagagcagctcgggaccgaaaactcgagaccgggaaatcggtcccgatgaaaccggcccaaaaaatccaaaaatagtggcattcgatagagcatggttaatatagtaataaaataaattttgggattttttgggctggttcgtggagagcagctcgggaccgaaaactcgagaccgggaaatcggtcccgatgaaaccggcccaaaaaatccaaaaatagtggcattcgatagagcatggttaatatagtaataaattaaattttgggattttttgggctggttcgtggagagcagctcgggaccgaaaactcgagaccgggaaatcggtcccgatgaaaccggcccaaaaaatccaaaaatagtggcattcgatagagcatggttaatatagtaataaattaaattttgtggattttttgcggctggttcgtggagagcagctcgggaccgaaaactcgagaccgggaaatcggtcccgatgaaaccggcccaaaaaatccaaaaatagtgtcattcgatagagcatggttaatatagtaataaattacattttgaggattcttttgggctgcttcgtgtagagcag

SEQ ID NO: 22075 - DNA, 1542 bp, Heterodera glycines
ttttaaattagatcgtgacatcatccaaaaggatggccagcctttgtatttgccgccattcaatcgaccaatgctgctaatgccaggcaaaattcacgaaattttttaaattttataatgccaaaaatatttggggaattgtgatgggagagaaagtacacaatgccatacattggggagacaaatgatttcaaatttgagcaaaaggatgttgaacaatcattggtgctgatggacgatgatggggccacagatgtggccaaatcgtcatttgatgtggaggataaaagtgcaatttaattttaaataatttaattaaaattaatatttaaaaggaaaaaaattgaaaatatggaatcattaacatcaatagaaagcagtacaatggaaacatcttcagttgaaataattatgacttcacaaaatttaaaaattggaaaattaaagtaaatattaaaaatttttaattttctttcttaaattgggtttatttatgagaaattttttagattattctataaaaatgctaaaattaaataaattcattaaaaaattcaaacaaacatgctttttaaaattaaggataaaatagataatcaataaaacttcttgaatacactgcatatttatcaaatattatttatatgcctagattagcggaagtataaatcgtttaaaaatgattgtatttattcgcacaaatattttagtaacaaatagcaaataatcattgtaatagacgaattatttatgcatttattttgtttatacccatagattagcataaataaatcatcaaaaaatattaatctattctcgaaaatatttaattaaaaattggccagcaataagtttttagcgcttaaatatttcccagaaaattgtttatgtaattaagcaatttataaaaatgttttttttcacaaaacataattttattgatatggtgcaggatatttagtcaggctaatagccaaaaggggtacagcgataatgagtttggatttttcgaatttttgaaagcaattttttgaaaagacatgaaaaaaagataaaatatcaaaagcaaaaaaaaaaaggataaaaaattgaaaattcataaaaaggctcaaaaatgtaaagaaagttaccaaaattcgacaaagtaataaatcaaattctacaaaattattttaaatatatattcaacataagatggataaaacaatgaatgttttatctctgtttaggaatcactcaaggtcaaatgcgctcaaagatgggcccatcaaattgttggtactcatcccaagatgaaatgcgctcaaagacgcgcccttcaagtgattggtactgacttccattatatccattgtgagtgtggcttgatgagggattgtttagttgatcagttttatttttctgcccaatgacagtacgacagattggacatgaatcttttgtggataacctttgcaaaaaaaaagtgtaaaaatatgaagtaaacaatatttttttctctgtcatagtaattcgtaaatgggagtttcgtaatatatatat

SEQ ID NO: 22076 - DNA, 1044 bp, Heterodera glycines
aggtctttgtcccaactaacaaaagttaactcactaaactgtgtaggcaggctacaattactaaggaaaagagggagagataagtaattggaaaaagacaaaaatatgaaaatgagaggaagagggagagaaaaaaaaagaagatgaaaaaaaataagggagaaggtttatgaacttaccaattattttttaaatgtgaataaaaaaaaagatattcttaaggatcgaacttatattctaaagatatgttttgaattatttatttaaactataaaaaatcaaaattgtgaacaaaatttgagctttaaaggcatataagtgatatatatgtttggtgatgactgataataaacccgtttgatttgttttcttcgcttttcttttttctccagtctttgcctcactcatttctcctttcctcgtaaagtgcttttgcgtttggcatttgcttttgtccatggcatttctcgtggaccgcacttccgttgaccaacaaacgaacatctccgaccggggcagaggcggaaggactgactaatggatcgctgaattaatgcgatccatcaccaataattaaagaaaatcattagaaaatgcttacaagcaaatctcgcatctcagctcggtgaccattccatgggtgccagcaacgaaaggctccggcctcagccgtcgctgaaacagcgcaaaagtgtcagacgaagcgacggaattcgaatgctccaacagtccgacgcgaagcgcataatcgcggagtacttgcaggagacagtcgcgcagtccgtcgatgaccattttattttgaatcttaaaataaattgaggtgtctgcgacaattttgttttgggtttattgtagaattaatagttaatcttttttggggattgaagggaataatttcccgtataaacacacttttttgccaaaatttactaatctcgggcttggcccacttttccctcccttgctttggctaatcccacaggcattggcatcttatcaatgggatcattggtcgaaaatgtgctcacattttctttgcca

SEQ ID NO: 22077 - DNA, 1336 bp, Heterodera glycines
  unsure (1)..(1336): unsure at all n locations
ccgttggccagttggaaaacagaaaaaaggggatatcagatggggtgcgttcttttttaaaaattcctcttttcttctaagcctccctccttttttgtgcagtatttcgtttcaactttttatcacttttgtgttgtctttgaaaataagttgggaaaaaatatacgaatatttttttcgcttttaattatgatgtacaatgcttataagcccagccgtgaggcggctcctttttgtgcactattttcgtttttaaaattggatccggattttttggcttttttaaataaattgtgaaaaattcaaaacaataaacttttattgcgctacaaacgcttttaagccccgccgtgaggcgggacagttccaaaatttgcaccacattttactgtggaaagtccaagtaccttaattggacaactacgtgtcaatgagcacagtcgccgttggccagttgtgaaacagaaaaatgggaatatcagatggggtgcgttcttttctaaaaattcctcttttcgtctaagcatccctccctttttgtgcactatttcgtttcaacattttatcaattttttgttgtcttttgaaataaattgtgaaaaaatatacgaaaattattttcgcttttaattatgatgtacaatgcttttaagccccgccgtgaggcggcttctttttgtgcactattttcgtttttaaaattggatccggattttttggcttttttaaataaattgtgaaaaattcaaaacaaaaaacttttttattgcgctacaaatgcttttaagccccgccgtgaggcgggacagttccaaaatttgcaccacattttactgtggaaagtccaagtaccttaattggacaactacgtgtcaatgagcacagtcgccgttggccagttgtgaaacagaaaaatgggaatatcagatggggtgcgttcttttctaaaaattcctcttttcgtctaagcatccctccctttttgtgcactatttcgtttcaacattttatcaattttttgttgtcttttgaaataaattgtgaaaaaatatacgaaaattattttcgcttttaattatgatgtacaatgcttttaagccccgccgtgaggcggcttctttttgtgcactattttcgtttttaaaattggatccggattttttggcttttttaataaattgtgaaaaattcaaaacaataaacttttttattgcgctacaaatgcttttaagccccgccgtgaggcgggacagttccaaaatttgcaccacattttactgtggaaagtccaagtaccttattnggacaactacgtgtcaatgagcacagtcgccgt

SEQ ID NO: 22078 - DNA, 1020 bp, Heterodera glycines
taagcattgtgcattatgcaaagatactttataagatctgggcgccaaaaaatgtataagaggcaccaaaagcccaaataatgttactacaccacagaacgtcttgttttggtaatacaaggaacaattggcctgatcaggacataagcattgtgcattatgcaaagatactttataagatccggcgccaaaaaatgagagcaccaaataatgttactacaccacagaacgtcttgttttggtaatacaaggaacaattggcctgatcaggacataaccattgtgcattatgcaaagatactttataagatccggcgccaaaaaatgagagcaccaaataatgttactacaccacagaacgtcttgttttggtaatacaaggaacaattggcctgatcaggacataaccattgtgcattatgcaaagatactttataagatccggcgccaaaaaatgagagcaccaaataatgttactacaccacagaacgtcttgttttggtaatacaaggaacaattggcctgatcaggacttaagcattgtgcattatgcaaagatactttataagatccggcgccaaaaaatgagagcaccaaataatgttactacaccacagaacgtcttgttttggtaatacaaggaacaattggcctgatcaggacttaagcattgtgcattatgcaaagatactttataagatccggcgccaaaaaatgagagcaccaaataatgttactacaccacagaacgtcttcgtttggtaatacaaggaacaattggcctgattaggacataaccattgtgcattatgcaaagatactttataagatccggcgccaaaaaatgagagcaccaaataatgttactacaccacagaacgtcttgttttggtaatacaaggaacaattggcctgatcaggacataaccattgtgcattatgcaaagatactttataagatccggcgccaaaaaatgagagcaccaaataatgtactacaccacagaacgtcttcgtttg

SEQ ID NO: 22079 - DNA, 2282 bp, Heterodera glycines
attcatgcaatggaattgatcggtttgcggctttcgccgctttctgatgttttcccgttttttgatgcagagaaattgcggttttcccaatggaaaggagattaatatcatcgttgcagacgacacaaagggcaaattcttcgccttttcgacttttttttatgtgccggaattctttttcgtagctctccaagtagacatgtttacgttttggtggcattttgtgaatttcactcaaaaaatgaaataaaatgtaatttttttttaaatcaaattaattcaaatattcgcttcagaaaaaaatgaaaaatcaaaatagtcattcaaatttttcattttttattttcaaatccaaaaataagcacaaaataagcacgtaacgctgaaataagcacaaatcttagaaataagcacatttttactttctaagatccgacccctcaaaataagcacacttgggaactctgatttacacacaagcgcgatatgaacaatataggaatatcacatatatacaaatagctaaggcctaagagattcagaacaactataaatctccacattatgcaatataaagtcatcatcatagatcggtcctcccattatgctttcttctccaattcgatcaggtgtttcactccgtcgtacatctgcttcaccgcttcgaactccgtgagaccaagacgggccttgttgctgatgtcataaacgccgccagcgctaagtaaaggacaattgtttcaaaaacagaacaataaacaattacctctcggaatgttcgccgtgaatcccgcggatttgcaatttcaggccgtcgcagatggacttgaagtcgggttttgcgctgatcttcggaagtcgaatatgcacactcgcgcgaacagtcgttcccaagttggtaggacagaaagtcagccagccaagacggtcgtcacgcgaaaacggaactttcgattcgatggccttgactccctttatgagacgctccagcacttgtccaacattgccgccattttgcatcgaaatgatacggaggtgcttaattgaaaatcgatatcaagatggaatgaaacaaacaaacatacatcttcctcgttgacccacaccaaaaaggttttcttggcgttatggaaaattccgcgtccggtgggccaataacggcaagcattggcctcctgcagaaaacggtcgccctctttaaacaagaagtggtcggcaatcagctaaatattccaaaaattaatgacttattatttgttggaccgaacctggttctggacgtccttggtcatgccctggagcggatagtaggtgcctcccaactcggcatctaaaacattaatgttacaaagaaaataattagcggttgcctaccgctcttcagctgctcgaagaccgctttgacctttgattccatctcgacgtaattctccttggtcaagcatgggttgaatggatacccctgaatacgactgttttttggtatgttaaattcaaacaaacacctgaagagagcggccgcaacgaacgcgagtcgaattgatgaatttcccctccgggtccaagtccgtcagcagttgagtcttcccctcaccaaggtccgttgccggttgcttgctgctcggtccaaagccaccatgatagtcgttgatgatcgggtcgaacaatggtttgaagagtgtgtaagcctcggctgaatgaatatttatggttgtgattatgcgtagcaatttactgaccatctggcgcatacacgccgacaccactgtccaagttggcaacccccgactggatgacgtccaaaaaagtcgctccgagcttggtacgcttgtccttgcatgcatcgacgacgtccttggtgaggtacttcttcaacaacgatttgcaatcagccgccgcctgaaagttagttcaaaattagaatagttaacacacacattgtgtgcacctgaagctttttgtagccagcctcaattttgtcaattacttcctgagggacagccattttggtttatttcaaataatgtgtgtctgaaaataaaaatatgcatttaaagagaggacaaagttagtataagaaacagagatgattaaattggagttcaaaaaaatgagtgaatgacggacatacgagaacgcatgaatttatatactaaaatttctctggagactcactttggctatgggtcaactccaatgtgcagagaaaagcatagtactatctcgtcgtttctctttttctttgttatttctctcactttggcataatatctcttcatttt

SEQ ID NO: 22080 - DNA, 1627 bp, Heterodera glycines
  unsure (1)..(1627): unsure at all n locations
taattgaaacctaattcatttgctgaatagagagacactttcntgtcttgcaatagcaaacggtttaagaactttagtatagtgtccgacagaaaaattattttttagaggaaggtgatttaaatgaaaccttgtcgcgttgagcgaaaatttagtttcgattccccccggcgtttacccgtcgtgtcagacccctattcccgccgttgcacctattccctccccttcgccaaaacttttctttttccctagccccatctcattgcctgttgcgcccgtcctttaccccgtcggttcttcccgtgttccatttccctttgatcccccctctcagtgacaacgttcaaatttgcccttatgtgaactttgataagatcgctcccccccccccccgtttcttttttttctcatgcttttcactcgttgatgcttggcgttgctgccccgcccccttttgatgatcgccggtttacgcttcttcgttgttacttcacttatgaatttttgttgatgcttcccctttttcccgcttttgattaagaaaataaagtgaaggattgttggagttgtgtctttggttagctcggctctcttttttggtacaaataaaactcagtattcggatttggtcgtctcaccgttgctttggaaatcgttaattcccttcccattcgattccttcccattccctcccaccccaacatcccagtcaaaattccctaattgacaccaaattcgacaacctaattcatttgcggaatagagagacactttctgtcttgcaatagcaagcggtttaagaactttagtatagtgtccgacagaaaaattattttttagaggaaggtgatttaattgaaacctaattcatttgcggaatagagagacactttctgtcttgcaatagcaaacggtttaagaactttagtatagtgtccgacagaaaaattattttttagaggaaggtgatttaaatgaaacctaattcatttgcggaatagagagacactttctgtcttgcaatagcaaacggtttaagaactttagtatagtgtccgacagaaaaattattttttagaggaaggtgatttaaatgaaacctaattcatttgcggaatagagagacactttctgtcttgcaatagcaaacggtttaagaactttagtatagtgtccgacagaaaaattattttttagaggaaggtgatttaaatgaaacctaattcatttgcggaatagagagacactttctgtcttgcaataccaaacggtttaagaactttagtatagtgtccgacagaaaaattattttttagaggaaggtgatttaaatgaaacctaattcatttgcggaatacagagacactttctgtcttgcaatagcaaacggtttaagaactttagtatagtgtccgacagaaaaattattttttagaggaaggtgatttaaatgaaacctaattaattggcggaatagagagacactttctgtcttgcaatagcaaacggtttaagaactttagtatagtgtccgacagaaaaattattttttagaggaaggtgatttaatttgaaacctaattcatttgcggaatagagagacactttctgtcttgcaatagcaaac

SEQ ID NO: 22081 - DNA, 2371 bp, Heterodera glycines
tcagcctccattaaacaaggttttataattggatttaagggcaaaaagattatttcaggcctccaataaaaaattatttgtgtaaaaatgcagcaaaaaaaatacagccaaaaaatgtccgtttgtgacaactgccttaacttaagaacgtttgacaaagtcagcattattggtgcttttataaatataaacattcctcaaaaatccgattgccaaattcaggaaatttgaagaaatctttattagaacgatttctgacgaggaaagagctggtcttacggttatccatgttaattgaaatgatcataactgataactgggcttcataatcgaatcgcagtgatgtggctatgcttgtaataacaaaagttcattagtcgaaaactccgctgtctaaattatgtacttttcaaatcttttattttcgagtcgatattttaaggaaagttttaggtttgcaagtttgtacgttctcgtagaatttcggtataattatactacattcattgagggaataagtatatagaaagattcaattagtaagaaagaatcttccttatccctatgaaaagctaaagacatttctgggtttaggatcgttcgtatttattttgctcgttgtatttaactagctaaaatgtgttatataaaatggaaaaaatgttgatctagatgaggttgtataagttcattctctcagttaagttgcagagactgaatctagctaataccagggaccgcgtcattcatcactagaacccaattttcttcccaccgatggccaaatgtcctatactggcagcgcaaatcactggagtgtatcgctcttggatggtttgttggttgacatctgcggcccactcctccaccagcagacggcacacctccaaactgccgccaatggcagcgctcttaagtgcgaaatggaatcctgaaattaggacaacatttgtggcatggtatttttgggtactgtaacagtaatcccccaccttcgaaatccatttgctcgacatttgcaccatgtgtcagcaacaagcgcacaatgtccacctgaattcaaatggaaatgttggaaaacatttcaccaatggaaatttttccctacatttcccgtgtaacacgcgtacatcagtgctgttgccccatcaccattctgcagattgatgttggcaccattctcgacaagaaatgtgactgtgggggaaaaaatgacgggaaaaaattacgcattttttcaaaatttcgtctctctaccaatttccgtttgcgatcttttgcaagcgtgcatcagcggcgttgtggcaaagtccgtgcccaagtcaatgttggcaccacgcgcgaccagcacacggcacagcggcaaattggcatggcggacagcaaggaaaagaggcgtcatatctgcacaaatggggaaaacaaaaatattatgtccaaacaaattgatcgccggaatccgtatttcgaccaattccgaatcctggataagaattcgaagaaaatatccaaatttcatttttcgagaaaaagaattcgaaattggtcgaaatggtgccggatttgttaacacagtgacactcgaaaatccatgctaaaacattcatcaacaacactcactcgttctgtgatcgtgcgcttcgaaaatgatcggctcattcggatctgcgcccttctccaactgaaaatgccatacaaaattagtgatttaaaccagaaaaaatgatcagtcactaccaagagatcaacaatttcgaagtgtcgtcgaaagaaggcacaccaaagagctgatcctgttcgggtgacgcgctccaccggatcaaccgtccaccgcagcaaagtgttcagctcgtcggcgtccagcgaatcgatcagcacacgaagttgttggatgttgccatcgttgatcaggtcgaagaagcggagagtgcgcgtctcaaagttgtccacaacagcatcagccggagcatcagcagcagcgggaggttcagcatctgccttaattgtggggaaaaaatcagtttttgaaaaaaaggaaaaatctgatgcagaatttgtgcaaaatatttttcagggggtgggcttcctgaacaatagtaaaaagtgactttgaaaacccggtggaatgatgactttaagaaaaaaaactcgaaaatgggagggggggggggaattgaactttaaaagcatggcgttgcaatcacaaataaaacaaagatgttaaaaatgatttacatgaaaaatattgcccatgcgaatcagcgcagttgaacagagacgacgaatgtgcaattataaataatagtgaaaatggaagacgaagacgcaataaaatggcggaaaatgttaatgtcgcatgcttttatatgcc

SEQ ID NO: 22082 - DNA, 2170 bp, Heterodera glycines
  unsure (1)..(2170): unsure at all n locations
ttttgtatctttaaaattccaaatatttttcaatatcttccaaaagctgggcatttaaaagnnnnnnngaanngacttttaaatttgggngattttttgaagngttttnaaagnaaaaaaaaataagaattgttnggtggtgttaaattcaaaagtatngtntgggaanttttgaggattttggnttgatttgttaagagatttttnanaaaaataggnnaatttatgaaattntgggtaatngtangttttagtggttnaanaaaaaaaaaggtngaaaaaggaattntgagtttttttgtttgtgnananagggggttttnagggaagntgattangaatatganatntatttnngaatattttgaattgngaattggaatagttaaaattaatttttcacctgtattatccaaaatcgatttagcactaaatgaccataaatccttattttctattatattccatgtatctgactcgattttggatcataaatatgaattttggtgaaaaattagttttcgacttttgttcgaaatcgggtccggggttcggaattgatcaaaacagttctttggttcgtgattagcgaccccgaaaacccgtggaaaagcttttttgacaattttttcaaaatttttacaaaaaaaaaattgttcgagttcgggaccggaattgaaatttgtcgaaacggatgtcatattcgtgatttctgggctaatccttgtcccattcattcatttgccccatattttccggcattttaaagccaatttttttttggcacacaagggggttttgggtttctaatttaacttttctaaaatttgatatatctgtggttctaaaatagtgccggtgcctgaacacggatttaaattttgttttatcattgtctccgtcatattcaatttcacaattcttaaatgatcaaaatgattatttaagcactgaaatttaattagacaattacccaatttttgtgaacgttaataccttttaattcatcaaatgcaaaaagcgttatttaataataaaaattgctatttgaattgacatttcttcatcataatttcttatccattaaagccattgtccttaaatgaggctttatggcagcgaaatgagacttttcaaaaatttttcatcttcgagccatgagtttactggtaccataaaaaagcaaaaatggctgttttgtctttcctaagctggtcatggtcaagggcgcttgatcaggggttgcgtgcgcctacctcaggtgcaagcgagcgaagggttgcgtgcgcctacctcaggcgcaagctagcggagagttgcgtgcgcctacctcaggcgcgagcgagcaaagagttgcgtacgcctatctcaagcgcaagcgagcggagagttgcgtgcgcctacgtcaagcgcaagcgagcggagagttgcgtgcgcctacctcaggcgcaagcgagcaaagagttgcgtacgcctatctcaagcgcaagcgagcggagagttgcgtgcgcctatctcaagcgcaagcgaggggagagttgcgtgcgcctacctcaagcgcaagcgagcggagagttgcgtgcgcctacctcaggcgcgagcgagcaaagagttgcgtacgcctatctcaagcgcaagcgagcggagagttgcgtgcgcctacgtcaagcgcaagcgagcggagagttgcgtgcgcctacctcaggcgcgagcgagcggagagttgcgtgcgcctacctcaggcgcaagcgagcaaagagttgtgtgcgcctacctcaagcgcaagcgagcggagagttgcgtgcgcctacctcaggcgcaagcgagcaaagagttgcgtacgcctacctcaagcgcaagcgagcggagagttgcgtgcgcctacctcaggcgcgagcgagcggagagttgcgtgcgcctacctcaggcgcaagcgagcaaagagttgcgtacgcctacctcaagcgcaagcgagcggtgagttgcgtgcgcctacctcaggcgcaagcgagcaaagagttgcgtacgcctacctcaggcgcaagcgagcaaagagttgcgtgcgcctacctcaggcgcaagcgagcaaagagttgcgtacgcctacctcaagcgcaagcgagcggagagttgcgtgcgcctacctcaggcgcaagcgagcggagagttg

SEQ ID NO: 22083 - DNA, 1128 bp, Heterodera glycines
attgcccgttttatagaactctttaagtgaatacaaatttaattccaatttccgacacttttaagtcgcttcaatccttaggcctttttaacccttttgccgttgcagcaaatgtcgagactttctgaattaattcgaccttctatttataatgtaaagttaacaaattattttaagaaattcgatgtatttttttctttaaaatttgttacgcaattttcctttcttttttgttttgatttttctattagctactcatttttttcacaaccttgagccgaataaaaataattgattatagctaacaagggaacattccaaactgaatattttttattatgtagagcatagtcgatttactattgccaattttcggctttttttagccctgactagagatgtgccgtgaatcacgggcacggttaccgtgaatttcacgggttttttcgatcactgtcatggtcatgattagaaatcagaagtttaagactagagtgccacgggaccgggaattttgggcaaacccgggaccgggaccttttcgggttgaaaaaccgggaatttttggctgggaaacccgggaaaaaaccgggactagtcccggtcccggtcaaaaccgggaccttggtactcagttgtactcagttgtccgctaccaggtcccggtcccgtggcactctatttaagacttgagttataacgtaataaaaatttgaaactcgcacagctttttctgagatgacaaatagcttagcattcgattagaaaaagatttcctctttcaaaatcttttttagataccaaatttatatattttctcttttcaaaataatttcctggcagtgcatatcctctgagatacccatgatttttttttgtaatgatatacaaaattattataatatttaatcttttttgttgtgtcaaatttaactcctcgcaaaaaactaaccaagtcgttaactttcatgcgtctaatttacaggaattggtaaagaataaaaagcatataatgaggagagatttgagttgaaaacatataaatcaggttaaaaatgtttattcaacctagataaaaagtagttaacggaatgaaaatcttgaaacaacaacgcttaaatcaacata

SEQ ID NO: 22084 - DNA, 1938 bp, Heterodera glycines
  unsure (1)..(1938): unsure at all n locations
aaaaatgtgataacaatggacgaantcaccggagtcctgatgaatgttgagttgttgcgcaatcaaagggttcggggaaatagaaaagacgtcgaaggaagcgggtccgacttcaaattgttgtgcgcagagtaaagggccgtccgggtgttgaatttgaaaacgttgtcacggattttttcggcgttctggcccacctaattaacggaatgattgatgcgtaacaagactatttatcagttatgttaaatttcagggaaatgggcacgttttgtttttgaaaattcaacttgagcattaaatacgaaaatttgccttgtcattaatttttgactgaattttcatcatgaattgcaagccattaaatcataccaagagattcgccacccaggttttgttgtaattgagagttcctggaagagcatggaacaaatcggtgtaatcaagcaccaaaatcgggtcctcatccgaacgcggcgcttcctttagccactcaacaacaccggcgtcgagattcaatgcttccccgagatcttcagcagtctcgaaaaccgcctcactgttgatgctagaaacaaaaattttttttatttgttgagacaaaggtatggcacattcatagttttaggtaccccgctgaaaaaccataacttggtaacgatttattatattttaatcaatttcaccaagtcgcagattatgaatttttttgcaagaaaaaaaaatcgaaattgatccccatattcattcattggtatatcgaaattaaaatacgattataatagagatagagcacaattaatcgctaaactaaaaataagaaccttttgcatgaaccatccgaactgctaaacacggacatgtcgaagtgaatgaaagctgtgaaatattttgtcaatctaattcaacttagtctttaatgccgacaaacttggtaaattttgtgtgataaaatgggagcttttattcgactgaatcgatggctattttcagaatcagggttttttatgcgaaaatggtcgattatttttttgcacaaatgcactttatgagtccaatcgacttttatgagcccaaaggtatttttatgagtccaatcaattgaaaatacttcgtttttatacaataactttgttcatgttcgagctaaacctatctttttggtatcattcgaaagcaccaagtgtaacgaagctaaaatatataaaatcgcagcgttcatgcaattaccaaaaaagctatggattgagtgatgctgattatttccatttgtaactttctttaaatgttataattctcttgttttctcgtataattacattattaagactatgggctttcgaatgataccaaaaataaagggtttgttcggacatgaaaaaattattatataaaaacaaagtattttcaattggttgggctcataaaagtcgattggactaataaaggcattagagccgattttttgacctattttaacttaggaaagcttttcaagttggttagcacattatgagaatatggacatgacgagggacagaagggcaaagggcgaatattgattaaacaatataagcaaaataaatgggtacaactgaatgacggaaaggtcagagggcgcgcggtatttatgtgggacatgaacgaagagagaaaagagaataaacgggagagaaataaagaaatgaaaataataatgggcggacaaaagagtaccaatcccaacaatagagagaaacatttgagagagagggaaaggatagagagaaaatttgagagagggagagagagagagagagagataaaagaggagagagaaatagatatacccaaaagaaaatccaaatctctaatcagttggtcaaagtgtttccatttccgatatttctttatcaaatttctatacaattcactgacaaaatttccagatttgttatt

SEQ ID NO: 22085 - DNA, 2173 bp, Heterodera glycines
  unsure (1)..(2173): unsure at all n locations
aaatttaaatntcggagagaccaaaaaacggtgggaggcgttgcgggggggacggactgacaccacccaacgcattcattcattcactcaattttgacagttccttcaattttgttttccaaattagctcgtcatccaaaaaccgtttttgttaaattctgtcttttatcggttcgttcgattttatttccctttttccgttagtccttccagttcatttttaaaagacctgctgtcccaacttgattggtaaaatttgggaaattctgggattaatccggcaaacccacccggcaataaattgggccccaatctcgaaatcgaacccgctaatttgaattttcctgtctagtcaatttacgaacaaaatgagcgcaaaattggagtcaatttatttatgattaaaagctccgttgaattttgaaaacattttgcagcagcattttctgccgctgcataaatttaaattcggagtgattaaattgggggggggggggacggactgacaccacccaattttattcattcattcatccactcattgttattttgaatttcgtcgtcaaaattctttttttttgtcatttatttttcctttaaaataatggaattttatttattttttccattttccctcacttttccccaaatgcttttcattacattttgaatccctaattatataattaagaaaattttgaatttcaattaatattttaaaggtatcacaatttaagttaaatttcagctgaagagaagaataaaataacagcgaaatataaaaaaaacaaaacaaatttcttgacctcatttatttattattattaggtcgcgacgtttcttcactaaaatagttaaacttttctattttggtgtttgtcacattttttcactatttcgacattttttggaaaattccttaacaaaaatgcaaaaaaaccaaaataaacacccctaagaatcgacctaaaaaattttaaaaaataccactaagaattggaaaatttcttaaaaacttttcccccaatttctttcttgacaaatttttgatttaaaaatgttcaatatttgctaaggaaatatttctaccacatttgcaacagcattcagtgaataaaaattatttttgcttatttttgactgaaaattatgtcactttttgtcactatttcgtctttttgccactattttggcatttttactcactattttagttaactatttcgagatttttcgtcactaaaagtcgcgaccctaattattatggtaaaatgtaataaaattaaaaaagtacataaatcattttatttaaaactataatttgcaaaatcgtactctatcagttccaagtacagtatgccgtttcatcaaatttaaaattcataaaatatgcatcaaaatttattcaaagcatacgttggataaatcaagataaaacaaagaaaaagaatttatgcagtcgccaattatataaaaaagaattgaaaaatgaatgaatttattaatattaaaaactgtaataaacgaattttagggaaatttaattgtaattatttaaattattatttaattagtaattcgtaaagcaacgacatttttaatttttaaatgtgaattatctcatcttgaatcaatgaaaaaagagtatcagaatatcgtatttatctggaaaaatgaaacggtagaggagcgcaaataattttaaatacaaattattaatcataatttatatttcatcataactcatgcacaaaatgtatttgaaaaaattttatgttaaaaatagaaattaaaaacaccgaattttagtccgtctctgatcagacaaaaatatttgttcatcgatttcaaaatataatttttaaaaaatttacaaaaaaaaacgaaaacaatttattatttattaaaaacagaagccttatgaaaaacagtttttttaaaattcttatgctaacattgattccaacacatattttgtaataaaaaaatttcccgtaattattcagataaaattcctgcatttaaaaaatattaaatataaaactatttactatattagaacaatttgtaatttttaataaatattatttaaatatacaaaaagttcgtttaaaaaaatataatttaagcagcgacagaaatcagaaaaacatctaatcatcagtacaggaaa

SEQ ID NO: 22086 - DNA, 755 bp, Heterodera glycines
tttcctctcgatattttctcgcgttgccgctctttccttcttgaccaattcagaaagcctcaaaaaagttacgcagaacttatttgagtaaaatgagttagggttcgctgtacaaaggttttttgttgttcggcttgaattttaggaataggaaaaaataaatgtgcttttctaattagaactatcgagtcattccataattattatcctacgaattctatttaaaaaaatattttgcatttgatatcattagaattagaatacagagctgaattaattgaagctttataggcaaaaatgaaaaatctgattaaattattgttttaaattttccatgtattttattggttttttaaagtcaaacacaatcggtctaaaacccgataaaattatttataagtttttccgagaagcgcgcatcaaaatatagctgacccattaggctttagaagaacatcaattatgtcgagaaatagttgataattcaaaagtttgccaattataatcgaagtggaaatatttatgaaacgaccaaataattaaaatgagagagcctagcatatgttttcagggagcaggtcgttgtttccccccgaaaaattttttataaaaatttattcgggggggggggggggggaggaatgaggagcaccctcgtttgtgccaataactatttccaatcggttgcattaattttctttgtcacctcaaaatatgcgcttccgccttggaaagagtgtactttcgattctctt

SEQ ID NO: 22087 - DNA, 1035 bp, Heterodera glycines
tccgtgaaacggaccatctctttttctatcgggtcggggtcctggatgaaattggccatctcttgaaactcaattgtcagtgttcgagcagtgtcgttcgggttttttcgatgaacatccttcaaacgtttttaaacgagaataaaactcggcgaattcgtttggaccgccaatggattggacttctttgctgcgttccccgtgttcgtctttgtaggcattgattagcttttccgtagccaattggtttctcttaacacacagttttgacattacctattaagaattaaaccacaaattacctcaatcaaccgttttatgcgttgatcggaattaattctttcgcgttgctaaaaaaaaattccaattactaaatttattttttcaaaaaaaaatttttggaaaataaatttgttttataggttttcggggtcgggaaacccgattctagcatctgttttgacccaattcgaacccctaacccggattcgaacaaaaaagtcaaattccatttttcagaaaaattcatattttatccacaaaatcgcttcaattatttcaaattggttaaatggatgtcagatcggttttcccgacccggaaaacccctaaaaatcaattttgagcaattaacgtgaattttggtgaaaaaagaattttcgactttttttcgaatccgggttcggggttcgaattgggtcaaaatggatgtcagaatcggcataaaacaaatttattttcaaaaatttttggaaaatctccgcacagctaacatataagtaccaaaaaaacatactgattttttatccatcataaattctttaaccatcagatcgatgcaccgttctcgctcctcatgacaatttcgttggacttcaagcaaagattccatttagataataattaattgctttttaaatttaaaatcagaattataatcattcaattcaatttgaaaagtaaggtctttccaatctatggaatgatataacggactgatgagttacgggcgtcccctttagaagatccaaatat

SEQ ID NO: 22088 - DNA, 2050 bp, Heterodera glycines
gaaatccctacacaataaaaaccaaaaacacacccaaccatttgtcagaaaatacacccccgaagaatgaaaaaaaaaagctaaaaaaaattaattgaccctcataataattttttttccttgataaaaatttttggtttaaaaattaaaatattaatcattcagttgaaaattgtacaatccaaacattctcttggtatcaaacaaaagtttagagaattaaaccaaccaagacaattttgaacagccaaattccaaatccaagcaaatcttttaaaggggaggcgcaaacgacgtccccgcactcaaaaatcagaaacggtcccaggattttgccttggcggggatatcatcgtcctgctgctggtcttgacaacctctttttcgccactctttttttgcggcacgcattttctaaaaaattttgggaaacagttcccgttataaaatatatgtattgatgggaaaaagcgtttcggtgaaaattttcaaaaaaaaaaaaaaaatttctcgcaaaatttggctcgagattcatccagcacaaaaaaaaatcccaaataaattgggatctcagcttcggaatggagataattaaaaataaatgtttaagaaaagattggcaaaagttgaggcccaaaatggagtcaaaaattaaaaaaaacattttaaaattttaattcctcaacaatttccaaatgaattcattaaatttatgcaaatatttttgcgtttttagtccgccatcaaattttagaattaatcccatataaactgaaaattttgacatttcaattctaatggacgtgattggtggaggcgtaatacatatttcgccaatttttgagttcttagagtatattttatctttgttagcttaattccacgcagagtaagacggtagaacaattcatttggatgaaaagttgggccgaaattttaaatatgctcaataacccaaaatggcacgataaaaatatgtgtgaagtataaaatttttcattaatccttcttcgatagcaaacacacgaataagtttgattaaacaaaataaatttatgtaaatatttaaaaaatttctcaaaatagtgacaatttttaaaatcaaaaattttataaatttgataattttcgagaaaatgtttatttctgcttagaattttataaaaagaggagaggatttttacaaaaaaatgataaaatcatgatcaagaataatgaaaaatacatcatttgatcatttttgcttactttttgtaataaaaataaaatttttaagcgaatttatgaactgataagaaaattaacttatattcaaacttcatgaattttacagccctggcaatcaatcagagattggggtgggaggcatttgttaacaaaggaagacaaaaaaaagggagaaatagtacacaaactagtgcattatttatcgacaaagaaacgagcgcagcggagaaatagtgcatggatagtgcgccccgctgccatccatccctcgccccttttgaaccccacctaaaaatataaataacatatcccatcttttataataaatttgtgtgcttatttgccctgcggttgctcgccggcgccgtttcgcgccccccgccctctgtctcgtatctcctcagggagaacggatattttggcttgacaatggcttagaccgcatgcgcagtcgtttgaagacgccatgcggcgcttgcattcggttggagtcggcttgagcgaaatcgccaactttttttttatttttcaaatttgctgtaaatccttttttggtactttttaaaatgtacatgaccaccttcatatacattttaaaaacgacataataagaaaggctttcgagaattttctgggtcaccgactctgcatatgacatccatttcgacgaattattgtgagccccggcccagaacttgatcgttaagtcaaaccttcaaatttcataactcaagcattactttaaaaattcgactggtttgttcgaactcgggtccggattttcgaaatttgtcgaaatggatgtcatattcgtaatcagtga

SEQ ID NO: 22089 - DNA, 1146 bp, Heterodera glycines
catccacttcaccacaaagcccgaatttttactctaaattattaaaccgtcccaaatccccgagcggtgatcctcaatgagaaatgttcagggttccgggacacaaaatgtcgtttttacaaagaatttggccgtaatttttaaaatcttccacttctaccgtattcttatgcgtcgggagggcgggggagggagtgaagcgtcagcagcaaaagacggaatgaaggaagaagcatcaccggcgggtaaaggaaaagccatgttaatgaatttttgatttttttgttttgtttttgtgtgagatgcgtccgccgttccttttgcccatcttttgctcctctgcttttccccctcaatgtgctcccgcttttccccctacttgagtgaagcgggaccgggccggggaattcccggtcctccgaggtcccggttcccggtcccggattttgaaaattttgaaattttctgcctaaaatttctaaaattggcaaaacaaaaacaaaaaatacactgtaatctgttgaaaggttatgccaattaatttttgtgttttttaaatttcagtctttcaatgctattttggcacattgtttaatggagagaagctggctgagggttttcatgttcatcccatgaactgttcacaggaaagtgacatttgcgtcgcttttaagtgtacggcgggtaaaatttttattacttcctttttattttaattacctataaaaaagcaaagatttatgtgaatttttctcaaaaatttcatataaattcctgagttgaaaaaagaaaaaatttcacttttacttatgtttaggggacgaccatttggatatgtggacatgttacagaagtacccatatgagtgttgaaatgtgccccaaaatagattttcaacatttcatcaaagggagtattgggtaataataataatataataataataataaaagtaaccgtaccgagtaaattcaatttttctctattacatatataaagaaatagccagccaaaatgagagtttcggcaaacttttcatttttttatgcatattttgatttttgaaaatttttagaaattttttttgaaaaaacaaaaactttttttttaaatgtatttctaaaaatagcaaaaattaatttttaa

SEQ ID NO: 22090 - DNA, 1338 bp, Heterodera glycines
  unsure (1)..(1338): unsure at all n locations
attttnttatgcatattttgatttttgaaaatttttagaaattttttttgaaaaaacaaaaactttttttttaaatgtatttctaaaaatagcaaaaattaatttttaaaatgttaaaatgtgattctaaatctatttaggtcatttttatgccattttatgcttatttaacattttacgaagatttttttccaaaaaataaccataatttttttttaatattttcgtgcatattttgggtttttatacatatttcttacatatttcgagatttttttttttacatatttatgtacatattttgaccaatttttgtacatatttttgacatccctagtcatacatattgcattcattattcaatcgaatgtttttttaaaacaagggactaccatttttggcatcctgtttgtttagtttagttaacttaaaaacaattcgaattttttgtcaaaaaatgcaaatttttcaaaattttcgtgtttttattttaaaaatttaacttaaattcatttttggctccctattttaatgtatatttgggcatatttcagtgagttacagtgcatattttatgcgtttattgaccaaaaaaaaaagattattaaattaaatatatatatttaagagaatcctgaagtagcggcactcccatgggaatgcacttgtgaaattggcgaaaagtacgaaagttttgcagtttcagcgccaagtttgttgttaaacgattattatttttaattaattaaccatttaaaatattaaaaattgttctacatacagtgccattgacaacaacacaactggagggacacagtaagaaagaaggatacagtaagcaggagggacaaaaataacacattaagtaagaggaatacagtaagaaagtgtgttgtcaactttgaggaatacagtaagaaagtgtgttatcaattttgaggaatacagtaagaaagtgtgttgtcaattttgagaaatacagttagaaagtgtgttgtcaattttgagaaatacagtaagaaagtgtgttgtcaactttgagaaatatagtaagaaagtgtgttatcaattttgaggaatacagtaagaaagtgtgttgtcaattttgagaaatacagtaagaaagtgtgttgtcaattttgagaaatacagtaagaaagtgtgttgtcaactttgagaaatatagtaagaaagtgtgttgtcaattttgagaaatacagtaagaaagtgtgttgtcaactttgagaaatatagtaagagaagtgtgttgtcaattttgagaaatacagtaagatagagggtgtcaactttgagaaatatagtaagaaaagtgtgttg

SEQ ID NO: 22091 - DNA, 1000 bp, Heterodera glycines
  unsure (1)..(1000): unsure at all n locations
tgtcaaacgccgcgactgcatcgttattatatcagtcgatagaatttcgaatcgcttttaaatcgtctcttttgcgtcccttaatcttcactctgagccgagttactgcggtctaaacacgtttttggtagaattgcggccagaatttaaaaatacagtttgctatggcttcgcatcacccgcttcaacgggtgctcagtgtaaatatcgactggccattcaaattctgcctttccagccttatggaaagatattatggaacttttggttccatctcagttgtcaacgccgcgactgcatcgttattatatcagtcgatagaattttcgaatcgcttttaaatcgtctcttttgcgtcccttaatcttcactctgagccgagttactgcggtctaaacacgtttttggtagaattgcggccagaatttaaaaatacagtttgctatggcttcgcatcacccgcttcaacgggtgctcagtgtaaatatcgactggccattcaaattctgcctttccagccttatggaaagatattatggaacttttggttccatctcagttgtcaacgccgcgactgcatcgttattatatcagtcgatagaattttcgaatcgcttttaaatcgtctcttttgcgtcccttaatcttcactctgagccgagttactgcggtctaaacacgtttttggtagaattgcggccagaatttaaaaatacagtttgctatggcttcgcatcacccgcttcaacgggtgctcagtgtaaatatcgactggccattcaaattctgcctttccagccttatggaaagatattatggaacttttggttccatctcagttgtcaacgccgcgactgcatcgttattatatcagtcgatagaattttcgaatcgcttttaaatcgtctcttttgcgtcccttaatcttcactctgagccgagttactgcggtctaaacacgtttttggtagaattgcggccangaatttaaaaatacagt

SEQ ID NO: 22092 - DNA, 2356 bp, Heterodera glycines
  unsure (1)..(2356): unsure at all n locations
acgcggaattgagaagcatttntggaaagtgatcagaactaaaatgctgcttttatgggttggaaaattagttaaattgaaaaacaatcaatttcattatccaattttcagaataatatttaaattatttaaaattgatgccaaatattattatttttattaaatccgtcttccataaatttatgtaaaattaaaattttatttaaatttaaagttttgtatttcaccgacgaaaagaaaattaccgacgcattgcgccactttctggggaataataactttataataaaaactgatgaaccggaaaatataattaggcattatatgagcaattcaaagtcattagcggatttctgtaacgatgaggaagaagaagaagaagaagaggaatacggtggaggggaaacaaaggaaagcagtgaagaggaggaggagaaagaggaggagaaagaggaggaggaagaggaagaggaggaagataggaaaaagggaaacaaagagggaaaagagaaattgagagagaaaggaaaagagaaagaatcaatgggaaaaagtgatcaaaatcaagcagaggacgacaatgttgatcatgatcatgatcagcagcagatggatgatgatccatttgatcaaacacaaaagcaagctgatcaaactgatggccaagcaaaaagcgagcaatgtgaagctgatcagactgattccgagcaaacagaggaagaaacaatgttgtccgacttgaatgaagatgatggaaacggtggggaagaaaatccgaattctcttggatttggatacacggtatttcagggaaataatttttaaaacgatttttttaaatgtttgatttggctagtttcagtcagccgaatgcccgccaaaggaaatgccattaaaaatgctgcaggaaatagaccgaaagaatgttattggtaaatcgtaatttagtaaaaatataaataaaatcaattattttgtaaatcgaaattaaaaattatttttcaatcgaaaattaaaaagaatttaaaacatttaatattttcaatcggaaaatttattacctgtattaacaaattaggcaatgaaaaaatgtaattatgagaattgattggcatatgaaaattgagtatttggcagtttttgaatagaatttttaataaaatttgttaagaagatccttttcagacccggagcaacaccatctgatgggcaattatctccaattgttttggcatgacaatgaaaattttcttccattgtctccacaaaattcggttataatgaaagtcacccaaattttggccaccattgccttttatcgaaattgtgccatggaattgttcgcattgcccgatttgtacacggagaatggcactttttccgccaaaattggcgattatcggcaaaaatgggccgtgacacaaatgacggaaagtgaaacaatgggcgaaaacatttgcaaaatttaccaattcatttacgaaatggtgaacgatgaggagttgaaggccgccggggcggtgtgggagcagtatttggcacggaatgtggtgaaaattggccaaatggaagcgaaggaacaacttaaaaaagtggaaattttaaattggaaaatttaaaaaatggaattaaattgaaattagaaaaaaaacatattttattatggaaataaaattacaataaaaatatatacaaacgcattttattaaaataaatatttaaatcaacaaaaaaacatcaattttaatttgaattattattcaaaattttaaataaacaaaacatttttaagctggtaaaataaaaaaaaatagcttatactgtaattcaattacctttttttctctttataaaattgaatttaaaaataaattaaaaataaataaaaaattaaacaaatgaattgtgcattgggtataatgaccaattattaagccatttaaactattttacagaggattgtcctaatgccctccgacaaacattggcatagcatcgattgtgctgagcggaaaaatgccgatgcctttcttgatgctcttctctcgtccgctccgctgatggaggtcgttcacacgttcacttttgtccgtctgttggctcaattttcccaaatgcgtgccattttttgccgtggcactgaacgcgaaattttgtggctgaagcattggatcagagtgttcatttcggacactgcattgacacgcttggaaatgctttctcccgaagcgatgcattacggtaagtcagtcgcccgcacggcttaccattggcagtgggtactgtaggggagaggaaagctgtccaaaactgcagaaggggctgaaattacgatcttaggcagtgggtactgtag

SEQ ID NO: 22093 - DNA, 931 bp, Heterodera glycines
ccaaaaaaatcgatttttttcaagtgtccgttggggggtactcaaacaattatggggagcaaaaatccaacgcagaattaaagtacaggctatagggaagctattcccgaaggattcggtctccccataaatctgggcgcatcggttcggggggactgccccgaaaacaaaaaaatcgattttttcaagtgtccgtttggggtactcaaacaattatggggagcaaaaatccaacgcagaattaaagtacaggctatagggaagctattccggaaggattcggtctccccataaatctgggcgcatcggttcggggggactgccccgaaaacaaaaaaatcgattttttcaagtgtccgtttggggtactcaaacaattatggggagcaaaaatccaacgcagaattaaagtacaggctatagggaagctattcccgaaggattcggtctccccataaatctgggcgcatcggttcggggggactgccccgaaaacaaaaaaaatcgattttttcaagtgtccgtttggggtactcaaacaattatggggagcaaaaatccaacgcagaattaaagtacaggctatagggaagctattcccgaaggattcggtctccccataaatctgggcgcatcggttcggggggactgccccgaaaacaaaaaaatcgattttttcaagtgtccgtttggggtactcaaacaattatggggagcaaaaatccaacgcagaattaaagtacaggctatagggaagctattcccgaaggattcggtctccccataaatctgggcgcatcggttcggggggactgccccgaaaacaaaaataaatcgattttttcaagtgtccgtttggggtactcaaacaattatggggagcaaaaatccaaggcagaattaaagtacaggctatagtgaagctattccg

SEQ ID NO: 22094 - DNA, 2234 bp, Heterodera glycines
catctgctgataaagcaaataaaaattatgggaaaactcaaaatagaaacgtcattttgtatcgatgtttcaatgttacggaaaatattacccaccaatcaatcatcaatataaaaaaaaaagacaatttcatttaaatgttcctctccaattttttctgaatattaattaatttaattatccttaattgatttgaattttcttcggtttttctttcggtgaatatttgataaattttaaattttattagttttggcgtaatgccatttcaaaataaaaagaagacgccgcttccttttttgtctcgctccacaaacacggcatagcaatagcaattggaatgtggtggatttgcttttattttatgtgtgttttatgtgccttttttgtttgtcgagccttttccgtttgccctattggttttcttccgttgcatgagaatggcactggaggagagaaatggcagcataaatttttgagtgacagcatcatcaagttttgtggatgatgccagcatttttaagcagacgaaaagctaaaatttccgaatgaattattttttctaaaaatatttttatttttcacaaaaaaccgaataattctctatttaaaacgttaaatttagtgcgccaaaattgaaaatttatatccattcacatgttgagcccaatttcaccttcccccttccccttttcaaaatttgtcagttttccgtgtgatttatttgtcacactttctccccttttagggcgaatttatcgcttatctcattgattgattggatttggtgttggtgtatatgaactgtttagaggtcagaccaccctttttctgtttatgcatggcatccgccgaccaaaaaaacacttcctccgccaccgcttcgtccgccgcttttgccagcgaccccccaaaaatgggggcggaaacaatagcaaagccaacggcaccaccgcaaaaaatgaacacgcattttttgaacagcagtaccacgccacagcaaacgcaccaccgcaacaacagcaagcagccgccgcaaccgcaacaacaaccgcagacggcgcgccgcaactccgctgctcgacggcacacgacaccggacatggcggcttcggccgcatacggaatgggtaagcgaagtaagcgcaccgcaaaatggacccctgggagagggggcactcccgcccggggggacagactacgtttattgttagagggtccctccgccgtaaaatttcctaaattttccgtcgatttctaacagattttcctctaaaattggtaatttttgatagatcctggagggggtaccaacaaggaaagtcgaaaatttacaaccaaaatatctcttaaaaatttcgggtgaggagcggtcttgggggtgggtatatacctcgcttacccccgctccccatccccctgggatcgtccctgcccaagtcccaccacaatcatcaatcttggacacgtcactggtatagagcgacacgaaaaataatatttgaaatatttatggaattgaaaattggatgggactgaattggacgcggcgaatcccagacagagacatccaaaattaaatttattatcatttttataatatttttcacattttaatttgtctaatttttacgcgttttttagtgttgtgcggcagtgatgagatggagcagcggtacagaggacgcattgagaagtttgtggccccaacaaacgacgtaaaaatgccatttattttcacagagtcaaatttggcgttcccgtcaacgaggccttttgtccggacattccggcgacacttttggtttgtattaccaaataataatacaaagacatgtttacaaattggaatttcctgtttaaaaaaatatctatataggttggattcgaaatatcccaattcctcaaaattcaatgagtttttaatgattcattcattgattttttataaataaatttgtaaggcattcacaataatgaatgtcatactgaaaatcatttccaatgtttaaaactagagtagattcaaatgccacagaaaatcccacaaatttgcaatttccagtctctagtttataaggtaaaaaccaaaaacaattaaaatgcccaaatagacattgcttgtgttggcactcactttcgcaacatttgaccccgtaatagcagtaaagggtcggcctcgcgcacactttgcattcgcccacttcccttttctttcgccccctcccaatttt

SEQ ID NO: 22095 - DNA, 1527 bp, Heterodera glycines
  unsure (1)..(1527): unsure at all n locations
tggttcattttggacgaacgtaaactgtcgcagcaccgggttgattccggtttaagagtgtaattatcattatctaatttaattaccctagttaataaatagaaaatgacctttcttaagttcgaaaaaaaagaatgctcaattttaggtgttcacatgaacaatgtggtgatcagtgtttgttgaaaatcaacgggtttttcatgagtttttctctcaaatattcagaaaatgatattctgtgatattctatgcctaaaattctgtttttctgtgccgggttgtagaacataaaaggtaactcgcccggtgggactcgaaccgcggcctttccatttcgtgccgtgctctaaccaactgagctacgggcgctccttttagagccctaaaaaaacactttccaattataaaatatgtaaataattagaatttgatttgaaaattaattgtgaaaaatgtttttattattacagcagccgttcgttgaccatggaataaacgaaatggatggataaagaggaaaattgttgatgatattagcacctttcattttagtacaaagttgtgttgattgtagtatttagctcaaaaaaaaattaaaaaaatttttgatcgactaattaataattatataattcatttactaattatttgacaatttaaatgacccgcggacctaattgtaactgatcccaaaagtaaataagataatatagtaaataggaatttattaaaattaattgcaaattattcaaacattgcagatgcactatcttataaatttaaaatttgcttattaaaaggattcatatttattttgtgcttaaaaaataaaaatttataaaattgcctatttttggtgcaaaatctgtgaattgcataaaattttcaaaaatctttccaattatttttcttgttgccaaaaactgacaaaattgtaatttttgattaatttttaaaataaatatcatcttttttttataattttgtttttttccttaaaaattttaaagcaaaaaatcaacaaattttgatgttcttttctactctcgaaaaataaaagaaaattaacatttaaaaatattgaaagctaataaaagtgaaagaaaaagaaatagaaaagaaagaataaagttggaaaatctatcttctacaataaaactgcacacttcctcttcacagattttctgttctgttcagttcttcaaattatttttgttggtttttgtcttttctaaactttggattttcaattttaaaataggtaattaatagggttataatttgtatgattttgcatattttttctgcgcatatgctatgaagaaaggggctcaaaaatagcatttctgcgttaaaattttttggttttgtgaaggtttttaatgcatataaaagcatattttcggtcatttttggcaaattttcataagaaaaatgaaataaaaatgaaaaatacacccataaggatcgacctcttagggaatttaaaaaatatacccttgaaaccganaaaattttgaattt

SEQ ID NO: 22096 - DNA, 1967 bp, Heterodera glycines
attaaggagagaatcgcatcgcttacaaaggaaggtccttggtgggtgggaagagcacccatgagttcttaagaagtgtttttattttctattaaatgagcccgcgtgccgagttctgacgtgccaaagtttaattttttactattaaagaaaaatgaataatatttcctagaggaaatgcgtaagtcaacttttttgggctcccaggttcgaatcctctgtatgcaaatatattttataacttttatttttgctttttatgcaaagtaatatcaaaatatgtttacgaaacaaaagctttttataatgtattcaacattttctccaaacaattcttgatttagagcaggggtgtgatcgaaaatttttcaaaataagaacaacaagggcaaaaaatatgattttttggtcaaaaataagaacatttgcaaaattgcatcaaaacagttatttttacaatttattcgataaaaaggtgtaaattttatttttcaccacccattatcgcatttaacaattttggggaagaaataaacaaatcgtacattttagagcattcgggatcaaaaaatcaggttttaacatgaccaaattttgcgcaaagctataaaatagtgatattctgccataaatttcaaaattatgagtatattaggaaattcgaacaaattttggtcgctaccccaaaatcagaacatttcttagaaataagaacagatcacacccctgatttacagcgatttataaaacataataaacacatattttggcgtttttggacataaaaatatagcgcacatatttcgtgatttggcacatattttgtacatatttagccatttttgaagaaaatttgtgggaaaaacatagaaaaattggaaaaatacaccccaataaatcaattttttgccatattttcaaaattttttaattatttatttcgaatgactaaagatgcaaattactgtagatgttttcattaattcgtcattggtttttgaagttcactgctgagacttattcaactgactgacaacttacaaaacaatttatctgaaaaaggaccattttacccagaacacttcacaatgtatttgatttgcgactgtgcaggcgaaaatgataatgaatgaggatttttggaatttttatgcaaaacacacttgatttttttaatttttaacacattttagcagatacattcgacacagtggagaccaaaacaaagaggcggaagcaagacttgctcaaatgcgggagggtgtcttccaatccgccttcaaatatgatgcactatatttggatattcttactcatcgttttgtctattctaaatatttaaatctcgaggtccaggaatcggttacactgcgagaaatcctcgattagcaaagctcgccttttaagatgatattctgcatgcaccgacgggtataccgagagcccgcagatgcaggaaaattcagaaagtgcaatgtgcgcgtgggcaaccacaaacctgtacaccagcggctcgtcgcattgaaatggcagaactttttgaatggttcaacaatgcgaacagcacctcggcgtgttgcagctggttgcagaaatgcattatcaccttgtatgtttttataatataagaggacggtaaaatacaggacggtattatgtacatatcgggccaggacgttttcgtacgagtgagtatggaaaaaattgcattcaaataatttgttaattttttttaattacttttaatgttttgacagttaagcttttattaactacaaaatgaaccagcagcaagtaattaaaacaaaacgaaataatgataaattggtgcatgatggtgcactttatgtgttccacaaattcagtaacgatggacttaagaaattttggcggtgtgagtttcatggcccggcaggccaatgcaagggtatgctaatatattattttgaattttgaaaatcttttaa

SEQ ID NO: 22097 - DNA, 1654 bp, Heterodera glycines
cgcatcctttaccatctcagctttgatttgttccaacccccaccggtacttttgagtggttctttttgctttggtgccattaccttgtgatttacctaaatgaaagtttttgaatgaatcaaatgtagaaaaacatgcacaaaaatttttatttatttttattaatttttatccgtttagtttggcgtatggtgtttaaatttgtaaattaaatttttaatgggttttgaaggaattttggttaaattttatctttcttatgtcaattttagacactacttgtcattcttaataatccatagaaaaaataaattattcattaattgaatatttaatggacaaatatattttttaattttaaaaaatctttagaataaaattacgttccaatactctgctcattttaaatgccttgaccagtttctgcactttttcataattttctttattagcaaaattttgcgtaattttttcaaattcattaaggttttcctcttcaggtgtaatgttaaaatgtttgtacgctttcaacaatatgatttttatctccgaaatgttgtcgttcgaactcgagagaaatgatggcttcaacgccaaattctccaaaaggtctaaaaattttttaaattttcggctttttcaaattaaaaaatatatatatatatatatattttgccaattcagaatgacactctatgcaacttaacagtggaccaaaactcatatatttaaaaaaataactcaaaacggataccgcttataggcaatttttcaataaatttttaaataaaattaaattttaagaaccaataaaattttgtaaactccgataaagtctaagttccaacttcagaatttttgggctcacatttccgacttccaaaaatttcagccccctgagttgcaaaattaataagtatttctctattttaggatttatctaacaaaggaaggtccccaggtatccgtggggtttctgaatgaaacttggtgggtggatagagcatttattttttgcggaatttttatttttgcttttttatgcaacgtcaattatcaaaaaaattatttatcaataaaacctttatttttaattatttcattaaaatcaaaaaattcattaaaggtaaagaagcagtaaatctcctttaagttaaaataaattgattttgtctaacattcttcattgcgtatcttatggtgttaaaataataaaaaataaaaatttggtttcataaaaatattttcgataattgactttgcataaaaaaaagcaaaaataaaaattgttaaatggtttttgcatgcagtgggttagaacctgtgaccgaaaaaattgagaccagcgcactaccccaacgcaaacaataaaccactttttaagaacctataatctaactatttttaatttccaagtcaaatctcacgtcccgcatgcattaattatttaccttctttttgtataaatgccaacttttccattccgtttgtttcttcattaaaaactcttaatgcgtgaaatctcaaataattgcgcaatgctttgttggcaaattttagaatccggcatttgtgcaccgtttcattgtgggcatgatcaccacgaattccttcagggcaaagccattttttcttaggcattttttgttcgtct

SEQ ID NO: 22098 - DNA, 1010 bp, Heterodera glycines
  unsure (1)..(1010): unsure at all n locations
tttttttttttgcaaatttgacccggatccggatttaagtaggtggaatatatcgtgaaaaaaaatttttgaacttttcatatttacacatttcaatataaaatagccgggttctcgtgttttgccccaaaatttttacttttctatcgggaatataactacaaactacagaattctagaatggataactgcaaagtaatgagaaagacctcattaattagaaaatcccatccaaattttgtgtatttttgagcccccctccacccttgccttcctccctcttatttcttctcctcttccccccgccgttctcttttcatcttctcacttttcctcttcctcctcctcatctcttcctctttctactgccctcttctttcgtccccaattcgtcctttttcctcccattcttcctctttctcttccctcttctttcttctcctcttcctccttcctttcttcttcatcgttctccgcttccccaccctttctcttcatcttctcacttttcctcttcctcctcctcatctcttcctcctttcgtctcctcttcctcctttttcctctcattcttcctctttctcttccctcttcttctctttgcctcctctcttctacagtttatcttcacttttcttctcgttcatttcctttccactttcactgttttcatcatttttgccttccttcttctcctgctgctctttcgcgttaatgtaattgtcgaatgccttcttcgcctcctcatagaatgttttgtgctcatcaaagtgcctctgggcctgcttattcttcgcctttacagccatattatgcaggttcttctcaaatttatagtaaagaaccttcataaaattttttttttattagacccctcgtatccggtaggatgacaactgaatccccctatccgaggctgaaagatgatatgttctcgtcccgaatcccgacccgaaaaactttggttgtcctgcggcaactatnttatcctanaataatatatttcgaca

SEQ ID NO: 22099 - DNA, 1554 bp, Heterodera glycines
gcgacgcaaatgtcctaggcacaaacatctgggttgcaaatgcccaaggcgcaaatgtccggggcgcaatgtccgaggcgcaaatgcccggggcacaatgtccgaggcgcaaatgtacggggcgcaatgtccgaggcgcaaatttccgcgacgcaaatgtcctaggcacaaaaatctgggttgcaaatgcccaaggcgcaaatgtccggcgcgcaatgtccgaggcgcaaatgcccggggcacaatgtccgaggcgcaaatttccgcgacgcaaatgtcctaggcacaaaaatctgggttgcaaatgcccaaggcgcaaatgtccggggcgcaaatgtctgcacacagagccaacgtaccccgccccaatttattatttttcatttttcgacacactgtcctgtgccgtttgcttcttctccaactcattcttcgcgttctcatagttcctttttcgatccatcaatgccaacaacagtttttccaattccttatcttctttatctttataatctttacattcagctccttcattagtagaaattttttgatcatttttcaatgaaaagggaaatgtgtaataagtgtcgtttttttctgcttccacttctgaaaagagtgaaggaaattgttaaaaattggcacttatgccgccgtttttttttttttttgctttgcttttgcacttataagcgccttctgttgattttttaaaagttctaaatttggccagaaaactgaaaaagttcccaattttcatagtttttgcaaaacataatttttgacgctttaatatatatttttcaattctcaatgtttgcgaaattttttgtaggcctccggaaccaggcctagtttggaagctcttttttccatgaaaatccacagcaggatgggaattcgcagagtctttctttgaaaataattgtcccttatacagtttacgctccacctttttttctggcaaaagggtcccaaacggatgtcggattcgtgatcagcgacccttaaatattaattggtatttttttgaaaaatgaaaaaatgtggtgctaaattctatagggccaaataattaattgattgttctgagctttatgttatgcttcaccttgacttaaaagggtatgtccaagctttgcgcaatcagcgaaacattttttggcattggcagagactgggactaggctagagagctttctctcaaaaaataggcttttatggtgatgctttcgttgtgatctgcttgtggtgctgcctcaccacctttggacagcaaagtttcgtcgataataataataattatgaaaatgattaggaggaggcgggtgaaaatggtggggagaaaatttgggggaaaatgggtcatatttggaaaatgagggcacattacaaatgaaaatgaatttggtttgtgtaaaatgaatatttcttttcccttacctattatattcttatacataatgccacgcatgcagttttttatgaaaatatggattttcttagctatacatttttaagggttaaatttttaaatatttataaatttttata

SEQ ID NO: 22100 - DNA, 3382 bp, Heterodera glycines
atcagaacaacaaaaactactgtgggtgctttgaatattcttttctctttccatttaaatatactaaaatgctattaaattcaattcattaattaattagcattatataaaattaggaattgtccgaggggaaatatttgtaaattgctccaatttaaattttttttcaatttggagaaaaattgataattcaaaaatttacaaaaattaaactttcctttaaaaactctttacaagaaaatgtaaagtttttattagaaaaagttcaaaaaataatatttatttctataatttgtttcatttcctgaaaataattaactttattcaaaacatttttcttatttttaaaaatattaaaccccccccctttttttggcaatttaattaaaagagttgtatttccatggtgaacatatttctgccaaaaaatcaagtaaatagtaaattaggtttttagctcgaaatgccaataacttcaacaaaaaaaacacttataaaggggaagcggccactttggcgccagccattttggcgccaaacactataacatttttatttctcattcaaattaaataagattgatatcgttttaaagcgcttgatagtccctaatagcctgcaaaatttcaaaaaatttaattgatacataaaaaagttatggccaaaaaacctaaaaaaactgactttttctggccattttggcgccgcacgctatatcttttgtcaaaccgaatttatttttctaatattttgcaggctattaaagagcacttatgcctatttaatggtatcaaaattatttatttggttggataagaaaaaagttataacactttaaagttcgcggcgccaaaatggcccgcgccaaagtgaccccgacccttataaagaggctaatttgttaagaacccaaaattttttcatgttcaaaattggttttattgtaattcattctcagtgaattattattttcataatctcaaatatacaaaatttattttcttaaattaaataatatttggtcaatttctcatcaataaaaattttctcacttaaaatttaattgtttgaatatgctatatttgaaaattttagtcaataaaaatctgagtttctctgtagataaatttgtcttaagactgccaacaatattaatgatactgtaattagcaaaatgaattatggtactgtaattagcaaaatgaattatggtactgtaattagcaaaatgaattatggtactgtaattagcaaaatgaattatggtactgtacttagcaaaatgaattatggtactgtaattagcaaaatgaattatggtactgtaattagcaaaatgaattatggtactgtaattagcaaaaattccccaccgtttccctttcgcgcgacttgcggcgccacaacagccaacttttttctgcttctgatcatcttttgactgctgcggtttttccattggaatattagcaaatcgaatgaaaggaaattataaactaaaatatttaaattaaaaaatagaataaataattttactaacttttttcaattataaaataaaaatgaatttaaattacaatttgtcttctttaaatagccgatttctgattggcttaaagcataatacagatgtgacagattaatccactcagaagagcgaaagcgaattaaatattttaaattttagtaaatgtgctaattaggctaaatgattttgattttcacattatgaaagggatttgactgattaaatttttgtcggcatcctttgatgaatgattgcatatattttgacgaatgcgtttcataaaactgtcatactcccacaaacactccaaaaaattcttaaaaaattgaaaaatatttaaagaattttcgaacattttaaaattttgcgaaaaaatttagattttaagaaaaatatcaaagtatttttatataaatataaaaattatttgcttatagttttaaaaatttactatattttttcccaattttttcttgaagaataatcatttaaaaatgcaattttctttttttaggttttacaaccttggaaaattggaatttttaatttcatgacacgtggaaacaaaagagtttcaagcagtttggaggacgagagcaaattcggagcagcggcgtattgggcggggacaaagggcccaatttcgaacaaaagttcgagcggaaggcatttgagtgccacaattaggtttaggggttaattagggagggttttatggattgttactgtaattgttattatggcgactgattaatggtgcccccaccactgaacattcattgcaatttttctcccccgaggggcgttggcgttgtgttctctgtctgtctgtgtctgtcttcgtctcccaataaaataataaattttctgtatttatccgattaattcttattaaaaattaattatgtattgggctcaaaataatatatggacaacaaatgaaaaaatagaaacaaaaataataaaattaatggcaaaaattctctgtttagtgtgggcattttagggatacggtaaaataaattcatacggtaaagagagaacgaaagagagacagagagagaagggggagagagagagactatgagaagagagacaggggcacatggagagagtgagagatgtgatgctaagaaagaatgtgaaactgtacaggtagacaaaggactgtgggagagagaagggtgaatatacggcacaccatttctgcggaaattttgactctttttttactgccagtaaattacggtatttttcaaaattgtatgaatttttggcagatctttataaaagatcattcttttggataaatatgaaaaagctaatgaaattggtggtccggcggtgctgaaaggcacgccccaggtgaaacatttagcgatttttgtctccaaaatttaattaaaaactcaaaaagttgcccagcaggtttacatgcctggcattggccttttaaatgcctggccattcttttcatttgttggtcccttctctctacccaatgaaaataaaattaaaaaaggaattttggcgaaatgtattttgatcgtggcaataaaaagtcgtaaaattgatgagtcatcgggccatttttttcggggccattggcgcctcaccacacgcgacacttccgcgccggattcattgggctgcccgccggacagtcgtaagctgtcgcaaagtccatcgaattggacaggggacctttgacactgtgaaaggttggcaaaattttaaaatttagtttttaaatccaaatttagcgggacaaaggcggcttaattcaagaaaaatatgcatttttgaaaattagaaagtttcttaacaaacgcatttaaggctctaagaaatttt

SEQ ID NO: 22101 - DNA, 1950 bp, Heterodera glycines
ctgatcactactcgaaaaatgagtgattgaattttcacttaaaagttaagcctaaactttttggcctgtttaaaaaggaattaaaaatttttaaaaattttattcatctccctttttgatagaaaaagcatcagagtgcctaaactaacatgtaaataaaatttggtgcgtttcagaaccctttctgaaaaaatatttaagaattaattttgcaaaaaataaataaaaacgaaagactcagattttcgaaaatttttttgagccagctagctcggcgctcatttcagtgtaagttagtcctttaccggggagtatccctgcaaagtttggtacgcttctgctcaattagcaaaaaatatgagtgatcgaattttcactaaaaaagttaagcctacattttttggcatatttaaaaagcaattaaaaaattttttaaatgagaattcatgcgagattttctggaaataagcttaatagggcctagttaagctgtaaaaaaaaatttggggcgatttgaaagagaatagaaagaaccaggttcgatgaagttttggtaagccaaaaaaaatccaaacatttaaaaatctataaaaaatttaaaaatgagaattcatgcgagattttctggaaataagcttaatagggcctagttaagctgtaaaaaaaatttggggcgatttgaatgagaatagaaagagccaggttcgatgaagttttggtaagccaaaaaaaaatccaaacattttttataaaaaatttaaaaatgagaattcatgcgagattttctggaaataagcttaatatggcctagttaagctgtaaaaaaaatttggggcgatttgaatgagaatagaaagagccaggttcgatgaagttttggtaagccaaaaaaaaatccaaacatttaaaaatctataaaaaatttaaaaatgagaattcatgcgagattttctggaaataagcttaatagggcctagttaagctgtaaaaaaatttggggcgatttgaatgagaatagaaagagccaggttcgatgaagttttggtaagccaaaaaaaaatccaaacatttatttataaaaaatttaaaaatgagaattcatgcgagattttctggaaataagcttaatagggcctagttaagctgtaaaaaaaatttggggcgatttgaatgagaatagaaagagccaggttcgatgaagttttggtaagccaaaaaaaaatccaaacatttaaaaatctataaaaaatttaaaaatgagaattcatgcgagattttctggaaataagcttaatagggcctagttaagctgtaaaaaaaatttagagcgatttgaatgagaatagaaagagccaggttcgatgaagttttggtaagccaaaaaaatatccaaatatttaaaaatctataaaaaactccccataaatctgggcgcatcggttcggggggactgccccgaaaacaaaaaaatcgattttttcaagtgtccgtttggggtactcaaacaattatggggagcaaaaatccaatgcagaattaaagtacaggctatagggaagctattcccgaaggattcggtctccccataaatctgggcgcatcggttcggggggactgccccgaaaacaaaaaaatcgattttttcaagtgtccgtttggggtactcaaacaattatggggagcaaaaatccaacgcagaattaaagtacaggctatagggaagctattcccgaaggattcggtctccccataaatctgggcgcatcggttcggggggactgccccgaaaacaaaaaaatcgattttttcaagtgtccgtttggggtactcaaacaattatggggagcaaaaatccaacgcagaattaaagtacaggctatagggaagctattcccgaaggattcggtctccccataaatctaggcgcatcggttcggggggactgccccg

SEQ ID NO: 22102 - DNA, 2836 bp, Heterodera glycines
tggccggacgattttggtggttgatcactttgaagggccactggcgaatgtcgcgctgcaccatcgggtcgtcccagggccgtccgatcagtcttttggcctcaaaaattgtgttggtcgggttccgggccatttggtccttggccgggtcgccgatcagtcgctcggtgtccgtgaaggcgaccaccgacggagtggttttattgccctaaaaatcctaatttttaattacatatttaaaaactaattccacaaagttttattgacttttaaatttatttttgtcggcagcttttcatttttattaacactgtaaaaactatgtctgcacctcgttgcttaacaaatgtaaataatattatttccatttatttattccaaatttaataaaatatattttacctgatcgttagcaataatctccacctttccatgctgataaacgccaacacatgaatatgttgtgcccagatcaatgccaattgctttgcaagacgccatttatttttatataaaattagttttgtaccaacaactaaaacaattaaaaaataaattattattgaaaataaaaatgaaaacattgttctcaacatggcaattttgtgcattttattgatgcatatgtaagtcagaggaaagagaaaaggctcaaacaaacaaacaaaaaaataacaaaataacaaagaaccaaagattacggcgggggaggacgggagggggaagtatcagctggaaatcacgcgaacaaagaagcgggtggcagaaagaaaagaaagaagggcacaagaaaagaaaagaaaatgccagaattatttaagaaaatttaaagaatttcataattattgtgatagaatttgagctctcaataaaaatatagtgaaaggcttttctaaatatgtttatgaatttaaagatttcggtttgcttgcagagagatgtaaaaataagcattttttgttttcaaatcaaaatatattcatttttatattccgtaatttcataattaaaaaagtaaacaaattttctgattttccattaaatctcttctgtctttctttggccttgaaaaatctaaatttaactctttccaaaaatataagaattaaaaaattaatgaaggtcgagatgaaagaaaacattaacaaattattgtgtatgtaggtccgaccaattttcggtccattaaaatctttttgaaattgcaaatgaaaaacaataaatacgaattaaaataaatcataaaagcccgaaaaattgaaaaaacgagttttaattacaatattcaggaaattagaaaaatagaaatttaaattatcagtagcgacatttttcttttccgtctcgcaaaaattctcaaaaacaccaaatgatcctcaaattcatgtacattaaaattcaaaaattcaaataaatttgaaatgaaagcataaatataaaaataaaaaaattataaaaaaaaagaaatttgaagaaaatttgttctcgaatgttcgcatgaatgagtcagaaaattcccgacaaaaattacaaattgggaggaaattggcggtttatataaaaaaataaaaataaaataaaaatttatatatttaattattaaaaaaaaatagtttttatgaatattaaatctagaaaagaagaaatgaaaaacttcgcaataattaaaaaatatcaaaaagaatcctttgtaattgtaataaaatataaagaaaattaatttaaaaaaagaacataaagaaccaataaaattgaaacccaaaaaaataaaaaagcaaaaaaaaaaaaacaataaaaaatagaaaaagaaaaaaagggaaaaatagacctaaaaatcatagcaaaaatatttgtttgtattgaatctttggtttgaattttttatttccttaacatgaaaaagtcaaagatttcgcgctatgtttaaaaaacttattacaagaaaaaactttttatgaccaggcacattaaaaacatcatatgtaattctttttattttattccctcccatgagtggcggttgtgcacaaatcttttgacttttcttcttacaatacacgagtagcaaatttgcgcccttccagtcgttttgtaagaaaattctgccaccaacagttcgctggtgccggtgtcatgacaattcataaaaaagtcaattctacaatttctttaggcttgcttagtcctatgcttaggcttaagatttaggctttatttggtaaaatacgagttgccttttgtatgagttgcgattgacccttggtgctgacaggcgcagccagagaaaaatttagaaatttttaatgcgatattccaatttttgaggaatttttcaaaaagcacaaactcaaaaaccattttagaaaaaaccgtttcgaccccttcaaataccacaaaagaggacaaattctcagatctgagaatcttaaacattagcatagcaacgaagtcaaatatattatattttgggtgcgaaaatgatttgttctctagcagcagatgaaattcatctcttcatgaagtaaacgcaaaaaatcgcagcccagcaaagtgtccaagccatcaatatttatgatgcgatttgatagaaaattgtttgctgatcatttttaaaagaagtttatggctctatcatttgttttaagtttttatgaatttttaaaaattttgtcattttcatcgatttttcagaactttgatcacttttttctgatcagtttggaggacaaggccaaaaatggcaaaaattgtgtatagcagatcgactatgctctacacgaaaaaaaaggatttaaagtgatctgggtgggtacagttcggaatgttcccctgtcag

SEQ ID NO: 22103 - DNA, 1283 bp, Heterodera glycines
ctatttatgaaaataatctaacaattcagatgttaaactttattatgaattccgaaacaataaaaatttgaaaagattcgttccatttaaaatgtccgccaattttgcgacgaaaaaattgaaccaaatttcggagttatggcaacacatggcttttggagaggacagatttaacgaattggacatttacaatttggtatttttaattttaaataaattgcaaaatgaattatttatttagaaaaatgaaattgcaaagggaaataattatctgatttttgatgtaaatcaaaaagccatggttgaaaatataatcagagaaatggatgaacttctcaaaaattgggtaaatatttaataaatttgttgattttttaaaacttgatttttagtcatcaaaaataaattgccatttctccgacgaatggctgtttagacccaaagaagaagcgaaactcagtgccatttgcataatgccatttgaatttgacatttcgtcctttttgggcacttatttttcgagtaattcgtcagttttccatgaccaatcgctgttctgtcgactgtccaaagtaaataatttattttttcaaataaattttaaattctattttttcaatttccagaaggaaaatctattggcactccaaagaattcaaaaagattatttcaactccgtgccacaaattcatttcacttaccaaactctgcctgtaaccattatggccattttggtaccaaaccttggccaagaagtgccaaatgggccattggatgaccaaaaaatcaaaacaatcgcacaaaaatttggcgatgaaatcgaaaaattgatcagagctgatcatctttttgacgaaggccaatttcgaatcagccaaagagtgaacgaccaaacaatggagcagttggccaattcaattgttcacgcaggtaaaagggcggacaatcaaaatgaagagataattaggtaattaactgagtgttaagtgccaaaagaagcggccaaaattatgcaccaatgggtaatgttcgatcagttaaaagacctgctgttgaaggaccgacaaaaagcaatgaacctgagggaatctgtgaaaactcatttggccatgataaaggcatttgcaagtgcgaaaaatgccaaataaagtttaaaacccaatttttgaaattttagactttacaactcatgcaaaaatttcattggtttttattggacaaattggacacaacacaaaaagaagcagccagcactgtgcttaacccgcacattaataatcata

SEQ ID NO: 22104 - DNA, 969 bp, Heterodera glycines
atggcataattatattaaatagaatctctcaaaaataaaatgcgattaattaatactagttaattaactaattaattgcaggccctggccactgccggttcaattgacagaaatttgtgtccacagaaagggcgaatttctgagttggatgccgggcagagaatggttcacaaaaaggcaacattcgcccaaaaagatgctcaaggcgatccatgccgaattggcaatggccatcgttacgccgacattccctgaacgaaatttggcacaaaactcaaatatttccgctttaaaatgcatccaaaatcaaatgaataaaggcaattaaatttgaaataattgcacaaataaaatgataattttagcattgaaaactctgcgaaatgaatctgagaaaaatgcgctaattgggccattaatcaacaaaacattcagccaaatggtaaaataaaaattaatttcataaattgttccattaagtatgagcacttcattgttgtcatttgcgctgctccgaattatcaaattgaaacttttgctaattttgttggcattcgaattgggcacgaattgccagaaataatcgaaaatccgttggaaagatggattaagttttgccatctgtttgcccgtccaatttcacttggcgaatgtaataataataataataatgcaccatctccaaaatcatcgtcgacgtaaaaacatttttatgcttttaatttaatatatataaatttaaaaaaagatttatttttcagttattgtaaaaagatttggctggtcggaattgaagtgaatgagaagcaaaaagaattgagcaaatttcaggacaaaatgcgagaaaagcttaaaaagaaattggccaaaaaaatcatcagcaatttcgagggaagctttgttgaaattgaaacggactatgtcaatgagcgggaacagctccaaaaattgtggtgaacaattggaaag

SEQ ID NO: 22105 - DNA, 1744 bp, Heterodera glycines
aaaatttgggtgcaatttgttaacagattttcaacaaaaaaaggttggtttttgcgattattaagctcaattggtaggattttcatttaaaaaatgataaaatatgtatcaatttaaaaaaaaaactatgaggaatcatattttctttataggaaacccacgagtatacaaaaaaaaaattgaaaataatctaatttctgtagagggattgaaccaggggaaagaagaagggaaagtcaaggagactagccattaggccatttgcacacttgcgcagtgttacttttaaagaatatattaattattattttttatttttctctttgactccaattttcttcactaatttttcactcagaccccattcttaccagtgcttgtttttcccggttcccggttgccctaccgggaccgtgaccgggacctgagattttcaaaacccgggaccgggaaccgggacctcggatgaccgggaattcccggcccggtcccggtccctgtcccgtggcactctacttagaaatattttttgcggagaatcaacctcaatgttgatatttatttaaatcaacaaacattacgccatcaacttaaatatcaacgtaatttttaaaaatttaaaaatgaattccattatttagtatatctcattagctataaaaggaattgaaggaaataaaaataaatatgaaagcaaaaaattatgttgtcaatcaatttgttgtctttcaattgaaacattgactcatctcctattttccgatcgcctacagccgtctctccgtccgttgacaatcatttcgatcgtttacagcgatttcttcgagaatgcttcttcttgttgcttttcctctcttaatttttctacggatttgccttgttaacataataatttagaatttatggcgagtcattccgatgaatacgaaattgatgaattttggttggataacattgcctatgatgacggcgagccacgtccaaagtcgaaaaaatgcgaaattattgcagggattgaccttcaaagtcacagacaacggcgagagtgggctgaaagtcgaatcttccgtcaatactacgatattattttggatggaaatggaaatttgactaattatgtaatatgcaaatcctgcgtgccacctgcgaaacctgttacatttaattatgccgggtttcataatttgcggtatattaaagactttaatttaaatatttttggatttgaggagacatttgaaaaattggcatgggataaaatttggcacaaatgacaaatatgacaaaatggaattagcattggttgaattttgtgttgctgatggacgtcccttttcaattatcaagggcgaaggattcaagcatttcatggatgcttatgccgaattaatgtaaccggttttggatgagtataagggaaaagttttagtattgaacggcatctgcaaaagcgatcagtactctaagctgatcttttgccaaatgagagaacaattggcagaaaagtgattgaaactctgcagacaaaggaatcggaactggacaaagaattaattgacgtcagacaaagtgcttgcacattgtcactcgatttttcacaaaaattgggtgttgattatgcagttgtagtgatcgagaaagtcatcatttttgccttgcgcatatcatttctacaatttgtcggcggatcactgaaccttatgtcaatgcgaatttaacaaacgaaaaaaagcagattgttaac

SEQ ID NO: 22106 - DNA, 2007 bp, Heterodera glycines
ccttagcaaattttccctttctcaaactgtaacacattatggaagacaaatttataataattttattcacacgacggacacacaattttcagcatcagaaggaggcggacggaggcgacttcttgaaagaaaaagcggatcaagtggttggataatgggggggggggataaattggttgggaagaagagagagagacggtgctttctgaagagagcgcatgagaaatggggggaaattgaaaattgaatgggcatggaattggggcgcaatttgaatacttttgaagattttgtgggcacatctgacccaacataataacaacaatctgaaagtgtgcccacatagagtagcataagcagggcaaaatggttattaagaaaatttggcggaaatttggggcaaatttaggggagatgaaaggggccaattccaaatttgaataaattaaaaatagtttgggcggttaatgccaatgaaaaatttgattaaaataaaatagtttagggttaatgccaattttaaaaccttaatagttaatgagaatttaaattaaaaaaaaactgaaaagggccaatttttaagttgaaaaaattggaaataaaatgagatttattgaaaattttgtgggcacaaaattcaaatttgaataaattaaaaatagtttgggcggttaatggcaattaaaaacttgaataaataaaaataataaattttagttgatggttaatttaaattaaataataagtattagaaactcaacaaattcaaaaaaaattaagatttataaataaataaaaattaagaaaaattatgagacttagatattaattagctcgataataatgtaaggaaatcctaggctttcgtggaaaatcaaaaactctgtagtttttaatttgtatgggtttagtatttcatgtatcatattatgtttcaggtagaattgagcaaataataacaatgattgcataataaagcaaaataatacagaaaattttttcaaaataataaacttattcataaaatatatttctaatacaattaaaaaaatatataaaatagtctataaaggaaaactaaaagattaaaaatatatgaaaaccatggatatttttaataatgaaaaaaatataaaaatcaaaatctaaaaaattcatataattaaaaaaaaagacgaaaaattctgtctcaaaatttgtgtaaatttgtttttattgtccaaattttggctcttgaaacaattaaaatcgccgcgccgtgccgcgcactttgtcccacaacgatggaaaagaatgccgtgggaggatgtgccaatcaattatttatccctcggggcgttttgccttcgccggggggggcaggggcgggggagacgataattatcatcctctggtcgtcacatcttcatcatcattatctctatagcggggggcagtagctcttcattcattattgttttctgtctttgtttctgcttcgggcaatggacggaggatatgctggctaatttgaatttggcgcacgcctcttggcgcattgccaactgacaaaacgagttttaatttatcaatattgaaaaatttggtcattaacaaaaaaaatttttttttaaacaataaataaccaaataaacccttttctttaacttataattatgccttgggggcgaattctcatcttcagctgatttttgaatataaaatttacaaaattgtataacggtctgccaatgaaaacaattcaatgtttcattcttatcacattgataaaaatcaaaagtgattgatcccgctttgtcaaattgaccttttcaaaaatatggcctctgaaattgattgggtttgggatcagcagagagggaaagctgcttgctggcccccacattttgggcttttcggtgggtggtttagttagtccttgcaccaccactcatcagcaagtagcccacccatactcaatggcatccgtttttggcatctcccggtgcgggggggggggggagggcg

SEQ ID NO: 22107 - DNA, 1369 bp, Heterodera glycines
agcgtcatttttctcaaatttggacttgagggatgccaatttgcaaatggagttggacgaggagtccaaggacctttgtgtgatcaatacgcatcgcggccctattccaatgccagcgcttacctttcggagtaaagtcgacaccgtccattttgcaacatgttatggagcagatagaagatcgacctcggggggtactaggggttttgacgggttgggcaattctgatgacccccgggggggccatatgcaaattgggcggaacaatggcaaaagaatgaagaatgagaaagagacacaagacaagaaaaaaagaattggaggctgagaaagatgccaaattcaaatggcatacaaatgcattgatatgggcataaggttattgggaaattggtttggagaagaataaagaatatattgttgattgaattcgaaattgtaatttaaatttaaaaaggcacttttggaaaagcaaattcgattttttttttttttgattatttaattgatttctattttttcttatagatttataaaataaaaattatgcatttatttttataatcatttttcttttgtttaaatattttattttaaaaattatttcaatgaaaattatttataaaatatttaaagaattaaaaaattttagctccaatcatttcaaattagcatcataaaattggaaaatgaatgtgagttaagttaattttaaattttcaattaattaaaataaatttaaaagatttctcttaaaaacaatgaatgtattaaatgtatttataaaaataaaatttaaatttattttgaagctaaatttaatttgactaaaatttgtattaaacaatgaattaaattaaattttaaaagaaaaaaaagtattccagaggaaattcgaaaaaaataatttataattggaaaatggcaatgaaattaatcataaactcttttaaaacattgaagaattgcatcaaattttaccagggatacctagataacaggagactattttaatctgtaatttaatactcatatattagaaataacaatttattcgatttttaaattttaaaaattcatgtttaatttataactcttcaaaaatgctcagaagtctcatcaattaataataaataaatatcacgcaacgataagataataggctaatggagaagctataagaatgtttttgaatctttcaaaaaattttttaatatttttttaaatcgcataaatcgagcaattttcatttaattttaatttcatatcacttccaactaggaaaatgtttttcaatctttcagttttttcttaacaatgttttatttttttttaattagattaattgaaaattacatttatttttatt

SEQ ID NO: 22108 - DNA, 1700 bp, Heterodera glycines
aaaatttttcaattcataaaggtatattctctgaatttttttagatcatttcttaggcgtgtatttttcagatttttttgaatttttaatggaatttttcgggaaaaacgccaaaaaggcaccaaatcgctaaaactaatctttgtggtttttttagaatcaaggagcaaacatatgttttttggctgcattttctatcattttccaaacctttagtacaccattgatagagcttcaatagctctacaattttactcagaggtgatctttcgctttttctattgataaaaatggtttattgtttttttgggaaaagataaaaaaattcaaaaaaaccgaaaccaaaacggtataccgaaaatttttcttcggttttttcgatttcggtttttttcggttttttaaccgaaaccgttcaaccgagaattttttgagtttttcgggttttttcggtttcggtttttttccgttcgaacgaccctcttgtccggtctctagtaaaaagtgaaatttagaaaataaattttacaaatgagcttttacattttatataaagtttttttttatctaaaacgaaataaaattgtaaaatatatttttaatgagaataataaaaattgtttaaatataaaaacataagaacgctaaaataactcatattttctgaatataattatacaaaacaaaaaaaaaacatttataaaaacataaaatatataattgtagtagtgacaacgactgaatacgcagagatgaataagccaagaaaaattaaaagtataattttcttaaaaactgatttatgaataaaatgctaaaatttagaaaataaatgatttgctttcttagtatttataataaatagcaattcataatttgtcatcaaaacggaaaagtaccaaaatagcttaagggggatcggtggtgccgacagacaccgccgggggaaatttttttatgaatttcgttagaaattagccaaatttttcagaaatttcattcttttggatgaaaatacgccctaaaatcagaacatttctcaaatgaaaacatcaaccggtgtcgaaatcctaacaagaaatactgttactgttaaagcactaccactaaaccataaatatattggaaattaacagcaaaatttactttatttcataaaaattttgtcaaagatccccggcgggggtgacgggggcggggtccaaaccctagttaaaagttcccaaaatatacataaaatattcaaaatttgatttaaaatttgcatttttttaagaaaatctcttaaaatgaatgaaaaatctacaaaacttccccacaccggccccaaaatccttattctcttataaaaattggctcagaatcccaaaattttggtctttttgaactaaatctgttaataaatcgcattaaaaattacaaaaattttcccggcgacgcctatcggcaccgccgggggctctactgcattttacgcgtccaatcgacttttacgcgtccaatcaaaattttcctaaatcgaacatcctattgacataagttaccaaccattgcaaaaagaaataataatttaaatattaaaaacgtaacaccaagagaaagaaaaaattactaatcaatttttaataaaatttaaatccgtcattgatcaattattatcaaagtatcgataggtatatacgcattcaatcaattgttat

SEQ ID NO: 22109 - DNA, 2113 bp, Heterodera glycines
gaaaaaaataaggacaatttacaaaagtcggtgaattttagaatggcatggcaacggaaaaagggaacactaaaaacaaatggtattttgattttaatatttttcaacaatttatttgcccctaaattacccattttaattcgctttgtctgtttgatcagtgatcagggtcttctgccgtcgttcacttgccaatgccaaaatgatggtcgttttcttcctctgctaccgcttctgtaacccttcgaatgtgtcgagaccagtaattaagtgccccccgccctcggggcattcataaccattccaagtaaatccccccacccccccccctaccgtaccctttccttctctccccatttgctcatccatcttccttcttctctcttgtgtaaatattatttgtgggctccaatgcgactgacaacgagcggactgtgcgttggtcgttctgtgacattcgaattgcacttggacaattagtccatttttgttaattggcactttcactagtgacgcaaatgaaaatgatcactaataacttgcgagaattcataaggcaaacaaacaaagaaagggagaacgaatttagcatttccatcggaaaactatcaaaatcaaaaggaatacataaatttgtaactcatattaattaatctttggcttgcaatgaatagtggacaatcggcccaaaatggctcatcccccgctcaatcactacgtaatgccaacgccaatcccattattcggcgggcgacgatttgcccctcgggcgaacttcccgcggtgcgacgaatgactgaaagtgaaatgaatgaaaaaggggggggggggggggagaccatcgcaggcaaaggcattgttcgtctgtccctctcctcccaatagcccggggattgcatggatttgatggcttcacaggtggcgcagtgccaaagaaaggggccaattcgaaggagggaaattccttcgtcggctcaattttaagaagaaactgaggaaataattattgtcctgaagataaagcataaaactttcagagaaacgcagaggaaatttgaacacaaatgttaggacaaattggaaaagcaattcaaattcaataaaaaaatgaaaggaaaagcgatggatgacttaaattgtttatgtttttgtttcgtttttgtatgtttatttttgcccgttttgtgcgaaatcccccccccccctccgccattcgttcgtttccttttctgctcacctttccttttccatttcatccctccgcgcaacactcagtggcaatggcaaaggccgataattgcggaaatatgtgccgatttgacacttcaaaagctttgccgcccttcgttgaggtcacacccaacccttttgcaaggaaaatgccaaaaaatctcctgggaatttccgttttcgctttcctaaaaaccgcgcttttttattgccattcacacatttctcgaacggttatgtaatcaatggccattttagtgcttattttaccattggaaaaattctaaatcgaatgaatgccatggcattggcaaagtcaaccaaaataaggcattgagcggaaggttaatccatccatcagtagcagaaaacgcatcgtccacccattcagtctcatccggtgatttggttggctttgggaacacaacgccacaccacgactaatccattcgcaaatccaacactaactcatcgtcggatgggtggcggggcgggggaagagaggtcgagattggtccgccgatgccttcccatccatcttcattttcttgtccatttgctaatctcaaccggggaatgttgtgcaacacaacatcagtcagtttggcctcattgcccgcttaattggactttcaatagcaaatcgccaaatttcaatgaagaagatgaagggagtcattgaattttcgctaataatttcgaaataattaaaaaagtttggaaacattgagtgaatttcttccgccgttctttgcttcggattctttttctcttccgctatttttctcacttttccggttctttttttgggtttggtaaaaaaaagaatcccttggctttgtttgagctatcatggccatgaaaatgaatggtgcagctgtta

SEQ ID NO: 22110 - DNA, 1123 bp, Heterodera glycines
ctcttttgctgccggtgcctttctccgccgcattttcttttaggcgatggatttaccgcctattttatgtatgggcgaggttaatatattcttaaataatctctgtttgttccaccattttctttttcccttgcattagcaaaaataataataataattattaatattattattactttttttatttgagtgaaattaatccaaaaatgtaattccatccgccgacttgtttgcttgtgaatgctaatttgttgtcagttattattttgctacaacaataataatgatgggatgggaacacgagggacaacggatgggggagagggagagagggggagggggaaggcatcagcagcaagggggagtcacgaggggtgggcagcaggggaggggtgtccccaaatgacccctaatgatcttccctcccttttctctctcattccctccatcccttaaaatcggtgcaacaaattccccgccccccctccttttttctgatcgattcatcagcaccccaaataaatttttatattaagaatttttctttttcacttcaatcccccttacgctctctctctctcactctctctctccatctctcctctcactctctctctctccccctctctctctccatctatcctctcactctctctcactctctctctccatctctcctctcactctctctctctctcactctctctctccatctctcctctcactctctctctctccccctctctctctcctctcactctctctctccctctccccctctctaagtctgttttaggttcattttctttcttttatctctctttgtctgtgtcactgttctttctccgttttatctcctcttccttttcactgcatcctttcatgttctcttccctcatctatttagaagaaagtggaggaaggtcggctgacaataaaagaaatgctttgcagatagcgccggcggccaatgtgtgtgtatgtacctctgctaacgaaaaagaatagagagaaaaagagtgggataggagagagagagagagagaaaagagagagagagagagaaaatgttgaattggaatgcaaagggagcggagagtgtgagacaacaatagaaagatga

SEQ ID NO: 22111 - DNA, 692 bp, Heterodera glycines
ggtggtgcccttccgtcaattcctttaagtttcagctttgcacccatacttcccccggaaccggaagactttcgtttccgggaagctccccaccagggcgaataaatccgccggcggatcgctagttggcatcgtttacggtcagaactagggcggtatctgatcgccttcgaacctcagactttcgttcttgcttaatgaagacattcttgccaaattctttcgctgtagtccgtcttgctacggtccatagaatttcacctctcacgtagcaatacgaatggcgccgtctgtcttcagttacccattatctcagggggagaaaggaaggagaagagaaggggggaggggagaccgattttggatcgaccgggagtggagggattggcgtggggagggattgtgagcattgttaactctgagcagttgcaaataattctaattattttttccaatttctcaaatccgcttcctcccaggcttatcttccccccggtgcccgcacttacagttgcgcccattgccgtgccaatttggcccatcacaatgagctgatctccaagtctttccaagtgaggagaaatgaaagggtagaaaaaagtgcgaagaaatgaggtccaaattcaaggggagtcagggcaaggcgtatctgttcaattcggtggtgaacatcgtttgcggaccggcggagg

SEQ ID NO: 22112 - DNA, 1415 bp, Heterodera glycines
actgaacgaagaaaactgaactgatgtctacagaataataaattttgaaattttacagttccatccggtgtgttaacaatgggagaattgctcggcatttatcagttcaattcccatccttataatcttcgtggagaccccgggctgtactcgttgaaattcccaagccatggccgaatttttgattggaacatagccaaggacaaccgaagggggacacttgcattgcaaattgaagaagtgtcggaatttgcgggagagtctgtctggagtagacgattaagtgatgccgtggagataaaaggattggcattgaaaattagagcactaataagagaaaagagtgaaggcactgatgagaagaaatgcttgggattttacttatggtgcgatccaaaagaaggtcatattttaataaatattaaaaaaaaaaattttgatcaatgataggagggccgaggaacagcgttttttcggcaacatttcgaattgtatcggaaaagatcaaagtggaaaattccattgggaaactttatgataatgttattgaccctgtatatcaatttggattcggaaattttattacttttttagtgagtgagaatttaactttgccttaattggtctaattatggttacttaaggaattaatggacccaagaaatggtttttacgacagagaagaggacaaagtgatattggctattgatgtcattctgaaagatgaacaaatggagaaatttatttccgatccgaacaaatccaatggaacaattttaatggacattgaaaaagtgtcggaatttgcgcgagaaatcattgggagtgaacgcaaaagtgaagctgtgcacatcaaaggattcccatggaaaataagggcagaagtagaaaagaaaaatgacaatgagaaatggttgggcttttaccttttgtgtgccgctccaaaaaaaggtgcaaaattaaagttaattgataataatagtaattaatttgcattgtttagaaaattggagttacgaatgttcttcaacttttcgaattgtgtcgcaaaagagtggcataaaagattctaagagagaaataaacgaaaaaagaactttcaaaagtcaaacgaccaacaggggattcccttatttcattccatttgtggtgaatgacaataaactttccataattgacccaattatggctaattaaggaactgatggacccggccaaaggcttttacgacaaaagcgaggacaaagtgacattggccattgatgtcagtgtgaaataagcataaatggagaacaaatcataaattattcatatgctctgggaaatctcgtccttgaattatcatcctatggacctttttttatcatatttcttactgtttaaatttgttcattatataaaaactggattggatt

SEQ ID NO: 22113 - DNA, 1742 bp, Heterodera glycines
  unsure (1)..(1742): unsure at all n locations
atgaaattcagttgatgtcaaatcgcccgttgggacaattgagtgtcccccagatatggtccataatttaagtgaaaattagtttcctgaaatccttaattatgctgacatgagcatacatctgacattaattttttttttcatatcaaactgtcaaatctaagctttagaatgcaatcattttcaaacaaatataattatgactttcttctgaaaaatccaattacttttttgttatcggctgcttagaaaaagcttttcctcattaagtgcttttgaataatattctaaaaccgccttggcaattgggtttttgataatataaaaattgtaagcatattgaattgacattatcttagtttaggcaatctgtgtgattaaaattattccagatacatgttcagcaacccaagggaaacattaataaactgattttatgaaaaaactaatggatccattttaaaagattgcacaaaaatttactagataattcattttaaaaagttgttaaaattaaaattttattttttatttaaggtaataaatttttcttcaaaatggcgaaccaattctccttgttctttttgctcatcattttcaatggaatcatgagttacgtttttgttccggtagcattttttattattttgctaaatatttaatttctatttatataaaaaaatatttttgtgggttttaggtgaagttttagggaaaaaggaatattaattattaattttgaagatagaatactactagtaattttattttaattatataaatcttttttttgaaatattaaaaaaaaatacaaaatttttctattcatttgcatggaagagggagcaaaataatttttttgctcacaaatcaaattccagtagggagggtgctccaaattgctatttgctttgcccttaataatatttgttcagtgacaaatgagcaacttttccattaacgtttaaccactatttttgtgtggtgaaatgtaaaattttcaaaaaatttatttaaatttgatcaaattcatttcttcggtggctatttgacaaagaatatttcttctttagaaatgtgttgttttttaattgaaattgatctgccctttttaaaaatttttagagacgctgctatcaattctacacgactgatgatgatgaaattgttggtgaagaacaaaaatggtcccgcacagattgtcaataccaagttggatttacgttcgtgcagcttaagtctaaatgctattttatgaactgctcaaatggtattttttcgaataaaattttaacaattataatgtatttatttataatttattctaatatacttaatttaaatcaaggagatactaaccagaaaacatatgggtgcgccactgatttcgattcttcctataatgacaaatgctttccctatgaaaaggatggtaatgcttgctggatttgattcacgagtttaataggaaaatattacgattttcttccaagaataagattatgttcaatattgtcctgcaaaatttcaaaaaattttcatttgttttaaaaaaagatgaacaaaaatgttcgaacataagttttttanattcctctgtcataactttttttanagttaaagaatttttttttgaaattacagtctaatagagagtaatattcttatcgagagatttattagaatttcgtattcttagctaatataatgaataattttgagatagctatgtaattgcactg

SEQ ID NO: 22114 - DNA, 1143 bp, Heterodera glycines
tgccaacctaattagcagcattaccctcagtgctgttcttacttgaaggatcagtcggcgtggcgaagttttgccgaaacggcgatgacaaatggaaacatcgaactcggtcagtgagtccattggttaaatgcatttccaattgcaattggaactgtgcccaaaaagctgtgcgaatatttcggcacctcggtgacgtggcgatggtttgggcacttgagcaacttctgaacatcgaagaccaacaaacgctcagtggccatgtggccgcactgctcggcaacttcgacgaggccgacgattttttctccaattcgtcccaaccaaaacttgccctggaggtgctggggcactcgtcaacaattatttcaaattactttcaaattttccaatgattggtcttttgattctgatcagtctattaatttttgctccataattacttatgatttttcggctttatttgctgttagatgcgccgcgacgttcaacattgggaaagggcgttggaattggcgcgacaaacggcgcccgacgaattgccgggcatcgccaaggaatacgcggtacagctcgaatttgcggggcaacacgcggaagcatttcgctattacgaagaggcattgatcacttcatccagcggaaacgcatcgaaaatgagcgaagaacagagggaggaacacaattgggtgtgctcggcggggtgagcaatgggaaaatggacggagacggggcgggggggacactgaatgggatatatcgtaaaggatttacggcgatcagcaaagatggaaagctgatcggaatgcatctggatgactatggggaggactaattggatggaattcactgtttagactagccagaatggcacttcatatgggcgatctgaagaggtaagtttaagaaaactaaaatgattaattaacccagcaattgtccctctcccccaaaaggggcgtggaaatcgctttaaaattgccgagtcgattggccaagagagattgtggcattgtgcttgaacagcttagagtaattttgtgattgctattctaaatttagcttttcatttgttagcaattcgacgaggcgggaagtgtttacgaagcgggtcaattttatgatcgtgccgcggtttgacta

SEQ ID NO: 22115 - DNA, 1366 bp, Heterodera glycines
tttggaaaagcatggcattcaatgggctgagcatttgagtgccaataattgcttaaggacccaaagtttctgttccaattgtacgtcaaattgaaaatgtacagcgaagcggcaaagaccgcactgatcatttcgcatgagcaacgccagcagggcttttacaaaactgcgcatgacttgcttttcggttgggcaaaggccctttcgtccgccacccttttgatcatttccccaaggaatgtgccgaacccttcgcagcgagcgcatccgaacgccgtccgaaatggaaaactcactgatgctgctgcacagttacaatttggtcaaagttttgttgaaaaaaggcgacaattacgcgggcgggcgattgctgtgccgagtggtggccgacatcggccaatttcccgcacgtccgtgggaagggagtgaatgccaatcgcaaaaggttggaccattcagatgccgtgccgattctgaccagtgccgtgatcacgtgcacaaaaggtttctgctgttagtgctgagttcggcggatgattcccccaattttaacaattgaagccggcttcaaaaagtccgccttcaaatttgcttcccaattgatgcagccgacgaaccgacaaaaaattgacgagaaatacaaaaagaaaatcgagctggtgatcaggtggctgggctcgggcggcactgatcagccaataaatgcctttttgtgcacagaaaattcggccaaaatgcgcccgacgttgaggagcacagcgcgccctgtcccttctgcgacggtcccgtgaaagaatttgcgctgagctgcacggaatgtcaggcgaccattccctactgtattttaacggtaaatgctgaatttattcgatttaacgacaattcggaaaaggggcgacacattgtgaagacggactttgccctttgtccgcactgccaattcccgggaagtttcaccgaatttaacaagtcagtgatgagtgaatttatggtaaaaatgaagcaacatcagctcaacatattacgtattaagcatcaattattggtattagtgtagcttcatttaagtgcaatagaatcacaaatattttaaaaagcgtttagtcagaataattcaatgttaattttaataattgtaatttttaggtatttaaattcaagttgcccaatgtgctacgaaacgataaccgagcaaataatgccaagcaaattcgaacaatttatcaaagacaattctttttaaaataatgtgtaaaatcatgcacgcatttattatttaacgacaatagtacaaataaacaagcaaatgtacggtattcaatagagggcacaactcgaaaatgaagtactagtagttaaggcttat

SEQ ID NO: 22116 - DNA, 1033 bp, Heterodera glycines
  unsure (1)..(1033): unsure at all n locations
tttaaaaattcataggaaattaaatttcataggtactactgctaaatcaacgcagagacgcctttccttgacctttttaggctcctgcaaaacctggtgcacttctgatcactactcgaaaaatgagtaaattaattttcactaaaaagttaagcctaaactttttggcctgtttaaagaggaattaaaaattttttaaaatttattcatctccctttttgatagaaaaagcatcagagtgcctaaaatagcttgtaaataaaatttggtgcgtttcagagcactttctgaaaaaataattatgaattaattttgcaaaaaataataaataattaaataaaaacgaaagactctgattttcgaaaaaatttttaaacccagctagctcggcgctcatttcagtgtaagttagtcctttaccggggagtttccctgcaaagtttggtgcgcttctgatcagtttctgaaaaaaaaagttaagcctaaactttttggcctgtttaaaaaggaattaaaaatttttaaaaatttattcatctccctttttgatagaaaaagcatcagagtgcctaaaatagcttgtaaataaaatttggtgcgtttcagagcactttctgaaaaaaataattatgaattaattttgcaaaaaattggaaaagtacgcaaaattgcaatgtctaaaatttttaaagaaacattatgggacagttaaataattatatgaataagcattattctcagctgttagccctgcaaaacctggtgcgcttctgagcactactcgaaaaatgagtaaattaattttcactaaaaagttaagcctaaactttttggcctgtttaaagaggaattaaaaatttttaaaaattttattcatcttcctttttgatagaaaaagcatcagagtgcctaaaatagcttgtaaatagaatttggtgcgtttaagagcactttctgaaaaaataattatgaattaattttgcaaanaaataataaataattaaataaaaacgaaagactctgatttcgaaaa

SEQ ID NO: 22117 - DNA, 1669 bp, Heterodera glycines
gccgaatcgggagcgctgaagtgtgtgggtgccaatcagtgataaagcggagtgagaaaaattttgggtcggggtttagggtaggacattaaaaaaatattgggttttgggttgagaaaaacttcgggtttagggtttagggttcgggttggcatcattggtatcaattaacaaatgcctatggcaaaatgcagtgtcaatttcaaaaattgccgttccgtgcccatatggtcgaccattatcgtgtgccaaccgacattatttatcattttattattttaaacttggctatttgctgctgcctctcaatttgtttaaaaataattcaaaaagcaattttatggatttctgctgtgattttctctttaatcttcggcagcctttgcattttctattcacaactcgatattacccaaggcttccgaacatttttttaaagtgatttttttgtgtcgagttggcggggggggggggggatttggggttctgacaatccgtcagtggacaagaacaatttgtgcttcttgtaggttttgcaatcaacatactttaagaacatttgatcacatttaccaaaatttcgagtgtttacaatcaaaatctctaaaaataagttgtttttttgtaaatctgatatcatatccgtgatcagaagggtgttatgtcgatcgacgaaaagtgcaaaatttgttaaatttttaactatcttagacgcattccaaactaataactcggggtccagccccgtgggcgggggtggctttttgcgggggcgggggttaacggggaacagagtcgggggtgaggaactgactcgcccccagggacggggcacagtttatggcggaacgccatttgaggccgcgaagcggccgaaggccgagaaatttttgtattttcagtttttcgatatttaattttttttttgttatttttttgaaaaatatcgatcgaaaaagtttagaatcctaaggcatctcgaaaaattctggtctagtaaggaattctactatctgctgaaacatttttgtatgtctaaattaatgaataaaatcagtgcttattctacggctaccttgggtcggtcgattcgacaattatcctcttgaaatgtggcgagaaaaggcaaatgaattccccgaattgaggattctgcttaattacaaataaacttttagtcttggcagaaaagcacaaaaattcctgagcgctccagcgatgagtttaaaataattaaattattgattttttcccactaattgaccattcttttcccccttaggcctcactttcgtttggccgtcattcttttgtccgtttcggtgtccgttctcggtttcattgaaccggcagtgaatgcattcgttttgatagcttcttccctgccctgtgccattttcatttaccacgagggcactcggtttgtttggcaaaagtttattttgaaattgtgtgaaatagttttgctatttctactcagaaaaggtggcatttccgaggttccccaattgactaaacgcattttgttcgcatggataatggtagtgagctgttggctggccgacaaaatgatttgcgacctgtggcttcagcttggcacgccgtatttgcatgccatttggcatttgttggctgcttatgccgggtgaggaaaagataattattgatt

SEQ ID NO: 22118 - DNA, 2321 bp, Heterodera glycines
aaaattgaaaaaatattttgaaatttttaaaaaattctaaaaatttcctaaactgaaaatgatcatcagattcgtgctcagcaccttaaaaatacccagaaaaaaatttttcaccctctttttcaacccaaaaaaaaattccgaaaatttctagggggcctagctcgaaaatttttgaaaatttcccgccatatggcacaccattcgatagagcttcaaaagctctacaattttgccctaaggcgtttttgcgataaaaccaacccctaacgagttatggacccgggactcaaatgtcccgctcaggccaaaaattttttctatttccgggaaaaaatcgaaattttttcaaaaatatcaccaatcgatagagctcgaaaaacggttgcttgaaagtggtctccgtttttctgggaaaattcgttaaaaattcctaaaattcaaaaaccagaaaaccgttttttaggcctagctcgaaaaattttgaaaattttcgaaattttaaaaactggaaaaatccagctcattgaactctacaataagtctgctggcaccccctcgctcagttcaaaccctggcgagttattcgcctgggactgaagtggacaaagttggtactgaatttctccatttttctgcagcccttcctattataggtagaggcctggaattttttttgttttttagaaaacacttcaacttagccccctcacagcgaacattttttgattcgagttttagaaaaaaagttatgggccatcaaacgcaagcaaaagtgagaaattagccgccgggactcagttggccctcggagaaaaaaacctatagttttcccggattctactcaaaaagttgtaagacccttccaccactttcagggcgctcccggccttcggccgggagattttgttttttgaaacgaaactcaaaacctatataacatatatactagcgggtgcgtgaaccgtcggctatttagctgggaaaaagcgcttcgcgcttcgggagcttcgctacctagactgtgaagcgattcaaattgatcgatttggttggagagatttttttgaagattagaagaggtacaactgtgattagaagaggtacaactgtgattagaagaggtacaacagtgattagaagaggtacaactgtgatcagaagaggtacaacagtgattaaaatttgaacaaaagtgattagaagaggtataatcatggtttaaaatgaaataaataagaaaattgtattattggatgtattataaatttatcaaattaaaaaaatccttttacttattaaaaataaagttagaaatttataatatagaatatttattgaaattaaaaggaattaatttctcgaaaattcaaattaaataaaacatttattaatcagaaaataattttaaataattaataaaacaatattaaagtaaataaaaaattaaataatttaaattaaaacattgttcaccaaaataatttaatttaaattaaaaatttttatttattattaataatacaaaacaaattaattaaaaaatgtaaaagtaagcaaaaaatgcacagaaaaataatgttacaccgtccggattcgaacctgccgcccccccccccagaagatgactcagaatccccaatcacacagggattctgagggcttaacgatgtaataactgaaatctgatgtcagattagtgatcagcagcctcaaatagccctaatgacatgtttttggaagatttttggtgaaaaaaattttccactcaaaaatcctggtcacccccctttggtcccgaatcccaaaatcacttttatttttataacaatacgcaaaacagagataaaaatttaaaataaaatttatattatagagcaaaaaattgcggatttttgtagtattttatatttccagaatatctttttagaaccgagttctagatttttttctgaaaattcgaattttttcagaaattctggaataacttttttccttttttagatagaaattccaaataaagtccataaaattctcctgatttttctctatttttaaggctttattcctgtaaaattgatcaacccttcgatttgttatgaatttttaaatattaggccaaaatcccgagggccaaaaaattgccaaaaaataaaaaatttttaaaaaattccaaaaattctgaaacgtaaaacaaacatcatattcgtgctcagcacctcaaaatagcccagaaaaatatttttcacacccttattcgaccccaaaaaaatttttgaaaatttctagggggcctagctcgaaaatttttgaaaatttcc

SEQ ID NO: 22119 - DNA, 1584 bp, Heterodera glycines
  unsure (1)..(1584): unsure at all n locations
attcgcagtttcgctntgcgtcccgatccatccatcggtggccgccaccgacgtntaaattcgctttttcccactgccgccactcccatcgaattccatttcactgctgcttcttataatttgacagtttacgaaaatgccattggttaattgcgtctgtttgtttttccttttcgtaatttgcgtctttaggccaaagggcggtcgcctcaaaccccgaaaatgcccaaatggtcggcgtttggctgccccggggatacaatcagatcacttttcgcattttggtagcattttcgggcaccgcttttcgactttctcatttcagggggatgacaaacaaagcgtccgtttcactacgtcggccaaacgcatgggcaatttcgcctttttgcacttggaacatcgcgatcaaatggacgtattaaacagggaattgcaagtaagcaaagagaacggggagagcatgatcaggcattcattccactggtgatttcaggcggaattcaccttcacaattcgggcgaccgcaaagcgaaaaagggcaaatccaatggaaacatcggcgacggtaagaatggcaaacggcgaaccgcgcagtgatcggactgtttgatcagcttttgctcgccctttttaaccgattgatcattgaccatttgtccgtcgctctcttttcaggttcatcttcgcgtgttggatgaaaatgacaacccgccgatgttcaaggagctttcctatcgggtggaggttgaccacgacgtgccgcttaaccaacgattacttcgggtggagggattcgacgcggacgagggactgaacggggcactgagctactctctgatcactccctcctcctttttcttcatcggtctgatcaatcccccgtcgtccgttccccaattcatttgactttcgcattcagagccgatgaccggttggctgcgcaactttgcccctttgaatgtcgccgacaggcaaatccccgagagtgaattgcaattggaggtgctaattgaggaccgagcttcgcgactctttcgacacggtcaacggacggccgaaggcgcggagagtccaaatcccgtcgcatccattcgaaacaaagcgaaagtgcaaattgtgatcagacgaaaggaagaggaaaagccaaatgtgcccaatcgaattgcgacccattcattagttaattgcattgcttcaattaagctctcctttcggcttcttccgttcggccctttcctttccgaacccaccaaaattggcaccgtccgaattaatcactccgacgccgattcaatcattttggacatttctccccggcaaaacgcaccaaatgtcataaattgcgcgtggttggaaaggatcagtgcggaggaaatcgacctttggatttgtcccccttttcccgataaggaatacgaagaaaaattgcaaatacgactcataattaacaggcaggaaataaagcaaattactgctgtataaataattgttagattgatttccagaatctctgacaaaatcagcggaaaaagagaacagatcggcgagaaaaacggtcgaagtttgggcggacccatcaaa

SEQ ID NO: 22120 - DNA, 1703 bp, Heterodera glycines
atgtgaggctttagcctcattttgtggatttttgataggtcaatgaggctaaattttcaaaatgaggctttgaggctttttgtggttttttgagaaattatgaagatttttggggaaaattcgtcagatttttaaattttgattaattttgataaattggcataatgtttttggccatatttgtcgacaaatctgttaacaaatcgtattaaaaatcacaaaatttttcccggcggcgcctatcggcaccgccggcccaccttgttccccaaaaattttttgaaaaaagcgccgcaaaaaaatcaacttcggtttttcatgcttagaatttcacaaaatgtttatttcgaacaaaaaattgctcaaatcgatcatgacaatcaaaaataacattttaaacgtgttttgaataaattttataaaaatgaggcttttttgcctgccaaatgaggcttttgaaaattttgatctgggagccctgatttaagactgtgcccaaactcaaattgaaaactaattaccgtacttcctcgattataagccccagggcttctattgttcacccccctccaaaggtgacttatattcgaggggggggggggcttataatcgaggaaataaggtatcttttgaattttttctttataattttttgagcccggaaaattgagtccccgtcccatttcagttccactacaacatttacaatcgtgtgggcgacattttggatttgttgtcattgtgtaatgcatgcacatccttcatcatctattgtacaatgagtgcacaatttcgaaaagtcagtgaagatatatattttaaaatttagaaatatttattcttttaattttgaaaattgaacatttttttaaaagttttaatttaattataagattaattaaatataattttaaaaaataatataaaaattcaccatttttataagggattatatttttataaaattaaattttatcaatgtaaaatccgcttgttaggctttaaacaagccgtcgtataaaccataatttattcaattctttaattttcctggttcaattataaccacgaagcaaataaaaatttttaaatttttttaaaattttgtcaatattatacataattaaaaaatatttccatataattgttgaatataatattatatgaaatttaatgattcgcataattaaatttaattatttgatcaatcacttagactattttcggaacgcccacaatgagtttttttcggttcgatctaacaacgcttttcggcattcctagcctggtggacccaggcaaaattcaactaatcatttggcacaattcaaggaattccggcgcgtatttctgcccgcctacagccgactgaaatgttggcaacgttttgtgctccgttttgacgcgcccaccaatggcagcggaggcggcggcgccggtggtcggcacggaatgtgcggcggcggcggcgttggcacattgcgtgatgaaatttcggagggcaaaaatttgttggaccgggacaacaacggttggcaacacagcgcaccagcgcagtacggtgccaacatggcggcgggcgtgccatcgcaacgcgggacaatgggagaaggtatagtgggagccatagagatgagacaaactatggaaaattgatgccaaaaaataagtgggatacatatgcaactcccgagagtcgagaa

SEQ ID NO: 22121 - DNA, 1907 bp, Heterodera glycines
ttttcaaaattttacctataaattggctaattttcagtgaaaaactgtttataaatgatcaaaatttccaattttttccccggcggcgcctatcggcaccgccgcgcccccaaaactcctattttttcttagaaaatggcccaaaatcgcaaaatttggtaatttgatgaaaaactgttctcagcggcgcgccaaaactcttatttctcattagaaaaatgatacaaaaatcacaaaatttgatgattttttggtgaaaatctgtcaacaaattttaatcaaattttcaaaaattttcccggcggcgcctgccccctcttcccaaaaagtttttttggaaaaagcgcgcctcaaaaaagcgttttattgatttttaaatttggaataaaatttaaaaaaatgatttttgctttatgattttaactattaaaaagttgaatattttggggagggaggggtagcaaaacaaggaagtacccccagtgttaagcattttgttaagcgaatgtttaaagatttggtcgctggcagcacattgtatccgattactataatgtaacggtcaacgggattatgtgaaaaggccttaagaaagtccatttatctgcaacacaacaatttgtaacaactctttgctggattcaaaaagctgcggacaagacccattgaaaatttattcaaaaaactaattttcgaacgcccatatcttttttctaactcatccaaccggttagcatttgcttagaaaaagcttcttctcatcaattgctttcgaatgataccaaaattttcaaattgttgtcaatttctaaaaacttttacaagagctcattttcgggatggtgtgttaagtgaaatatcacaccacttaacacaaatttaatgctttttggtttaaaaattttattaagtatatggcatagtgtttatttttatttttttaatttcagtgacgaaaagtttagtgacgaaagggttcagtgatgaaacatcagcagggagccttacgagttggcatagcacgagttatgtatgattttccattttaatcgtttagatagtttgacttttatcataactagggatggtaaaaatatggactaaaaatcgcgaaatatggacataaaatggtaaaaatctcaaaatatggacataaatttttctaaattgaggggtaaattttcaaaaaaacccgaccaaaaaaccgaaattttccattttttgcttatctttcacataaattaaccaatttttaagaaaatttaaatttaatcaattttttgacaaaattttgctaaaaaatgtctttttcggaaaattttccggtctttggggttaaaacggccaatttagctgatgggggccgttctaataggggtttttttggaaaatgccaaaatatggacataaatcgcaaaatatggaaaaatatggaaaatatggatatagaaatccatcttaaaagcttcaaaccaagctaaaggcccccagcagctaaattagcctttttgagcccaaaacccgaaaaatttttcaaaaaatcattttttcgccaaaatttctcgagaatattgaataaatttaaattttcttataaattaataaatttatgtcaaaaataagcaaaaaagcgaaaatttcgcttttgttgttgattttgcgctaaaaaaattaataaattttagcttttatgtttctttcttttaaaatggttgcacgtaattgccgaaaaattcgagaccaatttccgatgttgaccgactaatgcaaaacgaaagccgtcttgtcaaagcgccttactgagtcaaaaaatttggaaatgtatctcatatgcaatttcaacaataaatttgaagaatttttgaactcaattttgaaaaatttatggccatattttgaaatttttg

SEQ ID NO: 22122 - DNA, 932 bp, Heterodera glycines
caatcaacgggactcaatccaccatcatttaatcttactggactcaacccaccaacattccaatcaacaggactcaaccctccagcattccaatcaacgggactcaatccaccagcatttcaatcactgggactcaatccaccaacattccaatctctgggactcaattctccggcattccaaacactgtgactcaaatctccggcattccaatctctgggactcaaatctgcggcattctaaacattgggactcaacccaccaactttcaatgacattccaatcactgaaactaaacccaccagcatttcaatctctgggactcaaatctccggcattacaaacactgggactcaacctcagcaaatttctttagcatttttaactttttgtgtgccttgggctgttgaacttttgcgccaaaggtactcgctcggccgcttcgcggcctcgtactggggccttcggcccccccacaattttctgcccaatccaccatcatttaatcactgggactcaacccaccaacattccaatcaacgggactcaatccaccagcatttcaatcattgggactcaattctcctgcatttcaatcactgggactctattctcctgcgtttcaatcaaaaggaccaacccaccgcattcaatcactgggactcaacccaccaacattccaatcagtgggactcaacccaccaacattccaatcaacaggactcaaccctccagcattcaatcactgggactcaacccaccaacattccaatcaacaggactcaaccctccagaattcaatcactgggactcaacccaccaacattccaatcaacaggcctcaatccaccaacataccaatcaacgggacaatccaccaacattcaatcagtgggactcaacccaccaacattccaatcaacgggactcaa

SEQ ID NO: 22123 - DNA, 2022 bp, Heterodera glycines
agaagaggtacaactgtgattagaagaggtacaacagcttttagaagaggtgcaacagtgattagatgagtccagcagtgattagaagaggtacaacagtgattagaagaggtacaacagtaattagaagaggtccaacagtgattagatgagtccagcagtgattagaagaggtgcaacagtgatgagaagaggtacaactgtgattagaagaggtacaacagtgattagaagaggtacaacagtgattagaagaggtccaacagtgattagatgagtccagcagtgattagaagaggtgcaacagtgatgagaagaggtacaactgtgattagaagaggtacaacagtgattagaagaggtccaacagtgattagatgagtccagcagtgattagaagaggtacaacagtgattagaagaggtacaacagtaattagaagaggtacaactgtgattagaagaggtacaacagtgattaaaagaggtacaactgtgattagaagaggtacaactgtgattagaagaggtacaacagtgattagaagaggtgtaacagtgattagaagaggtacaacagtaattagaagaggtacaactgtgattagaagaggtacaccagtgattagaagaggtacaactgtgattagaagaggtacaccagtgattagaagaggtacaagtgattaaaatttgaacaaaagtgattagaagaggtacaatcatggtttaaaatgaaataaataagaaaattgtattattggatgtattataaatttatcaaattaaaaaaatccttttacttattaaaaataaagttagaaatttataatatattgtagaatatttattgaaattgaaaggaattaatttctcgaaaattcaaattaaataaaacatttattcatcagaaataatttaaaataattaataaaacaatattaaattaaataaaaaattaaataatttaaattaaaaatttttatttattattaataatacaaaacaaattaattaaaaaatgtaaaagtaagcaaaaaatgcacagaaaaaaatggtttatgaaaaaatataattaaaaaaatgtattaataatttttaaaaaattattaaaaaatgctttcttttattaattaaaaataaactttaaatttacaatgattgagtattattgtattgaaaataaatttttgacaaattataattaaaaaaacaaataaattctttaatttaaaaataaaaaataattaattttaaattaatacatttatttaccaaaattatttacttcaataaaaatttttatttattattaataaaagaaatctattttttattaataaaaacattgaaaataatgaaaaaatgcacagaaaaataatgttacaccgcccggattcgaacttcccccccccctcaaaatgatgcctcagaatccccaatcacacagggattctgaggtcttaacgatgtcaaaagtaaaatgtgatcacgtattcgtgatcagcgtcataaactacccctaaagacatgtttttggaagatttttgtcgaaaaaattttttcactcaaaaatcctggtcacccccctgtggtcccgaacaccaaaatcacttttatttttataacaattcgcaaaaaagagataaaaatgtaaaataaaatttatattatagagaaaaaaattgcggatttttgtagtatattacttttacagaatgacttttcagaagggagttatgaatttttttctgaaaaatcgaaaattttcagaaattctggaataactttttttctttttaagatagaaatcccaaataaatctcataaaattctcccgattttttgctatttttaaagctttattgtatgaaaaattaccctctctgaggtgagttatgaattttccaatattcgcccaaaatcccgagggccaaaaaattgaaaaatatttttgaatttttaaaaaattctaaaatttcctaaactgaaaatgatcaacgagattcgtgctcagcacctt

SEQ ID NO: 22124 - DNA, 1678 bp, Heterodera glycines
attgaaaatatgtcaaaaataagtcaaaaaaatgaacatttttcaatttttcatcaacggttttttgacaaataaattaacataagttgaacaccgtgctacaaaaaatggccatcaaattttttcccaacctttctatataattatattttcttattacatattttacgattattacgattttttttacatttaatcggatcattaataattttattagcattgcatttcccattttataagtgcattatttttaattaaaaatggtatttattatgtgatcagcagatttgtcactatgggaaaccatcaaaaaccatcatccatttagaaagtgatgaatgaattaatgaataattactttttcaccatttgtgaaggcccaaaagagaaaaatcacaaaaaatggaaattaatagcatttggaattcattttatttaattatcaagaaatttcttttagagcaaataattaaatattttgctttttttatcgttattcgttggatattctcctgctcatcaaaaaaaagtcaattcaaatgtaattgatttgaaaataattttttattatttaaaatagatttttttgctaagttaccaatggcaatggttggagttttgaaacgaattcttttttgcgttatgttttgtcttttgggccagtgctacggtaagattatcaatttgttgtaaaaaatacgtgctgggacgttttataaatccgctaatgggttcgaaaataaaaaaaaattaacaaattaaaattcataacatggctcaaactcaaccaaattaatagggagccggaaaatccgacactggaaaatccgacacaagcggtaaatccgacattggaaaaactgacaccaactttaaattttaaaaataattttgattgtttgagttagtaaatatttaaaatatattaaaagttgaatacttaagttctttaaaataaataatttatggctataaaatagatttaaggtaagcatataataatcatattatttcaatgccctttttgatcatctcaaaaaaattgtaaacaatgcggcaaatggaatcagaggaaagggcatgaagcataagaaagtgtacgtggacaaatgacagagatttatgcgaatcgcatcaaccgacaaccctttattatttgccatcaatatcccatcgaatggcacaaccaattagttttttaaatccaattcgaaaacttgataaacttagccagatattaactcaaattacatttaaagttggtgtcgtgtcggattttcctagagccattaatatcccatagtatccttcaaaagctttaagtgttctttattagaaaattattattctttacatttttactaaagaataaaaaaggttcggtcaaaaaattcccacaatttttgaaattttaaggcaatttttagactttattaataattttaaaatataatattctaataataaaacatttaacgacgatattggatgataccatgaaatattaatttgtctcgatttgaaccaagatatgaatttttatgtgttgcattttttttactttcccacccattggcggttatttatgaaacctcctagcgtttaaaaaaataacatgacaatgcaaattccttgcccattttaatgataccccttaggattgacatgtaagcat

SEQ ID NO: 22125 - DNA, 1264 bp, Heterodera glycines
agcatgtacagtaagtatactgaatgtttacacattagagactgggtcaggcacagagtgccaattttacaaggctcggcaaaccggcgcggcaatttttggaattggtactcaattaaatgtactcaaatgaaaaaaccagtcaaaaatgatgacattttaaatttatttgcattttagctcttctccctcatttgcatgatttttgaatctcataaatttaattaagaaataagatcataatgaaagcgttacctatttcgtaggattcttgcttttgataccgtttttatagtaattatgctccaaggaaggcactaacccacacatggaaaatccgagcaattgcaatatgggaattgaatctcccacatcgtcggacatcggaattccgactccaaaaatgtcggacatcgaaattccgactccaaaaatgtcggacatcggaattccgactccaaaaatgtcggacatcggaattccgactccaaaaatgtcggacatcggaattccgactccaaaaatgtcggacatctgaattccgactccaaaaatgtcggacatcggaattccgactccaaaaatgtcggacatcggaattccgactccaaaaatgtcggacatcggaattccgactccaaaaatgtcggacatctgaattccgactccaaaaatgtcggacatcggaattccgactccaaaaatgtcggacatctgaattccgactccaaaaatgtcggacatcggaattccgactccaaaaatgtcggacatcggaattccgactccaaaaatgtcggacatctgaattccgactccaaaaatgtcggacatcggaattccgactccaaaaatgtcggacattggaattccgactccaaaaatgtcggacatcggaattccgactccaaaaatgtcggacatcggaattccgactccaaaaatgtcggacatcggaattccgactccaaaaatgtcggacatcggaattccgactccaaaaatgtcggacatcggaattccgactccaaaaatgtcggacatcggaattccgactccaaaaatgtcggacatcggaattccgactccaaaaatgtcggacatcggaattccgactccaaaaatgtcggaaaccggaattccgactccaaaaatgtcggacatcggaattccgactccaaaaatgtcggacatcggaattccgactccaaaaatgtcggaaaccggaattccgactccaaaaatgtcggacatcggaattccg

SEQ ID NO: 22126 - DNA, 1418 bp, Heterodera glycines
  unsure (1)..(1418): unsure at all n locations
acaaaatccaaacagacgaaccggaaattgtttgaacctcatttggccaatttgccaacggcggtaaaacaaagaacaaaagcattggggaaaggcacttcccagcgaaatgggcgaaggtgaaatgccaaaaaaggtggatgggtcagcgaataaaattcgccaccaaagtggcgactacggcggctccctcccccccccccccctcaattaaacgattttggataataaatttgggaatggccggaagaatttcccaccgcttttcccttttaaaatatttgaattaattcaataattaaaagaaaagattaagagacttcgcgatcaaatagaagcaaagcggacgcactgctcgcatcagtcgctggtcgtcccacaatttaaacttcaaaaaggtccatatcctccccccctcctcaagatgccgcgcacttttcaaatgctgcaaaggggcaattcaatccctctcccccccccccccctctgccccgggtccatgaccttgcccttctcttctcttccctcactctttcacgtcgcgccaagcacagcacgacgaaaagcacgaagaagaagcaaaagtacccaaaggggagggaagaggaaaagggggagagatgagcacttatgaggggattttggaaaaccaatcaaaacatagagagagggacagagagagatgagagaaagagacggagagagagagagacaagaaaagagagagagaggaaagttcgattccccccccccccgccccagcagcagggttgttccgggtcgagaaaaatatcgggtcgggtttcgggtcgggtcggccgaaaaatcatcgggtcgggtttcgggtttcgggtcgagaaaaaggccgggtttcgggtatcgggtttcgggtcaattgacaaatttttaatttgtttaaaaatcaaatggcactgcaatatttgcagcgaattgcgccatttataggacgatggaaataaaaccaaatggaatcaggtttttcagccatctgctttgcttaaattcaagaaattcatacaaaatatctttagaaaaaggataataatgaatagggctgccaaaaatatgcacgaaaagtggccaaaatatgcgcataaatatgcaaataaagtcgtgaaatatgcaccaaatatgcaccaaaatcggaaaatatttgaagaaaaatggcaaaatatgcaaaaaatctgaaaatatgcacaaaaaatggcaaaatatgcatgaaaatgtaaaacaagccaaaatatgcaaaatatgcataaaggcccaaaatatgcaaataaaagtcccgatttttatacgcaaacacaaaaaagaaagtgtttttcgtactatttagagcatggagaagccaggaaaaaaatatgcatttgaatagttttggcagccctnaataatga

SEQ ID NO: 22127 - DNA, 333 bp, Heterodera glycines
tttcttggcggcgcctatcggcaccgccggagctccattttctttaaaaaaagggtctttgggtcgggtatcgtttgtcctttttttgaaaaaaaacttaggagccctgattttaaacgttttttttgttgcttttaaaccacttttttcgcggatactttttccaaaaaatgatttggcgaaacgtttgggaactatgggttatggatgttttggagtggtgtaccgacaagaaaatcgaaagtttcgacaatgatttctattttcccctaaaaattgattctttcgggtgtcgaaggttttttgggagtggtggagggggggggggactta

SEQ ID NO: 22128 - DNA, 1232 bp, Heterodera glycines
ccccccccccccccatgggagggggggggtcaaagtcgatctcaagacctcttggctgaccccccccccttgcacaggtatgctttatagtcgacataggtggacaaaggggcggttaatttcgtaaaattttcgggaaaatcgaaaaaacactggtaaagacgggaaattttaagaaaatgggaaaggaaattaaattttttattactcaaaaattttacacttagaattgtttttgttaaaatttttacatatttcgtaaatttttctattttagtaaatttttcccacttatttcgtaaatttaaaaaattatcgatagttttcttaaaaatctatttgcaagttgcacaaagttttcaaaaaaatttcccgactttgccttttttatttgaaaaagcaccacaaaacccccaaatggaatttttttttctcgacatatttactttaaaaatacctaactagtttcaattttctccaaacagactttgggacatcgaatgcggcaactgcttgcgcgtgttggaaggccacgaggagttggtgcggtgcattcgcttcgattccaaacgcattgtgtccggcgcttatgacgggtaattttatgcatttaaaaatcggtcaaaaatatgacgtcatatcagtgatatgacggaaattgaaataagccccagaaagcgaaaaaagggaacttatagcagttttgcggaaccattttgaggtcagattttcataaaataagacaaaatgggggggggggaagacggctacgggcctgcttaatacaaaatgtatttttatgtaaatttttaatttctgtcattcatatacagggggtgtctcaaggtgctacaccccccccctccgaaaatttaaaaagaacatagaaaaaaacaatcaaagtttttagtttttttttgcaaaattaaaaaggtataacgaaaaccaaaaaaatctatttatttgcccttctttgaattaccttgtctaaatgctttaacttattcaaaaaatatttaaaaattaatttttttaaatttttttttaattaatttttctcgtttctttttttgaaaatggcaagaagttttcacggatagcagaatgcttaattttcttattattttttaacataatttaaaaatatttgtttaacagcaaaattatgatctgggacctggcggcggcacttgacccgatgacaccgcccaactccatctgtataaagacac

SEQ ID NO: 22129 - DNA, 1805 bp, Heterodera glycines
aaaattctccctatttttctcgatttttaatgcttaaaatgagctgaatggaccattttgaggcgagttatgaatttcaaagaatcactaaattcccaaaccaaaaaatgacgattttcaaaatttttttacctccctccaaaaaatccaaaacgcaatataaagtgcatattcgtgttcatctcctcaaattaccccagaaaagtattttttggcaattttaggagcaaaaaaatttctcacgaaatgcaaaaccatggggtcccccctttggttttgcatttaaaaatgcatttttattttatatctttttttaaactcatggtaaaaacatgagataaagcacattagatagagcttaaaattctctacaaaaatgctctaagacaaatttccgctaaaatcaaccgctgacgagttataggcccgggactgaaatgtcccggtcaggccaaaaaatttttctatttccggaaaattttgaaattttttcaaaaatgccaccaatcgatagagctcgaaaaacggttgcttgaaagtggtctccgttttcctgggaaaaatcggcaaaaaataataaaattcaaaaacgaaaaattttcgagggggcctagctcgaaaaattttgaaaattttcaaaatctgaaaacgccatcggatgcagctttaaaaactgcacaaaagctcaagcggcgccaacccgctccgcttaacccccagcgagttattcccgaaaaacggaaaatgccgaaattgggtgccaaattttgccattttctgcagcattggcatttacagatagccccgccaaataagcgccaagttttcccaaacatttcaacttaaaatcctacctccaagcattttccgctcccgcttcttcccgcaaagttacaggccaccaaagacggataaaaaaaatttcacgccgtttcagcgccgccggcgctgaaccgtccaccggatcggaatgccgatagttttcctgaatgcgcctcaaaaagttgtaagacccttccaccactttcagacccctcccgacagccgttcgactcaaattagtttttaagacgaactgcaacttttctctatagtaatataaactagcgtgttgcacagtgggggatgttgtgggcagtatgctttttgtatgtatggacgggcgctgacatgagcgcttcgcgcaaaggacttcgttgctagtgcatgcgcggcttccataatcgatgcgtgtaccacacacatgctgtggctccccttccttatcaaacaataagatttttaacaattttttgcgggtgcagtttttccataaaacttctggtgaacgggcgaggggagggggtccggcggaaaactgatttttaacagaccaaaaaaggccaatttttccaataaaaggcaagcaatgactttttcaaaggaaagatttgattgtccggcttgttatttgtgattttttgaacgagttctgtccttatttgtgaatttcgtcatttttgtaccagtgttacctatctcaggaattgaaacagaaggaagggcacactctgaatttcagtttatctccaaatttgggcggctaacattcgaattccaaacgaaatgtgtgactggtagacttataggaaggaccacttttgtctaaaactcattttgacctgaatttacaaggagtgagcagaccgagttctacgcgagctaaagcctccgacccaacagaacgcaaattttaccacccccgccccctttctacaaaagcattgaattgaaccacttatgagaatttattaagcacaacacca

SEQ ID NO: 22130 - DNA, 495 bp, Heterodera glycines
gaaaaggaagaagaagagaaggaagaggaagaggaggaggaggacatagaagaggagaaggaagaggaggtggagggcatcatcatcatctgccgacagatggggcagaggaagcggcggagaatgggccagccgaagaatgaatgatgatgactcacattggggaaggtatttgaatgctctcaatcagcagcaattagccaaatggtggactttcgagagaaatgacaataaatgaatcattcgttatgccttgcgaatgcgtttgacttgtcaccccccccccccccctcctcccccccatccgtgccattatccattcttaaaagcctctttccccaagtttggcccgttttccttcccttccacctctcttccttataattcgcttcttccgtagcaacacacactaattggcaaatccgagcgtaactttccggggacaatgccacggaggaatggcggctcatggagacaaggtaaaattactccccg

SEQ ID NO: 22131 - DNA, 1050 bp, Heterodera glycines
tatgtttatggtcatacaaaaatgtagcgtcgtttaaatgcatgaaaattgttcaaacttcttgtaattcatataacccttggtatgattaaacagtcaagatttctctattattctgttaaccttcagaaaattttatagagttttaaaaagtaggggacaaaattagtgagtctaaattttttgggattttttgcttacaactctttgtaaattaaaaaaaattataatatagtagaagatacgtagagctacatttcaataaccaagtttaatttattttaactaaatttaagctaaattatgatgtattagcgtattattttcatgtctctaatagggaaaggcaccaaaacggcaaaatgcctaaaaaggcatttaaggcacgaaaatcccgaaaaaaggcaaaaaaaaggcataataaaagtcaacgtagaagcttcaaactaagtggaaactgcgtttttttatactagtgcgcagaaaaaaaggaatatgcctcaaaagtcggtctctgattcagggctcggatcgtaccaagtcactttcaaagtacatgcatgccaatttgcaagtacataacgggggaaatttgtgaaaaccaagtacatataaaaatttgaacaaaaaaattaaaaaggttaaattttcctcaaatttttttctatttttgcccggaatgattttaagcaggttttttttttgctattcaaacaaaaaactttttagggacttgaccggcgggggggggggggggaggggtccggcggtgtcgatagatttccaagtacgatctttgaaataagtacagttaaaaatttccacgcaaaagccgaaatccaagtatgtacttggcatccaagtacgaatccgagccctgctctaattataacgtaataaaattttgaaattttcataacttttctcatatgtatcgaattgatttagcatttgcttagaaaaaaaaattcgtttcaaaatcttttttttttaattaccaattttgttcagtttaattgtagatgaagcgagttatgactgatcaaatta

SEQ ID NO: 22132 - DNA, 1123 bp, Heterodera glycines
gaaaaagagattaagccatattttccaaattttttcccaaacaaacggcccgggggaacaaatttccagacaaattagtatcggggtaattgttctgaagaattcgggtggtaattcctattctgttgagcagaaaaagagatagccaattttccaaatttttcccaaacaaacgcgccgagaaacaaattccagaacaattagtatcggcgtaattattctgagaatgcggttggaattcctattactgttgagcagaaaaagagatagccaattttccaaatttttcccaaacaaacgcgccgagaaacaaattccagaacaattagtatcggcgtaattattctgagaatgcggttgtaattcctattactgttgagcagaaaaagagatagccaattttccaaatttttcccaaacaaacgcgccgagaaacaaattccagaacaattagtatcggcgtaattattctgagaatgcggttggaattcctattactgttgagcagaaaaagagatagccaattttccaaatttttcccaaacaaacgcgccgagaaacaaattccagaacaattagtatcggcgtaattattctgagaatgcggttgtaattcctattactgttgagcagaaaaagagatagccaattttccaaatttttcccaaacaaacgcgccgagaaacaaattccagaacaattagtatcggcgtaattattctgagaatgcggttggaattcctattactgttgagcagaaaaagagatagccaattttccaaatttttcccaaacaaacgcgccgagaaacaaattccagaacaattagtatcggcgtaattattctgagaatgcggttggaattcctattactgttgagcagaaaaagagatagccaattttccaaatttttcccaaacaaacgcgccgagaaacaaattccagaacaattagtatcggcgtaattattctgagaatgcggttggaattcctattactgttgagcagaaaaagagatagccaattttccaaatttttcccaaacaaacgcgccgagaaacaaattccagaacaattattatcggcgttattattctgagaaagcggttggaattcctattac

SEQ ID NO: 22133 - DNA, 2574 bp, Heterodera glycines
ttttttagatcatttcttaggggtatattttctggaaattttttagatcatttcttagggtatattttctgaaattttttagatcaatttttaggggtatattttctgaaattttttagatcatttcttaggggtatattttctgaaattttttagatcatttcttagggtatattttctgaaattttttagatcaatttttaggggtatattttctgaaattttttagatcatttcttaggggtatattttctgaaatttaaggcgattgcggaaggccccatacaatcacaaagtgcttgccacgccatccactgggtgtgcagctattttgctgccgtatgggaagacagcccattccaccttcagactgggcagagatgtgtcactggacaagtttccaagcattccacttgagagcttctttgcccgacggattcgtgcggcacaactcatcatcagaaagacggttaaccgcacaagttacggcctgctttcaaacttctccgttgtttcgtcaattcaccacgatgaaattgaccatcaaccagagattaggccaaggccagcaagcttacttgcaaatgtgccgccaaattgggctcggagagaccggagaacacttctggattcctccgcagttcatcgtaaagagcagggaagagctgataaactttgtttatccaaactttcaacaactccttggcaatgacaaggagctgctcaaccgtttgatactcgcccagcacattgatacgtgcgacgagatcaacgaaatgatgatggcgaatgtgacaggtcaagtgcgggaatatttgtccacggacaaacctcttgacgatcgcccattggacatcgatgagatcgagtccgaagtggcagcattaaacagacgcacagactctgggatgcctccccactgtctgcaactaaaggtcggaagcgttgttgtcctccttatcaacaaaagtgatagggaagtgctgatcaatggcacacgcattgtcctcgaagaacttggcgatgatcgccttgtcggtcgtgtaatcaatcaatagcaatgctattggtggtcaagtgaggtttttccttgaaagatctcacaatatcttcgaggacaaaacgcctggtgggctaaaatacgcgcgtttgcaattcccaattaagcctgcattcgctatgaccattcaaaaaggtcaaggtcaaacaatccgcactgtcggcattgacctggaaagggaagtatttacccatggtcaattatacacggccttctctcgggcaacggacggcaacaatgtccgtgtgcatgctcccaaaagggagatcgatgcccaaggtcaagcgaaagtgctgtatattgtggccaaaaagatgctcaaattgcaacaaaagagcaatccaagccattttgtcatgccaactgttgcgtttggatctcgattgcataaatcaaacgagctatagtccagtgtgtgcggtactgatccgatgccgccccattctcatctgcacttaaatatgcatataaagtactgccacctggactaagggagggaggtggacccatgatgtgcgagttagggcacttccggtttccattgcattgaaatatgcaatgtgtcagctctttacatgagtgaaaccaagtgcatgtcggctgacgcaaagaccctaacataagcctaggtagcgaagctcaagaagcgcgcagcgctttaaagcagcagaaactcgcaagcacacacccgctagttgtttatacaaatgactaaatttaatactaggtacagttaagcacgaaaagcgcgtttttagcttgttttgggtggtttttgtgttaaaaatcgttattttgacaattttttgaggcaaattttgaaatattttttattatgagtcaggcaaaaccggaggtatttattgaaaatttatttttctttttgaatttaaccttaatcccttctcgcttccccaaaattcttatttttatctcaccgacataaataagtgagttaattaatgtctttttaaaattcatttttatttttccataaaaattcgtaaatatattattactagggatgcaatttatagttttttcactatttttttcctgagctctccgtggcctgaaatgcacgaaaaacatgttttttcgactgttgttaagctacttttcgagttattagcaaatattttctggtttttacttttagcaactaaaaaactataaaatttttgaaaaaaactattttcaactattttggcgttttgcccaaactttttttagaaactaaaaacgaattattttggcactttttagcaactatttacctatttttagcaactattttgggttttttagaaactaaaaactaattattttggcactttttagcaactatttacctatttttagcaactattttgggttttttagaaactaaaaactaattattttggcactttttagcaactatttacctatttttagcaactattttgggttttttagaaactaaaaactaattattttggcactttttagcaactataaattgcatctctaat

SEQ ID NO: 22134 - DNA, 2087 bp, Heterodera glycines
taaggagacgaaaacgcacagaatcgttcacagccgaaggttcgtcaatcggcgagggcgaccgttggacgctgatcagagacattagacagagaaatgttagcacaattattaaaccaaataaatattaaatatgtgtaatttatctgctttttgaaaatgaattgagcagtcaaaagaaacattatttgcatcatctatccaggtttaatggttgtgtaatttcagatttcaaataacgaaattccagtgctggaaattggtgttgtacagcagctaattaaatatgaatcacgaaaataaacaaaacaaaacgcattcattagagaaagcgaattaaccaaaagcatagacatagaaaagaagacaaagttaataagtgaaacagagaaagagaattaggaaaagaaagagaaagaaaagaaaaaaagaacaagagaaatagtgtgtgacattttcctttttctttcgcagtcttttcaacccatcttttaatagtttctttcttcataagagtttattttttgacttttcttaaaattggagcaataggtactgcaaagtttaagttgcctgaaagggccataaattttgaatgtctctctttgacgggttaaaattgtaattaataaagtcgagtgataatagttatcttttatccgatccttctcttcagggatgtaagggggaaggttaacaaaataattaccgcattcaacactaggctttatcataacataaatgacactttaaacaaacagaaaggcagcaacaacaataatggcgcttgttacaatacacaataatggcataaataagcctatctttgtcacgccttaggcttaacagtgtacacatatcctagtctgaacattaaattggcggaaggggagcataaatttccttttgctgcaattttccggtgccatagcgagccgatttcttaggtggcgcgtacatgtcatctgttggcatcggtttctttggtgcagatttaggccgtgcggttgcagtaacgagtagcaaacgtccgctgccgtcgtccgacccgttcgagcgcaacgattccggcacttccactccgaatttatgcggcatcgtcacatctcttgacgcgtccgagcgcaatgattccggcacttccactccaaatttgggtgcgatcatcgctttcctgataaatggcccgcgtccgccgtcctccctgtccgagagcaatgattcaggcacttccacgccgaattcagacgcccttgccgaatagcctgtgaaatgcattgaatgagaaatttctccaaatattcatcgtatacgacgaatcatccatcaccttcgtgtgacatttgactctgatttcccgccggttgttccatgcgacaattgtgcaccacaattcttgttgctgctggtctccccattttcttcgtccgtttgtcatccatgtcatcatcacccccaaccgtatgagaagcagactttctttgtcgacgaaccaccagcacaatgacaatggtcagaacggcagccaaaatgatgagaccgcctctgaaagttgggggaaaaatgtgtgccattttaaagaaaaaacaaatgaacgcacccgaggagggcgtagaaaagcaaatccttcgtgttcaaaatgccgcccttttgccaacactgctcaaccaacaattcagcaccgctttccgccttgttcagaagaaccacgacatcgtccttaaaaatgcaattaaatggcaattaaaaataaaaattggaaatgaaacgcacaataaatgctttccattcgcactgaagcaaatcgtcatcatccgagatgtttttccacaaagacattgtgaaatgacgcgcattcggcaagccttcgaccggagtcatttgaagaaagttgcaggagacattcagaaaggcacatttgccttggccacagttctctccgaagcgatcttgaccctgaaaacggcacaaattgttcgtaattaacaatatttgcggatgaaaaacactgaccgcacgtctctcgagggcaacaactctctcatcaaaggcacaaccgtctggcattgaacacgagaaaggaagga

SEQ ID NO: 22135 - DNA, 913 bp, Heterodera glycines
taatccccaatttccccagctcttagggtaatggaaaaaattttgaagaggctctccggaccggattaccatcggggttccgaaataaaaaattttcctaaaaagaaatacccttttttttgggaattaattcccaatttccccagtttttagggtaaggaaaaaattttgaagaggctttccggaacggattagcctcggggtttcgagatagaaaattgtcctaaaaagagataaccctttttttgagaattaattcccaatttccccagcttttagggtaatggaaaaaattttgaagaggctctccggaacggattagcatcggggttacgagatagaaaattgtcctaaaaagagatagccatttttctgagaattaattcccaatttccgcagctcttacggtaatggaaaaaattttgaagaggctctccggaacggattagcatcggggttacgagatagaaaattgtcctaaaaagagatagccatttttctgagaattaattcacaatttccgcagctcttagggtaatggaaaaaattttgaagaggctctccggaacggattagcatcggggttacgagatagaaaattgtcctaaaaagagatagccatttttctgagaattaattcacaatttccgcagctcttacggtaatggaaaaaattttgaagaggctctccggaacggattagcatcggggttacgagatagaaaattgtcctaaaaagagatagccatttttctgagaattaattcacaatttccgcagctcttacggtaatggaaaaaattttgaagaggctctccggaacggattagcatcggggttacgagatagaaaattgtcctaaaaagagatagacagttttctgagaattaattcacaatttccgcagctctta

SEQ ID NO: 22136 - DNA, 1700 bp, Heterodera glycines
  unsure (1)..(1700): unsure at all n locations
agttntggtctcggcatggcccaaaaacaaaatttgaacgactcgtggaggactatcgatggcgcctgatgggccaggacagccaaaatgggctcaacgatctgatcaaagcgttgcgcaactcgaacatcggcttttttgatcggcactcaagtccatcggcactgaaaattctgcggcgagttgactgatgcgcaaattggtccccatcgaactgagtacctctgttcttagaggatgatgtgacattttgatcagttgcaattcatttacatgttcatgttttttgcaatagcattattatcatgagaattttgtatatatcttatatatataaatatattttattttaaattatgtaaattttaaatgtttttattttttgaaatattccaattaaaaaaaaattaaaattaaacgctagggtttaaattttgctttaatcattcgaatttatgacttttatagaaattttatggtctaatttacatttatttaaacttttttatcgaaatcgtttcttaattatcaataaattaaatagtaattaaaaaatgtccaaaaacttttatgtttggttttaatttaattatttttccccattttaaatgctttctttcgatacaaatacatttttccatttttccaatcactttttccaataatccgatcacttttgtctgtgtcccaattcattttttgttacacagtcagttccgtgaccaccgatcgcaaagtgaaagcgtcaaaattgaaagggacagaaatagtgcacagaaaaaatgcgaggagagaagcaaagagcgacgaaatagtgcagttcggatttagactaattgtccatgggaaaatcgggggattccaatttagaagttagaaattttatttttcatttattagtacatccctttgtttggattctatacatccctttgtttggattctattccatttaataaggttgatcgagagtctcaatgaattttcggtttttttttgaggggggggggaggggggtctgtcttaaattttggccttaatccccaatttttccagccttaattctcggggtttttttttgggtctcagtctccactctcgacctaattcccgggctcttcagccataagctcaaattttttcatgaatctcagtcttaaatttcggcgcctaaatcagttatcggtccatctcctcgttttggattctattccatttaatttttttgtggggggtctcagtcttaaaattcagcgtaaattcccggtttctccagccaagaattctcgcggattttttttttggagggcgggggtggggttggtctcagtctccactctcgacctgattcccggtctctttagccacaattctcaaaaaaaaaaattcgtgaatctctgtcttgaatctggagcctaaatcccccttctcggttctcgagtctcgggaaaattctactttctagtctttctttaattattccaattttacaattttaaacatttcttttttccatagaaattttctttcgtatacaaaaagtaaaagaaaaaatggatgtgcaatttttcattatttttattggtccaaatgatggaattgtgaattgaatgaatgaaaaggaatgaatgaatgaatggaaggaatgcgcgaagcctgggggagaatggcgagcaaaagaaatgaaatcgactcgatca

SEQ ID NO: 22137 - DNA, 1455 bp, Heterodera glycines
  unsure (1)..(1455): unsure at all n locations
tttcctaacataaantttgaacaaaaaantcggaaaatcctaattttaaatttttgttcgagttcgggattagaaattggtcaaaatagatgtcaaattcgtgatcagcgacctttaaaacccccgggaccaaattttcacggttttctatcacaaaaattttttgcaaaacaaaagggtccccctattgtttttgataaaattcgaaatggacctctttttaaatagcgccgtgatgctcgagacccaaaaaacgacagaaaattaaataaagttcgatttttttttgtcgagcagcactttccccccccccccccccccctcgccgtgtgaatgccatgcgattttcttttattgggtaagaagaaaatgttcattggtgcactcattttgtcaattttggcaaattattacgttggctaatcaaaagaaattcgaaaaccaaatgaaaatttcggttgtactgccgcacacacaaagtaaaaaaatgtgccaatgatggcgtgcgaaataaaaatcgcatttgggcctaaatttcagcggattgatcatcgccgaagggcatgttcgaattgcaaatttatgcgttgggaacgtaaaacatgcgtttttttcttttttaaaattgggtgtgcggcagaatggtaaccgaaagtacgaaccgaactacaaatgaacagattttttatttatgcattcgataaattataattgtgaatttacaaatgtcaaaaggataaataatgcgaatagacaacaaatttaaataacaaaaattatgatgtgaaatgagatgaaagggagagcaaatggcgaagaaataatcgtcgaatgaattgaatttaagtgtcatcaataatttagtaaaagtttcgctacaaaagggtaaatatttcagtgactgaaagcaaaaaatgaaagtgagaagaaatttaataattaaagtgtttaaaagtgggtaattatggtcatgtccgtttcaaggatttctgagttcgttgtttttctcggccccaattcgttcacaaatttcgtacatatattcggagaaaacggagatcagactcagttcttgttcggattcacctcgcaaaaatttaagcaggaaaacgtgactttcgggaaggatggaatagccgacgatggcggaccatttcagaaaaagggtcctcgtcttaaataaacggacgaacaatgggaaaagtttggcataaaagcaaatggaagaaaaccgaaccgaattttatagaaatgttaaaaaagaagcatacataccttttgagtgtcctcatgttgcactttcaaaatgatggaatgtgagctaacggacattgtggcaacgccgccctcgtcagaattgggcacttcaaattgacattgtggaaaaacaacgctcgaatagccgtccaattggcgtggcatttccaggtactaaacataaaactctaaatgtga

SEQ ID NO: 22138 - DNA, 2194 bp, Heterodera glycines
gcaatcatagaaaaatgtttgataattattgtttacttaataaagtacatagaaattgaaaaactcaccatagaagagataatctgttatagaagacaattgagaaattattagtgaaattaagatttctcttaacagggtaggcgaaaaggactgcaatttgttaaaaatattaatacagtttagttccccgtttttagcatagtcgtttagatgtgatcccagtgcaattaagaaagtaggtatgaatgcttgggaaaattttgttgtttaaaacagagcaaatagagcggtgtgcgaggaaatgcttatcgtttaaagtgggtattgaagaaaaatcgacaaaaaatttaatgcgctccaattgcatgggcgcctgtaaattcgaaaccagcacaaaaaataagcctcatggcaaaattccagcgcaattggtcggggctatagccatggaattaccacaaatttcgacgacattcaagactgctttttgttaaaatatgaacacatatttaaccggaaataatgaaaggtgtgtgcttgatcagactttatcttctctatttgttactatcgattgcttatagaaaattgcataagatttatacaattaataaaattacaaaaaaaaattgtttatttaattgaccttttccaaaacataatgaaaataaacaagcctatgattttttaaatgctttgcaatcatagaaaaatgtttgataattattgtttacttaataaagtacatagaaattgaaaaactcaccatagaagagataatctgttatagaagaaaattgagaaattattagtgaaattaagatttctcttaacagggtaggcgaaaaggactgcaatttgttaaaaatattaatacagtttagttccccgtttttagcatagtcgtttagatgtgatcccagtgcaattaagaaagtaggtatgaatgcttgggaaaattttgttgtttaaaacagagcaaatagagcggtgtgcgaggaaatgcttatcgtttaaagtgggtattgaagaaaaatcgacaaaaaatttaatgcgctccaattgcatgggcgcctgtaaattcgaaaccagcacaaaaaataagcctcatggcaaaattccagcgcaattggtcggggctatagccatggaattaccacaaatttcgacgacattcaagactgctttttgttaaaatatgaacacatatttaaccggaaataatgaaaggtgtgtgtttgatcagcacttatcttctctatttgttacactatcgattgcttatagaaaattgcataagatttatacaattaataaaattacaaaaaaaaattgtttatttaattgaccttttccaaaacataatgaaaataaacaagcctatgattttttaaatgctttgcaatcatagaaaaatgtttgattattattgtttacttaataaagtacatagaaattgaaaaactcaccatagaagagttaatctgttatagaagaaaattgagaaattattagtgaaattaagatttctcttaacagggtaggcgaaaagggcggcaatttgttaaaaatattaatacagtttagttccccgtttttagcatagtcgtttagatgtgatcccagtgcaattaagaaagtaggtatgaatgcttgggaaaattttgttgtttaaaacagagcaaatagagcggtgtgcgaggaaatgcttatcgtttaaagtgggtattgaagaaaaatcgacaaaaaatttaatgagctccaattgcatgggcgcctgtaaattcgaaaccagcacaaaaaataagcctcatggcaaaattccagcgcaattggtcggctataagccatggaattaccacaaatttcgacgacattcaagactgctttttgttaaaatatgaacacatatttaaccggaaataatgaaaggtgtgtgcttgatcagactttatcttctctatttgttactatcgattgcttatagaaaattgcataagatttatacaattaataaaattacaaaaaaaaattgtttatttaattgaccttttccaaaacataatgaaaataaacaagcctatgattttttaaatgctttgcaatcatagaaaaatgtttgattattattgtttacttaataaagtacataggaattgaaaaactcaccatagaagagataatctgttat

SEQ ID NO: 22139 - DNA, 1342 bp, Heterodera glycines
gatcaaatttttaaacttttatatgaaacatttattgcaggaaatgacaaatcccaacctgggtgagcacacatttcagataagcttcctatcattatttcttagaaacaactaataatctgttgaacagttatttcaaaataaattcgaatatattagcttattatgcatcttcagtgtgcattctaaaataaaatcattttttgttctaattttatgatttatttgttttctgttgactaaatagtcggttcttatagcaaatattaatttatatttgcgtagcttcaaatgagcattctgccttcaatttcgaagggaagtgaatttttttataataaattgatagagagcaaaaagcacaattgtataatattcaaaaaatttatctatgcatttgttgaatgttcctaaacccgatcaaattttttaaacctttatatgaaaacatttattgcaggaaatgacaaattccaacctgggtgagcacacatttcagataagcttcctatcattatttcttagaaacaactaataatctgttgaacagttatttcaaaataaattcgaatatattagcttattatgcatcttcagtgtgcattctaaaataaaatcattttttgttctaattttatgatttatttgttttctgttgactaaatagtcggttcttatagcaaatattaatttatatttgcgtagcttcaaatgagcattctgccttcaatttcgaagggaagtgaatttttttataataaattgatagagagcaaaaagcacgattgtataatattcaaaaaatttatctatgcatttgttgaacgtttctaaacccgatcgaattttttaaacctttatatgaaaacatttattgcaggaaatgacaaattccaacctgggtgagcacacatttcagataagcttcctatcattatttcttagaaacaactaataatctgttgaacagttatttcaaaataaattcgaatatattagcttattatgcatcttcagtgtgcattctaaaataaaatcaatttttgttctaattttatgatttatttgttttctgttgactaaatagtcagttcttatagcaaatattaatttatatttgcgtagcttcaaatgagcattctgccttcaatttcgaagggaagtgaatttttttataataaattgatagagagcaaaaagcacgattgtataatattcaaaaaatttatctatgctgtaatggctgatcgaaaatagctatgggagctgaaaatgctgtttgcgcaaaacaacaaattccaacatgaaggaaagatggccccataaacacagtcatccctcc

SEQ ID NO: 22140 - DNA, 1166 bp, Heterodera glycines
tggtgtctttgtcaatctattattttttgaattgaacacggttgcattcaaaatgaaagtcggggtcagttcggcgcgggcctttccggcaccgccaaatttgaaccaactaaattttttgtttttgaattttggagcctaataaagagagagagagagagagagagaaattattgcatgtcgaacggtttcggatgaaatcaattattttcaaaaattttgctttgcttaatcctatgccattccattacaattttttcttttccatgcacagattgacgagaactacaaacatttccgcacttccaaggggcttccgccggtcaattccagcttttacgctccatcaatttctgtaaatttctttttttttcccccaaaaatttcctttcccttcaatcgctccgtcaatttttagcccctcttcgttccaacgtcgtcatctctttcgcccagcaagcaactgaagcgcttttcatcaataagtcgtggcggtgacggcacaaatgccaattattttggtcgtcgtctcaatgcgttcaaattgggccgtcaaatggtcggcggtgtgccaagcatttcgttgcttgcccaattgaccggcggaaatggagcgcccgcctttctcccgcccaatgagggtggcgtgctcaccaaattgcgagcattggtgagcattgttttcatggatttaaaaagcagttaaaattgggatggaatcgatttgaaattaaatatttgttttcgcaaaatcgcatgttcccgaagattcgtcgggaaatgggaatttaaaatttcagccggcgacaacatgggcgattgggtgtttgaattggatgcaataaatacagtacgcctccatccgacaaaaattttaaaaattaaatttattttcattttctaaaaattgtcggcgagatgggagggggtgggcaaacgaggtaaacccgtcagatttgcgtgggtggttggatgggatgtctgaacggggtgcactatagtaccctttccccccccccctccctcttcgacaaaaatgtttaaaaaatcattattaaataacactaggaaaaatttttattttctaaggggaggggggggggggaacgagcagttcagttcccctcatattgagtcaattagcttttcttcacttaccatctcat

SEQ ID NO: 22141 - DNA, 2302 bp, Heterodera glycines
tgtcttatgcgatgaactctgggtacttccgtgttttgctacccccccccccccccctcgaaaaatttttaaaaaaatcatatgctaggagttttcaaggtcactctgactatgaaaatggtgtttgtttttcgggcctatctatgacatctagtcatcgatttaataaaaatatctatgattttttgaaattaaatatccaactcctgctgagctttaaagctattaagatagtaaaacaatagccattttcccgttctagcaaaaaaatgtattcaccccccccccccccccaattccatcaaagagtcgactgtttcatcattgaacaataaactatggcatgtaaaattctaaattagaaagggaatacagcatcaaaaaaagagaatcgattggaaataaagataagtgaaaaaaggaacattatggaaaaaatcgatgcgataatttccgcttttaaacacaattttggaaatatcaagttaaattgagagaagtttttctctcaaatttccttactatttttctcttctctgctcgccgctaaaaatggtagcagcgacaagtcagagaagagaaaatagtaaggaaattgaagagaaaattttatttttttattcaaaacaatttagtgattaaaaaaagattcagacttattttaaaaataaatttgtaacatttttaaattaaaaaaaatttactgcattccacattgaaatttcttcacggatttgcaattcgtcgcgttccgaaatttcgcacaacatttgattagaaaaggtgcaacagtgcttaaaagaggtacaaaagtgatttgaagaggtacaataatgattataagatttgatgtgtatgattattgaatttttttgaaattggaatgaaattatttgttggaaaattaaaatgtaactacaaacgaaattttgttgtgcacggacgggcgcttcgcgcccgtttttaaattttgttggcttggacgggcgcaatacaacagtgatgaaaagaggtacaaaagtgcttaaagaggtacaaaggtttataagaggtacaactgtgattaaaagaggtacaaaagtgattataagatgtacaaaagtgcttaaagaggtacaaaggtttataagaggtacaactgtgattaaaagaggtacaaaagtgattagaagatgcacaaaagtgagtaaaagaggtacaaaagtgattaaaagaggtacaaaagtgattaaaatttgaacaaaagtgattagaagaggtacaataatggtttaaaatgaaattaataagaaaattgtattattggatgtattataaatttatcaaattaaaaaaatccttttacttattaaaaataaagttagaaatttataatatagaatatttaatgaaattgaaaggaattaatttctcgaaaattcaaattaaataaaacatttattcatcagaaaataatttaaaataattaataaaacaatattaaattaaataaaaaattaaataatttaaattaaaacatttgttcaccaaaataatttaatttaaattaaaaatttttatttattattaataatacaaaacaaattaattaaaaaatgtaaaagtaagcaaaaaatgcatagaaaataatgtacaccgcccggatccgaactcccccccccccctcaaaatgatgtctcagaatccccaatcacacagggattctgagggcttaacgatgtaataattgaaatctgatcacgtattcgtgatcagcggcccaaataaccactaaagacatgtttttggaagatttttggtgaaaaaatttctcaactcaaaaatcatgtgctcccccctttggtcccgaatcccaaaatcacttttatttttatatcttttttttaaaaagggataaaaatgtaaaataaaatttatttggtagagcaaaaaactgcggatttttgtagtattttatttttccagaatgtcttttcagaaccgagttctgaatttttttctgaaaattcgaatttttccagaaattctggaataacttttttccttttttagatagaaattccaaataaagtccataaaattctcccgatttttctctatttttaaggctttattcctgtaaaattgatcaatccttcgatttgttatgaattttcaaatattaggccaaaatcccgagggccaaaaaattgccaaatattttcgaatttttaaaaaattctaaaatttccaaaacttaaaataaacattatattcgtattcagcacctccaaataacccagaaaaaatttttcacaccctt

SEQ ID NO: 22142 - DNA, 1669 bp, Heterodera glycines
  unsure (1)..(1669): unsure at all n locations
ccccccccccgctctcgtcctcccccatttggacccatttctcccccttttgctccccaagtgcccccccaccctctttttgcaggattatttttttgcccatttttctctcgattatttatgtttgtcgttgcagtgcctcaaccagataatgaaataaataaagaaagggaaatgaatgattgattgacggagggagggaatttaattaacaaagggatttatgcaattgtcattgggacaatggtgcaaaagtggcagagaaactaatgggccaaagctgaaaaattatagttcgacaacagtcattatgccgaaggaggaacgggtgtcccccccatccaattttgggagcgttgtgccaattttggcacattggaatgccaagaaaagaattgccaaatgaagaaaagcttccgtttctgtggtaatccgaaagcatttttgtcgactcttttttgagatgtagcgaaagcggcaaggcggtgccaaattctgttggtgttgaagatgacaaatgtaatgttagagactgatgggggagggagattatgttggcattggcacttgggggtatttaacacatcattaggcaacggaaaaacctcaacagagggtgggcacttccaaaggcttcttcttcctcctccattttccgttcgttcttcctcagcttaatggtggtgccattctctgctctccctggccctcccaatgctttttcttttttggcttttcctctccttttggccccttttgtctgtcccaatttgtgtaaaacggacacaaagcaaatttgcatccattcattggtcattcgactgcaattcctccctctctcccctccgcccaaattgaattggcccatcatccgtcgctgttgcaatgttacgcccccggcncataaaattgggtgtcaccgtttttacccgtttctgccacaattcccattcactcaacgggaattgatagttggcaaacacaaaattcatgcagaaaaagtgaaaggagcaaaaagtgccaccgatggaggcggaggagaaaaaagaaagaaaagcaggcaaattcagaggaattttaataaaaaatttatttgcattggactgacactttcccccaatgggaaaagcaaataaaaacaaacacaaaaaggccccgccaccgctcgaacttttttaaaacagaagcaaaggcaacaaaaaacaaacaaacatttttgggccgtattatttccatggcatcaaatccaatttttgtggcaatggcggcgccgtgtgggctttacgtttttgcgatttaacttacgttttcatgcgtttccaatgtccgctttgagttcgcccacataatccccgcaccccccggggggaggagagatttgctaattggcttagtaagtgaaggccaacgaaaaggaatgacggcaaaaatgtccagctgacggcacaaagtgtcaacgcagaaagtggaggaaatgcattcgagaaaaacacaataatacaatggaagagaatacaaattattgagattcaaaaaatattaggctaaaaggaaaatgaatgaaacgggcacaaaattgccaaatcacaattagactttttgatcactttcccttctttgactgttcaaacagtttgccgctcgtcaaagcatcgcaaatgcgtcagct

SEQ ID NO: 22143 - DNA, 1942 bp, Heterodera glycines
ctgaccgggaggttacacgccgagaatgagcggggggcgtggtcgataagactgatcaaaaaggagggcgaagacgcggttcgattctccgccagaggctaaacagttctgattaggctcacttttgttcctcgtcgacggatgtgttcagtgtccccacggccgagccgaaacgaacgttcaattggtcaacaatttcccttccggcaattggttcagcggatgcgacgaagaacggaaggtgatcaggtaaaagtgatcaaattgtgaaaaaagagatgaaaggaaacagagggaaaatgatcaaaaaatacgaatgattgtgtcgatcggtagcaaagtgatcggtcggagtgaaaagccaatctcgaatgccagccgattgattagccattcaaaaaagacgatcagaaccgaacttaaaattcttcatcactactcaaatatgtagctatcactttctctttttgagttccgtcaatgtttcggtgcgcgactcttcttcgagggacggggtcgaaatggacggcactttttcgttgggtggcatccttcggcagagagaatgcggcggattctttggcattggcgggggccgcgagggcaatttccaatcgctgatgctcgaacttttgcatacgtaagtctttttcgtgtcaattgtccatttattagtttcgttattagctgcggacgaaaaaaggcaatgcttttgaaagtgagattaccaaaattggacatttcggcgataaatgcgcgagggaaaatggcagaattgcgcggcatttcgatcgatttggacatcagcaagggcgggtggtgagcatcttatattggtcgactaatagtgccttcttgatataagggacatgcaatgggtggactatgagaaggttcgaccaaaacagacggtgccggaacagccgcaagacgaggacggcacttttggggggaggcgaacgatggagacgcaaaccgagccaccggaacagaaagcggcacagcgaggagaaaaagccgaggaaaagcccaggggtcagtggcaagaggataatcgaccgcacgcagtgatttgactgtttgatcggttagccgacatttgcggaccattatttatgggttgaactgtctaaaaaacaaaaaaaaaataaatttataaaaattgagtgaccaaattagttttttgtgatggttttagaacagcaaatatgggctatttttgggaaaaagatagaactatttttagtttttgtttgttaatttaattgtttggtatgccatataaaaattttaagctctcggttaaccaaagcatggaagtgaaacacgaaaaaattttccttggtataaaatcctgaactgacttttatatgtattaaaatagcaaattttttcgctaatttcactaaacgtgtagaggagaagcaagaaaaaaatttacacttgttttgggacttctaagataaaataaaattctccaattgaaacagatcgccttgcatcagcttaccttcactaatttcaattttgggagtatttaattaagtgaaaattaaaaaaaaattattttctttattttgacagttcaatcgggaaatagtggtccgcaaatgtcgcactacgtcagcgtcacgactaattcttctttttaacgctcctattcgaaccttagaaatccctatttttgaatttctgcccaaaataaattttgcccttacagtctgttccaaaattatagcgccaagaattttgttttttttgctgcttaacctacttcccatggaccaatcgatctgaaatttttatgtggaaatgacgcattttataacgggccaaaagcctaaaatttttaaaatttgtacgtagtatgtattagatattatgtatttaaaaaagtactcatatgcttcctcccgcactaataagtctgtctatcaaagca

SEQ ID NO: 22144 - DNA, 3519 bp, Heterodera glycines
  unsure (1)..(3519): unsure at all n locations
aaaatcctcatttcccaaaaaatcttcattgactacaaaaagccacaaaatgaggataaatcctcagatctggcaaccctgttcatagctgttctaaataaattaatttgctataggccgtaaatgtcctgcaaaattcgaaaattttggttatgattcaaaaaataaaagccaaaaaactttggattttagccttaattttttgaaatttttcgaaattctgcaatgccgggctaaaatgcgtgcattttcattcagttggccggcaaatttcttctgctacaccagccatttgtgatggattttacgacaatcgaagttaattatgtgagaaaaatgccatacttttttccattaatcatttttttctaatttcagaaatcgccgttttttgccctccctttttaccactctgagcctggagtaaaaaaggaatcctgggccactttccatgtcgaatttttcgacccaccggaaaatgagtttaacatttctcttctgcacgactcacccgaacacagcgaaaaaggcaagacaaaactttgaaaagctgagcaattaatggattaataaaagtaatttgtcatcagaagctctttgtcgccctactaaaattttctaatttttttttcaattttgtgatttttaaatgtaattcatacaaaaaataaggagggtgagggccgactacaagggggcaaaaatgggagactccttaccatcgttcaaccatttctttatacatatttatttattgtcgcgaatatgcgtatattggaatataaatatatttttataatttttaaataattttattttaattttataccttttttttttgttttcagtcggtgccacggtaatgggaatgaatgtgaagccgaaggataagcgagtcgacgtcattttttggaactgttttgtgagaaaaatataaaatgttttaaatatttataataaggaaacgatttttagaaaaaacttccgggaaacaaagacagttgcgatgagacggaaacgaaaagttacaaaaatgaaaatcttggcaaagcagccgaatttcacatcgaagtgctaaacgacagtttttctgtgataatcaatggggatcagaagaagcctttggagtacaacagcacattgccagtttgggcaacaaactttttcagggtgagaaatgagaaaaacggagttttacgaaatcgccaggtttaaagactcggaatagacccggaacccgtactgacaaatgaacattttggccggtntagagtntaaaaatgaagtgaaattcatattaattttttagaagaaatatgattttatatgagaaaaatagagaaattacattaggaaaatattgattattttatttaaagatttttaaaatttgctttctttgaccaataatgaggctcgaatttttaattatttaataattatctaaacaaatttattttgaaatttttttcaaatgctcgaacgacccattctttgcttaatgataattttcgtaaatttaaataaaaataattgttgtttaatttgcattaaattttatttattttttataaaggttgaaggaaatgtcagactgttggggaggccactttggaaagaatgggaagtcgtaagtgcacaataattgcaaaattaaatatattttgtcattttcattcaattttaagtatggagacgaaaaaggctactttcacaacttttcaattccattgaaaactttgctgaattacggagaccaaatcattctgaggacactgatcattggcagcgagacggaattcccgcaaccgtttaacattacgctgttgcacgaagcggcggaatggaacgaaaaaagtcagtctatggcacaaaaatggaccaaagaatggcattagcggaattgggtcgattttgttaagttggcgatgtgattttgcaaatggcattcacattcggagatgatagtagcccgggcaaagcaaatcaattcatctgccgaaatttcatacacgaggtaacaaatttatgttggcaaatggtggccaaaaaattgttaattaaaatttgattaattattatttatatatttatttcggtcgaatgattgagtaccgatgatgaaaggctgtttaataaaaattcacgaaattattttcatacaaattttaatcagaacataaggcataaagaccatatttttgggtcgaaaatctgaacattttgcgaaacgccgcagggaaaatttgagtgtgatttgttaacagattttgtcaaaaaatgaccaaattttgcgttaaactttaaaatttatagataaaacattataatattattattcggtccataattttttttttcaaattgagcccaattttattaaagcttaattttcatgaaatttcctcttctgctgacggaatcgaactcatcattcaattttcattgcctttttaataaataattttaacactttttaatttttatgaatgttttatacggcatttttaatagagaaaggaatgggaagacttgacaaaaatacccaaccgattgaacaaatttggccaagagttcacgatgaagatcacggccaacacggnatcggtttgacattgagattgaaactctggccactatggagaaaatcgaatgcaaatatccgattttggacaatgtgcaaattccaccgtgggcaattgacaacattcgggtaaaaatattcacgggctcctaattgaaaatgaatatttttgtaatgatgtagcttttgggaaattttgtgctttttgaaatcgtccaaaaaatacatccctttttaatcaaaatctgtttttaaaaatcgcattacaaattccaaaattattcccggcaacgcctttcggcacctctggaccattccttcccagaaatttttcaaaaaaatacagctatggttgaaaaaaatttaacaacgttttttattgctcacgattacgtcagtaattgaattttaaaaataaagtttatgtagccttaattattgtaatacaaaggtcaaaattgtatatgaacctcgttctggattagtaatactagtccccccccccctcccgccccaaataaactagcttatcagtgaagaaaatcaaagactctaaatcttgacgaccataatcgtcgagtgtcttcaatatttttagctttttgtgttctaatcctttatgtgtttttaataattaaaaattgcttctttaacagtttgatggcgatgagttcagagtgattgacttcaacatatcccatccatcccccaaggctttaattacgaatcggatcaattacatcgcacaaataaaggtaaaaggaattgggcacttttatgttgttgttatttcaattaccacaaaattgttaaattcgaagaccatcttttaaatgaaaggtcagtcggaactcggaatcaaatctcccaatgttgagtccttaaccgaattcctggattctgaaacgctcatattccctgacatattataaacc

SEQ ID NO: 22145 - DNA, 1818 bp, Heterodera glycines
  unsure (1)..(1818): unsure at all n locations
ggtcgtgattgtcaaaaacggcaaataattgcccaggggcaacaacggtgcattttcttttgtttaaaatccaaatcattttcgcctcaaaaatcgagaccgaaacgccgtcctcccctccccccccgtaggtattcgttctccaacgacccaacggcacacgccgaagtgacggctcttcggggggcaagcaaagtgttggacagcttcgacctgagcgggtgcataccgtacacgagctcgttacccatcgtactcgtaaaagtgattactcgtacccttttcgctaatttaaatttaactttctcttccttcaccctataattgcttatccattttccaaggtcccatgtgtttgggcgctgttttgtggtcacggattagcaatgttttctatgctgctgcgcctaccgatgtttttccctcttttttattttgaatttttcggaatgttttaggccgcttcggtcggtttcgatgatcagaatttccacgaatttgtctctaatccgaaggttaattatttttatttgcatattttgcaattaaaaaattcagaaatacgaaaaactgatggcattggaacatttgccagtcgaagggcatatgaaagtgttcaaaatgtgggaacagagggacgagaagagaatgtactgacaaagggccaaccaatttattcaatttacatttctcatttgttaatacatgtgaatagtaaataaattggaaatttaaattcaatttaatgtcaattttccataaaaaatttttaaattccatccaaaatcaaacattaaggcaaatttagaattcgctatatctcggtttatttaccggactatgtacaactaaaaatggaattttgaatccaaattctggtccacaaaaaattataaaaccgtaatggaaggatagaaattcattttgtatcaaataaatgtaaaaataatggatttaaaccgttttgcaaaattttcttatttttggtcccaaaatcttatttttgaccagcggtgtgattatttcgaaaatttttgatcgaggccatgatattatcacatacatataatatatatttataaaacgatataacaattgtgaggaaaaaagacaaaaatcacaaataggcaaatgaatgaatactgtataaaagatctgctaaaattcttacatagtctaaaaaacacatgtattcttatatcggagatcagctattgccattgagaggagtcagcggatcgatcagcagaagttgctccaaagtctgcacggcgccctcgtcaaatttgtcgagatcgaatgccacagtacactcatccgagtccaactgcaattggtccggcatacggtccatcaacgcatcacaacagcggaacagcagctgatcgtcgcctgactgttgtgcgttctccaattcgcgcttcaaccgaccgatacgaaccattgcgattctgatgaggtgaagatttcgaaaacacatcaatggttttgaattgtgcttcaagtccagtttatgcgtcgcatcgacttttatgcgtccaatcaaattttttgtctaatttcagtgcatttacaattccccgncattaattnccctatttttacaaaattcctcaaaagatcaaactatacggggtaatttaatctcatttcttccaaaatatgctgaaatatttttgtgtttccgtggtatcttctgaacatgtactggaacaaatatgtcggcagataagtgtcggagagaaatcttccatgcaccccaagttgcctcaatgccctgcgtatgcacttgccggtcttgggggtctacaaaaaaaa

SEQ ID NO: 22146 - DNA, 1154 bp, Heterodera glycines
  unsure (1)..(1154): unsure at all n locations
gatagagaatgtgtgcttttacctgttttgaagctaagtcggggatctgacggctaatatgagaataaagtgcagttctctctttaaacgaactgattttatggccactttctataaaggcgatggcggtcgctgtatgaccgtaaacccagttttttgtatagaaaagggttgtccaaattgcaaatggatacattatctgatttatttcacaacgccaacacgccgttgaaaataaaaacacaagttgcatgtgatggcaaaagttgtgaaattcaaacgcattttacggccatgaattgccgggaagtgaggcgatcaaaattcataatgatagagaatgtgtggctttacctgtttcgaagctaagtcgggtctgacggctaatatgagaataaagtgcagttctctctttaaacgaactgattttatggccactttctataaaggcgatggcggtcgctgtatgaccgtaaacccagttttttgtatagaaaagggttgtccaaattgcaaatggatacagtatctgatttatttcacaacgccaacacgccgttgaaaataaaaacacaagttgcatgtgatggcaaaagttgtgaaattcaaacgcattttacggccatgaattgccgggaagtgaggcgatcaaaattcataatgatagagaatgtgtggctttacctgttttgaagctaagtcggggatctgacggctaatatgagaataaattgcagttcgctctttaaacgaactgattttatggccactttctataaaggcgatggcggtcgctgtatgaccgtaaacccagttttttgtatagaaaagggttgtccaaattgcaaatggatacagtatctgatttatttcacaacgccaacacgccgttgaaaataaaaacacaagttgcatgtgatggcaaaagttgtgaaattcaaacgcattttacggccatgaattgccgggaagtgaggcgatcaaaattcataatgatagagaatgtgtggctttacctgttttgaagctaagtcggggatctgacggctaatatgagaatanagtgcagttctctctttaaacgaactgattttatggccactttctataaggncgatggtggtcgctgtatgaccgtcaacccagttttttgt

SEQ ID NO: 22147 - DNA, 1390 bp, Heterodera glycines
tttagcacacccagcagcaatgccacgcaacaacgaaatcaagggcgcatcagcagttgcggcaccactgacaactgtttcagcaggcaacaacagtgcaaaaaacgttcactcaacaacaacaacaacaacaacaaccatcacaactccaacaacagcaacaattcaaatttgcacagcaacaacggcacatggatttgatggcacaacaacagcaaggtcggcaacttcatgccgcaatcgctttacaacaacatccagttgctgctcaagttgttacagatggttgtgtttttgttggtggtcagcaacttgccaatgctgcaactgttgctgcttctgcatcagatagccgtccgacaacaatgcttcccgtatcgacggcggcggcatttgcacaacaacaatttattggcgcaaatggattgcaacatcaacaacaactacagcaagattttcaggcagctacagtataccagcatcatcaacaacagtatcagcagcagcaaatgaaatatcatagtcagcatgctgaagcagtacaacagcaacaacaacaacatcagtatggacgcgagggagctgttgcggctcaagcagcaccggtatgtttagagatcggctcgatcaaatttttatcataaaatgtctcccaaaaaataacggaatgccaaattcaaataaatgccattttttattttaaagcagcaaatggcggtagacaaagccgaacaacaacaccaacggcacctgcaaaggcacatgccaacgatggtgggaccaccaaagagtgcgccagccatttcaacaatgccgccccatcagccgcacttttggcacaatatgccaccaccatcgcagcacagcgagtcagttcagttccacattcattggtcccgcgggttttcaaaaaaaggcaaaatccccccccccttcgaaatcaaaatgccagagtataaaaaaaaacttagaaaatttccaagttggatttccaagaccgcaaaattaaaaaaaaactcacagttccttattaatagtacagtaatcattcaaggatgggcaaatttctatgctctcctccaccatatcctgctgctgctggtggtggcgttgtcctccctctgcatgcatacggtggtgcaccatacagtatgcttcatcatgccaacgccgctggtggtgccgccgaaagtggagggaaagaattgttgtttttgcaaaactctccggcgatggcaccgccgctgccgattacggtgaaattagaagaagacggcggaggagacggtcaacaacagaagcaacagcaaaatgatgaaaaagtgccgcaaaagaaacaacagcaacaaattggcaaatgccaaccgccgaaaagggtgggcaaaatgat

SEQ ID NO: 22148 - DNA, 1848 bp, Heterodera glycines
  unsure (1)..(1848): unsure at all n locations
actatcttacatgcccattcttcagttctgattcaaaaaaaataggggtatagattcgctttcgttgtgatttaggagtgtgagatagattaactgcaatagaggagcatccattgaatttgggaagaccccaagtggcagcatgaaaagcggtttgacagattagtggatgttcaggaaccaacaattgatcagcgttagtactaattagcattgaggctatgagtgtcaatgttagcattaggatgcggcttaattgtggtccagtagtaggaaatccccaatttgaaacttttagaggaggaactgaagagtcaacctcattagaagcccattcagaagttgaagattgatcattaagatgttcttccggcattagagcgttgcaggcattgtgctgcatattcgatgaaattggttgatcaggaggcagaccgtctcgtacattcatcctttgaattagttgatcagctaaggcacttaaatcaacagtcacgttttgaggattggaagatgtctgaggtacgacatcattagcttggaatggataattaggctgtaccatgttaaccggggtgtaataggtaggtctatttgagttgttattgggaccattcatttgaaattgtgagcgcctgtccctacagttgtacgcaacatgtcccaatctaccgcagtgatggcattttggacggccagtccaattgcggtcccctcggcctcggttcgaccggtattgattagccctatttctttgaaattgaggcctgttggattcaccgtggttaccccgaaaatagcctcttcctgaaccatttggttgattattttgtgtttgctgattaacctgacggttattcgtatatctttgtccagcgggtgcccatgaattcacattggaggaagaaaattggttagtacgataacccgattggtttaccggagattgggttatagcttggacagtgaatttgagcgggtccaaaacgttattttcattggtattagtcaaaagaagttctaattcttgtgcctgggaaaacacagcctcaaaatcttggttcttagtgacaccagtcagtcggataagaaaggttaaattgggcttgaccctttccaaaaattcatcccttagtcgtgactgtatttgtgcctcactttgaccggcacacacagtagtaaccaatggcgaaagtcttgacaaaaattcccggactgtttcggtttctcgttgtttgcatgtcaccagtgccctttttgacatttcccggcgttcaggggaatctaatttgtccctaatggcatttaatgccttatctacagtgtcctttttattgtccggaagcttatcaaagagctttctgatttgcccttcaagagaaaatttgagtcggcctaatttttctttttctgaccatgttgtgcccgcataatccaaaaggtctctaaatttttgggcccagttatcgaaagaggtaagattttcatccctgcatgccggaagttgactagcaaatgggtccacagttgtcaaaacgtttagaaattcgtcttcatcgtcctcttcttcaagtaaccccacgcggccccttagcaccacagtggcattcccgttttgtgataatttatcagcattagggtcatcccaattctccacttggctttccagagattcaactttctctacaacttggtcaagtcttgtggagagagtgtccatgttagcattaaccgttacagatacttggttaatggcatctgtattttgtacagctctgcgattattactcttagacttcggttagcggcatcctctagacgtacagtgncttggtatactttttctac

SEQ ID NO: 22149 - DNA, 1787 bp, Heterodera glycines
tgagatggcaaattcaaaaaaaccctttattaaaaagttaaaggtacaagatatggcccgaaaattgttagaaaatctttttgctccttcctcagaattttataatcattcctggtgcggtttatttagcaaatttatacaaataacgcgtatttcattaaggaaagtttgcgctaatcgttatcaagactccactagcaaaatgctgcgttcgtattcaagttatctctttcttaggcaattggaagatgacattgattttgatgcaaccatgcataagctctacgcgggtcgaggatgggtccccaataggtaatcggatcggtcattctaaaatattccttctgatcaagtgttttttgtttttgtgatgaaataaactgatgtgtttcttgagtaaatgtcatttaagccgttaaaataaaaaggacataaatgtgtcttgtgcataaaaaagagaaacatatatgagtgggtgagtttaaaaaagacactattgtgtcttatacataaaaaagagaaaaatatgagtgggggtgggatttaattttttgggaacgtatatatacattagtgatattcagctctgtcttagagctcgaggtccttggcatcgaaaatgagcccttcacgtcttgcttctttcaagaaaaccatgaagctttgtttggtgtagggcataaagcgaccagcttcgatgcctgactcgaattcaacggcctcagttccttcaggagcagtatttgtcgtcagcagaggattctaaacataatgattccaacaatctttcaagaattcatggaacaaattatgagacacattttcattgtaattctaaaccgcaacgacatttgttactcaggatttgtgagacagatttatgataataatcatataaggagacacactatcctttttcctaatactgccccgaaatgctgagaatgaataatgtgtcctttaatgtatatttaacatatatgtgtctaacaagcggttccaattgaatgctagggcttgtgactcgggctcgtgattaataagttccttttaaaagcatgcagactaaccgcaaggaatgacgctgcgtcacacagaacaatcagtgcttttcggtgaagcgaaaacatcacattaactcgaccattcttccacattcgaagtgtcggatgatatgaatcggccagaaaaccaagcgtagaggtgttattgcggccaactttaatagggtattcaaatgattttgatcatgttagtggacacattaaagtagctcactttaatggacacattaatgtggctcacattaatggacacattaatgtggctcagcatttaatgagacacataattaagtaaaaaatttaggatcaaaatttttaataatcggttgtgactagatttaaaaaaaatatatgtctctttaaatttgtttataaatggaatgtgccttaataagtcacaaaattgtcttaccagatactatcacgtagtcgaattccttcccctgtgccgcatcgacagtaccaaccaaaaggtctgaatatacacgacgatccaagggaacaatgagttcaggatttgaagtgcatgggcacaagaaatcagccgatgcggcagatgtttcattcgtgccaaccacaaaaactttgaaaagttccaatagctgggctaaaaaaagataatcatgtatttcagttgattagggacatattttaatatacaattcgtctaatgataaattaggaacttttttatggtgtaataacagcaatgtctgtcatttc

SEQ ID NO: 22150 - DNA, 1443 bp, Heterodera glycines
ttttagcttgttaggcaacttcgcggcctcagtcgggcgcttcgcgccggtttttcaatttttgttggccttggacgggcgcttcgcgcccgttttttaaattcgttgaactcatacggggcttcgcgcccgttttttagcttgttaggccgcttcgcggcctcagtcgggcgcttcgcgcctgtttttcaatttttgttggccttgtacgggcgcttagcgcccgttatttaaactttgtttacctcaaacgggcgcttcgcgcccgttttttagcttgttaggctgcctcgcagccttagtcgggcgcttcgcgcccgtttttcaatttttgttggccttgtacgggagcttatcgcccgttatttaaactttgtttacctcaaacggccgcttcgcgcccgtttttaaatattgacgcggcattcggccgcttcgcggcctcagtcgggcgcttcgcgcccgtttttcaaaatttcttgaccttatagggattataagaggtacaataaatggtagaagaggtaaaatagtgattagaagaggtgcaacagtgattagaagaggtagaagggtaattagaagaggtacatcagtttaaattttatttttttacaaattcaatgtaaattgaaacatgatattctttaattttttattcaaaatttaaaaattatttttaataaaattttcaccaaaaaataatttaattcaaatgaaaaatttttatttattattaataaaattaaaaatattttaaatgaacaaaaattgaaaaacagaaaataaatggtagaaaattaatgtacaccgtccggatccgaacctgccccctcccccctcaaaatgatgcctcagaatccccaatcacacagggattctgaggtcttaacgatgtcaaaagtaaaatctgatcacgtattcgtgatcagcggcccaaataacccctaaagacatatttttggaggattttgggtgaaaaaaattttccacataaaaaccatgtgcacccccctttggtcccgaaccccaaaatcacttttatttttgtaacatctctcaaaaaagtgataaaaatgtaaaataaaatttatattatagacagaaaaattgcggattttttgagtatattatttttccagaatatcttttcagaaccgagttatgaatttttttctgaaaaatcgaaaatttccagaaattctggaataactttttttcttttgaggatagaaatcccaaatagaccccataaaattctcctgatttttctctatttttaaggctttattcctgtaaaattgatcaacccttcgatttgttatgaattttcaaatattaggccaaaatcccgagggccaaaaaattgccaaaaaataaagaatttttaaaaaattccaaaaattatgaaacgaaaaacaaaggtcaaattcgagctcagca

SEQ ID NO: 22151 - DNA, 2503 bp, Heterodera glycines
tttttgttggcaagaaattgattcaattcccgtgccggggtacacccgaagagtttatttaaaaaaaattttttttttttgttgctccgactcaaaaattttctgtccggtgtaattttcctaactttttggtttaatatgaaaaaacgggaatttttagtcattttcaacgaattgacgtcggaggaacattttacggtaatttttcaaaatgccgagtgaatcttaaatttgttagtgggtattaaatttttcaaaaatttgcatttttggaaaaaacatcaataactctttggcaaaccatgtgtttaaacattgtaaaaacaccattgatgagagtttgcaaatttgataggccaaccacgccgaatgggcaccaaatttcgccaattcccgaggagaacgacgagttagaccaacttgtgtctgcactggtcgacaaccacaaccagcaacagaagcaaggcacagctgccacaaccgcctacgaccagagggcggtgaaaagtttggtcacacagctgcgcgatgtcatcgcccagtgggactgggcccaagcacggcacagacacgtggccaaaattgtaaaactatgcaatttgaaaaaaaatgaaaaatttgcgtggtagaagcaagggtgtagccagacccttggcttcgggaaggggggggggctgaattaaaaattcgattttaggggtgtattttttaggaatctcgagttttgagaggtgtatttttacaggattttctagccgtttttcgctaaaaaaaattattttttttgagtattttgaacgccaaaatgacgaattgaatgccaaatgggagcagctgaacgcggaggtggccaaattcaatgaaacaaaagcggacgaatgggcacagattgccaaagtgcgtaccgcactgcgtgcggagcgcgagaagcgactgggcaaaaaggaggcggaccgaatcatccaactggaaaaggaggtgaacagggaggcaattgggacaacaatttggagccggtttttccaaaaaccaacattttttcttggtgctcaaaaaatttacaatttttgcttggatttgacttatttttttacaaaaattttcaacttttacccccccccccccaatttcagttggccgatttcaaggccaaagatgcgcgtgcttctcggttggcctccgaattgcgcacccaaaaccgcgagttgcaaggcgttgttcgggtgcgtgagcagtcgtacaccgacaacatgatgaggctcaaacggctggagagtcagctcgtttctgctgaggtttgtttgcacctgttttttttgtcagggtttattggtcttacgaaaccctgagaaatccaataaattaagcgctggggtgaaaaagcaggaattgttagcggttttgcgccaagaattttttgcaattttcgggtcaaatattcaacaaaaaaaaaaaagcgaacaattgagtccggcggtgcctatgggcgccccctccccgagtgcaccgcaaaaattcgcgctgaaattacgccgggacaaacttccgctgccgaaatatttccggcgacgaaaattagtcctgttccagaattcccccctcactttccgtcctgtctgcggttttactttgaatgtattatttatttgtttgtttgttttaagcaagaaaactccaggctgcgcactcggcttaaactgatccgacaggaaccggcggcaacaaaagtgccgcaacatccgaaccaccaccagcagcaaaaacaatcacaacagcagctgccacagcaacaacatcgtcatcattcggaacaacaacgcggtgtcactttctctacggctgcccctgctgtgtttccgccatcaagttcaagcagttcaacaacaacagcaacaaccgtctcagctggtcgacagcagcagcagcaacatgtgcgacatcagcaagttggtgtttgaaaaatggaaatttgaatcttaccaaaaacccgaaggaaccaacaagcaattttcactgggatagcaacgcttgtggctgtgttatggcatcgcatgggacagctgctgagaatgttcaggtgatggtggtggtgtggtggtcaacaaattgaacgcgttcactccctcccactcccaaaattttatccatttttaatcgacagattgactatttgcatgacgatcgtgtttacgaagtgcgaatgccccgtgggcattcaatgcgttacatgttgaccggccaccttgacctgcgctgggccaacggcgatcggacactgatccgtccggatggcgaacgtcgcgagctgtacagcccggaaaagccgaactttggcattgaaatgtaatggcagtaaattaaaaacagcgtaaattttttaattttcagtttcctgccctcgggggtcgcctatcgcctaaacgctcagtcgcaatggcagcgcgaggaacttttaaaatgcgttaacagttctttttgccgtaagccctcctgctggttacgg

SEQ ID NO: 22152 - DNA, 1282 bp, Heterodera glycines
aaaagcattggcccattcgcctcaagtgcacgtcacagcgcattggctgttggcctcaagcaaaagtgaaaatgacattgttttggtgggtgttactaaattaaaaaaaaaattttggcgttttgttttatgccgccaattcaattttctcgcgacaggttggctatttgaaaagcaatgggctgcacaggcgacaacgaagcagcagtagcgatgtccgcttcattgagcatcgggcaaaaacacgtgtgccgtcggtggaggagccgaaagacgcctgggagtgggtttctcgggtgcaccaaattcccccactcgaattatttttaaaattttcagacagacatttttaaaaaaatcaaaaaattttcatattttcagtgatttttgtaaaaatttttgaaacttagtaatagtcataaaacttggtaaaattgttagagaaattgaaatcttataaaaaatttgttaaaaaaatttttttttttgaaaaatttttggtttttccaaatgttccggggatgaagaaacaatgatgtgggggggggggggggggggataaacgagctgctcccggtttttcagtacctaagagagtggagactgatcagtgatcattttcatttattgaccagaggttagtgactgatcagtacactgatcagatataattgccgaaaataatgctgtccggactaagtgaacgaaaacaaataaatttcaattggttatgtttgagaaacaaataaagtttaaattgattaggtcaaaaaaaaatcttattaaaactaaatcactatatatgcacattgatcagcagaaactttgcttgatcagggaactgaatttttgaattgtttgtgacagggctaaggtgccgaagagtccattaatgacatcatcttacaagcatcgcaaagtgtccaagagtcaggaacggcacatcacttcaaacaatcactatggactgatcgattttcgcaagagattggaaagggttggcatttttctaaaaaacaaagatgccaaaatttgcaagtgccaaaatgagtttttgggaagcaggtcaggaaactcgagcgaaccgaaggggacgagggaaagtcaaaaatggatgaggagcaatcaaacaaggaacggaatgccaactttggacaaatggaattagtgccaaaaaaggcggcattacagcagcaaaaggagccaatcgaggcgatgatcatcaaacacagaaccatggcggacgaagaggaggccggcacggggatggacgagtaagttt

SEQ ID NO: 22153 - DNA, 887 bp, Heterodera glycines
aaaaaatagccaaattatggtataaaaatttgtctaattgcaaatttttttagcatttattgttatttttaaactttcgcctctttcccgtcccattaaaaaactgaccaacgaccgatggccgttgccaattgcgccaaatgcgaacgacggacgtccgtcgcccgcctctgtccgctgttggtgctcctccgcctcccactcgtcctgctgttgctccgttgtcgcccgttcctcgtcccttccgtacatccattttcggcacaatgcataaactgactcgggctgggccgagtcgcgcagtccgaacgcctttccgcgcagctcaaacacaacgcctgtgccaagcaattttaataaaaatggtagtgaaaaattaaatatttaaatgatatactaaaagtcgtaacataattagaaagagtttgtctgtaattatttcgcaacttctgatgatttatttggatagagtaaatgaaaacccttttaaacctggcgcttaatttatgaactaatatcaatctttatgtctgtgacaacaattttaatatgctcaggccgaatatgagttttggtgtaggtatgaaaacgacatttcagataacagagagtatgctctatccaaaggtctcagatatgcagtggctaactcacgcttttctcgtctcatccttttgccgccgtactgttttcgttgctgtcttgtgccatgtcggtcgtccaattcgctgtcaatgtccgcctcttcactgcacgggaaggaacgataagcacaaatagttttgaaacattaccattaaatttaaaaatcggctcataatcgaaagataggtcaaacaaccaattcccaatccatcgctggctaactaattagtataatttcaaat

SEQ ID NO: 22154 - DNA, 1671 bp, Heterodera glycines
  unsure (1)..(1671): unsure at all n locations
ttttgtgaaaaaggcaaaataagacaaaggtacaacaataaattcaaaggtatgtaaatatgtgtatataaattacacaaagtttcatcaatgtccagggaaaatgaaattgttttttaaacctaccaaaatcagaaaaaaactttgacaattcatagaaatgtgacaccctgaataaaatacaaagtccgaactgaaaaactgtaacgaaaaaagcataaaaatggtttttctttctgccggactcatcattcttcaggcgaatcaaagagaaaacaaaaacaaatacatgaaatgattaagcatttgatcctcagtcagtgtccgaaaagatgaagccggacaattctgcgtttataatctcccgctccaaccgtttcctctccaatcgcttcactggcttctcataggtgtagtacagcacaaaacgggtcagcaaagcaccggcggtgaagggcaatgcggcaatgtaaatgaaacggacggtgactagaaaaaaatgataaaattaatgattaaaatggagagagcttttttgtgtcaggttaaggaaattcagcagttgaaggagcaaaatataattcaggcaactgtttaacatagcttttaattattaaatccaaattgacctataattttttaatgtatgccctaagtagtgagagagatatatctgggttttcagaggcaccgaccgataactaggagttgatttaatttaaaaaaacgaaataaattttgttttttttttgttaggatttttggttcaaaagtttggataaagggtgttagattcacaatcatcgaacaaataagttgcagataaatttagaaaaataatttttatcaaaaaagatcatccccctatggtcaaattagagaacacgtttgtttgctaaacaattgttaaaaattaattagaattattgagggaggcaatagcaatgcccctaattgaaatagaatggccgtgcccttccgaaaaataagttttcataagtgctacctctgtgtagaatgtccaaccgacggttgctcattacgcgtcggtacagcggccgtacagtgtcagaaggcaacgccactttattcgacattattatctttaatagctaaaaaagttaattaaatgtgaataactcgagaacggaccgggccgggcccggtaccgggttttaccgggcccggcaacccggagcggcgatttttggaaaaatccgggttgaccgggttttgagaggccgggcccggaacccggttgcttctgaaaatatcagtcaggcccggcagatttggaaaatccggtctaaaagaattacctaaaacatttgcattttttccgggacaacagaaaagtaggacaaaaaacacaatgccaacctagtccttttttgcgcgttaattcaagaaacaatgtattccttctcagttctccagggaatttcgactcttcaaactcgaacagtcctattaatttgtaagtagggttacacggggcagagtaccgactggagtcaacacccggataccccctggngcccggtttttgttgattcagcaatacgcggattcgttttttgtccaaatacccggacccgtgtcaccctgctattatgtacaacctattgtacctaaatttnggttatttaccctttnttgctctaatcataa

SEQ ID NO: 22155 - DNA, 1221 bp, Heterodera glycines
  unsure (1)..(1221): unsure at all n locations
atgccggagattgagtcaccgagattgaatgctggtgggtgagtcccagagatgaaatgctggtgggtgagtcccagagattgggatgccaatgaaagtgggtgggttgagtcncagtgtttggaatgccggagatttgagtcccagagattgaaatgttggtgggttgagtcccagcgattggaaagcctgagaattgagtctcagagcttgaaatgctggtgggttgagtcccagagattggaatgacattgaaatgctggtgggttgagtcccagtgtctggaatgccggagatttgagtcccagagattggaatgccggagaattgagtcccattattggaatgctggtggcctgattttcagtgatttgaatgtcattgaaagttggtgggttaagtcccagtgtttggaatgctggagatttcattgtttggaatgtcggagaattgagtcccagagattgaaatgctgctgggttgagtcccagtattggaatgctggtggcttgattttcagtgattggaatgtcattgaaagttggtgggttgagtcccagtgtttagaatgccggagatttgagtcccattgtttggaatgccggagatttgagtcccagagattgaaatgcttgtgggttgagtcccagcgattggaaagcctgcgaattgagtctcagagattgaaatgctggtgggttgatttttagtgattggaatgtcattgaaagttggtgggttgagtcccagtgtttggaatgccggagatttcattgtttggaatgccggagaattgagtcccagagattgaaatgctggtgggttgagtccaagtattggaatgctggtggcttgattttcagtgattggaatgtcattgaaagttggtgggttgagtcccagtgtttggaatgccggagatttgagtcccagtgtctggaatgccagagatttgagttccagtgattggaaagcctgagaattgagtcccagagattgaaatgctggtgggttgagtcccagtgtctggaatgccggagatttgagtcaccgagattgaaatgttggtgggttgagtcccagagattgaaatgctggtgggttgagtctcagagattggaatgccaatgaaagttggtgggttgagtcccagtgtttggaatgccggagattgccttacagagattgaaatgttggtgggttgagtcctcagcgacttgg

SEQ ID NO: 22156 - DNA, 1739 bp, Heterodera glycines
  unsure (1)..(1739): unsure at all n locations
aaatttgtgacagaattttcactaaaaaatgatcaaattttgtgatttttatcatttttctaatgagaaataagagttttggcgcgccgctgagaacagtttttcatcaaattaccaaattttgcgattntgggccattttctaagaaaaaataggagttttgggggcgcggcggtgccgataggcgccgccggggggaaaaaatggaaattttgatcatttataaacagtttttcactgaaaattagccaatttataggtaaaattttgaaaaattttatgggaatttaatccaattcttaggggtgtaaaagtcgcatttcgcgccaaaaagcgaaatgcgaaaagcgaaatgcgaaacgccaaaaaatgcgaataatgcgaaaggcgaaatgcgaaaagcgaaacctcggcccatccctggagtgtttgtcgtgcaaatagcgcagtgttaaagcgctcactgatgctttctttatcatgcgggttcagtcccgctcgtacgcagtttttttaaattattttatttttcaaaaaattttaaaatttctgtctctttcaattgtttttatctcagtttaatatcaaaattaattaatttactcaaattgaacaatttattttaaacatataattcattactaaatattaaattttgtagcaattttttaatctttttataaattataaaatttattgttgatcatttgcatgcgaatataatttttaaattaaaaaataaattgggcaatttttagaccatttcttgttaatttatcatctatagtaactaccatttaattcttttaaaagtgataaaataatcatttattcgaaattcaatcttttagcaatttaaattcattttcacatcattttaaataaaatctagcgttttaaaacaaattttgctgacagattgtccactgatagattgccgggagccatcaaaaatattgaattaccgaacgaattatatatacccttttagattttgtctgaattataaagttatttatattttctgggtcggataaccattttctaacattttccttccgagccatattccagggaatcaattttagatcaaaaagttgaaaatgtttggttttctcaatcctgagttaatggctcgaaagtgatcattgaggatcactgaccgaaataaccttccaacctgtatttttgatcactgatcaaaaaggatgttttttttaataatcggaacccgtttttcccatggtttgatcactgatcagaatctgtggtttcgattactggtttgaacacttttgtcatagtggttttgttgttcgtgatcagaatccacagtttgttactaatgattggaacccatcttgaccggatcattgaccaatagggctttgtttttaggcaaatgtctaaaatttctgcgaaaaaccaataaaaatatataaaaacatataaatccgttctctgatcataaggcataatacaaaaaagaacaatttttatgagcacgtcaataatttcataattcaaattgatcgacccatcgcttctccagaattcattcattcacttctactgatcagtgatcactcgggccgagcgttgcgtcaataaacccaaaaataaaaacgcaaaaaattgaatttttgaataagacattcactgaccgatcgccgatttcgttctcatcataaatttcaatgtcaattttgttccactgataacaaattcgccaataaaaa

SEQ ID NO: 22157 - DNA, 1946 bp, Heterodera glycines
ggggcgaattgatcagcgtctgggccaaaaaagtgatcgcaatagaagatatggccaaaaaagtgatgacatcggaaagaaagagccaaaaagtgatcgctaaagaagacaggaccgacaattgattcggtcggagtcagctaatggcggcagagccaaaaaagatcggccagtgatttctccaagttataaacaattttcaaagaatgaggatgtattttagccaatataaaaattaaaataaataagctaatttttagtgtggagctttttcttttattttctttttaattattttttatttaaatcaatatttttaatatttgtaccaatttcctaatcattatttttagcctatcaaaacattaagtagaaaatgaaatttgttctcctcccattgtctctcttctgctgcttcgcttttccgtgcatttgctacggtaattttaaaactttaaataattaaaatataaatttatttcacagggattcattgcaaagttggaatgtacgacacattgggcaatgctgcgattgttatttctgaatgctggatggaccagcacttctgttcggccatcggttgcgcaatcggtgggccacaattacttaatcaacataatttgattatataattgccacgttttaggcactgatcagatcacagttgtgtgggcttgtgagcagcaaaatgaccccaaagtgctcgtcaaaagaacatcattcaaaaactatacgtgctttgcaaagattggccagaagggtgccaacatgtccaatgaagagtttgctttccccgagttggccgaattggtcaaatgaatggtaattagccaaaaaaatagttattaaattaaaattagaaaatttccagttttatcgacagaaagtgcgaatgattgtccaacggatgtttagtcattttctaaccgtcttaaaatttatgatccaaaaaaatttgatcgaattcttctaatgtattgtatttgatagaataataaagtgttctttgacgtcgttccatttgaatttgaaaattttcggaagcgaacaaatacctaaaaataaatgggacactgaccatagaaattgcgctccaagtgcagctcgaagccgctgacccgtgcgattgggtaggacaggttcagcgacgggctgggccgtccgccggctttcacgcggcccaattgggaagccaaagcgtccttttttaattttgcattggcattatgaaaattgtgccaaaatgtggcccaaacccgtaaatagttgatggccatgtttgcctcgcagaacgggccacaaatgtccgagtagcgaatggacttaaaattggtggaataaatgggggaaaaataaaaataaattcttggaaaatttaaagttagggataattatgggattttggaattttactttatttccgagtaattgtataacttcgagatttggtcatcattccgctcaaaaagttttcggaaaattcttagagcttagagatcccggaaatatgcatttttggttatggccaatgcaaaagcctgcctaatttactaaagaaaacgggctcggaatcgggatatggattagtcatagtttatttttaatttaaaaaattagcctattcaaagaaaatccaattttgctggatttcggggcccatggctttagaaaaactttaaaaacgcggactaatttacattaaaattctaccaaattttttgaggtttgggcctttggcatttgggtgaaatttaatttgtcatattttggcactttttaactgctttttcacctgtcccccaacggtggcggaaatgttccggcgcaaaaagtcgtgcatccgaacgcattcgtccagccagcggagccggtgcatgctgtgccggtcgcgcgctcgcagcataagggtggtcagcaggggatcgcctggggcattttgtgta

SEQ ID NO: 22158 - DNA, 1079 bp, Heterodera glycines
aataaaaattaccagctattgaaatgcagtgggcaagcacagcgagtcgcttaaatgcacacctttgacacgtaaaatattccaaaaaaagagatagtgattttttctggattagaccggagaaataaaaattaccagctatttgaaatgcagtgggcaagcacagcgagtcgcttaaatgcacaccctttgacacgtaaaatattccaaaaaaagagatagtgattttttctggattaggccggagaaataaaaattaccagctatttgaaatgcagtgggcaagcacagcgagtcgcttaaatgcacaccctttgacacgtaaaatattccaaaaaaagagatagtgattttttctggattaggccggagaaataaaaattaccagctatttgaaatgcagtgggcaagcacagcgagtcgcttaaatgcacaccctttgacacgtaaaatattccaaaaaaagagatagtgattttttctggattaggccggagaaataaaaattaccagctatttgaaatgcagtgggcaagcacagcgagtcgcttaaatgcacaccctttgacacgtaaaatattccaaaaaaagagatagtgattttttctggattaggccggagaaataaaaattaccagctatttgaaatgcagtgggcaagcacagcgagtcgcttaaatgcacaccctttgacacgtaaaatattccaaaaaaagagatagtgattttttctggattaggccggagaaataaaaattaccagctatttgaaatgcagtgggcaagcacagcgagtcgcttaaatgcacaccctttgacacgtaaaatattccaaaaaaagagatagtgattttttctggattaggccggagaaataaaaattaccagctatttgaaatgcagtgggcaagcacagcgagtcgcttaaatgcacaccctttgacacgtaaaatattccaaaaaaagagatagtgattttttctggattaggccggagaaataaatattaccagctatttgaaatgcagtgggcaagcacagcaaaggctaaatcaccccttgacacgtaaaatattcca

SEQ ID NO: 22159 - DNA, 2104 bp, Heterodera glycines
cccttgcatatttttatcaatcaaatttatttgttagctgtcacattcatcggacggtgttgaaacatgtcttgaacaatgggatcacttcttctccgcccaattcgtctccatgtacacgtccagcttgttcgggctacagtactgcctaccgttggccgtcctgttgatcacctacaccgcaattggctgcaaaatgtggaacagtggcaaagtgccgggcggcgattgttacatacaggcgcgcactagccacaagatgtacgaaaaggtacggtaaaattgtgcccaaataattatgataggtagtattcattacatacagtatgaaaaaattcagtacatacaaaaatacagtaaccgactttcaagctaaaaattgtacaaaagatacagaccatcccaaatagtcatgaatttaatttacacatattatagtattctcaataaaaaaactttagaggaaggcatactgtagatatgataatataacataaaaaacacaactattacagtacaacttaacagcaaacagtaaaacataattccatatttttattattctaattaactaaacagctgttaattacaggactcgaccgcaaccccaacaagcggacgatgctcaaaggcacgtgtgctcagcattgaaggcagtccgcatactgtagatgctacagtagcgcgacgacgaagttcagcccaacgggcaaatgttgttcaacaggacaggaaggagtctgtcaaaaaggtggagattgatcagcaggctaaattgtgatggggctttaaattgtgatcggaagaagccaatttttggaaaacgaacatacagtaattttttgtaaattttagctgatcccaatggtactgttggtcagtgcactgtacgccgtctgttggctgccccaaaatttgttgatgaacatttttgttacgtacgacccgtccattctctctcatccgtacattctgtacatttggtgagttttcaaagatcattacagtactctgttctattgtcacctaatatttactggcatacagtatataagtaccgtattcaatttttttttgttttcaggtggggcagccattcccttgcaatgttccattctgcggtcaacccattcgtgtactatgtgacaaatcggcgcattcacgcagcagtgaaggtaccatattcacattctgtacagtacctcatataattatgatcgatactgtactaaaaattacacaactttttatctgtactgtgatacaaaattaaaaaaaaaatctaaggcactaacttggtactgtatgcggtacggtcggtactcgaattctttctcccattgaattatatgatagcaaattaagtctaattatttcctcaaatttacagcacttgctccgctggatgccatgctttcggaatgcgcgaaatttggcactggccgagtttgatgtgaagaagcggcttgcctcctccttccgctacacatccgcggatcaccaacagcagcgccggacaacactgtacaagaccgtatcgaacagtttacattaggcgcaattttgatggcattttgttcaaatgtgatcactgatcagccccggggtatatgtagacaaaaacttaatttatctgattttttgctcataaaatattgttttttcgttttgtgttcgactaattttaggtgtactttagaagtggtcccgttaaaaaaacgcccaaaacgtgttccaatcaatctctaaggacctctaatcatcgtaaaaaatattgccgaggtgcggaaaaatcaaaaaaccggtttttgagccggtttaaatcacgaaaaattgcaccaaaaatcagccaaaaacccatttaaattaaaaatttccaaacaaatttggtatcattcgaaagctcttgacgagctaagtctaaaaatttgggatggagttaagacgaggccacctgagcactggggcaactgagtgtcccaatgaaaatggacacttaagtaacaaagaaataaaggatgaacaaaaataatttgataagctaactttcgcaaaagggagcatgcgaagacggagcaagtataaagagagacggagggcggag

SEQ ID NO: 22160 - DNA, 2521 bp, Heterodera glycines
ctattaaggtttgggtctgtctgaatttctactccccatatattctcgtcaaatttattttttggcatactgttaaaactttggggacacaaattcaccatggacaatacaggggaatgtgaatgataatgaagaaaagcagcggcgctttacatgaaaatttaagccccatttgccatgcctttgaccgtttgttccgtctcaaaatttaatccccctccttcctctttaaaaaaaggccagcgccatttttcttgtccattctttacccgttttaatcccaacgaccaagccatttagggcacaaattttaataagcgaaaatgccatcgtattagggaaggaagaagaaatgaaaacaaaagtgacgtgccgccacacttggcaacgtaaaggcacaaaaatcgttgtacgatacggcggatgaaagataaagtccccgccggaaacattatcgcaacttcggcacttttgtgccgatgccacccatcaaccaccacttgtttattagtagggtcattagttttttaattgaaatttaaaaccaaaaatggcgatctaactgaaaccgacatcacccacctttttcaatggtggcctctgcagtgtcaacgacggcatcggtgccatcgatgacgtcgacgaatgttgtcccgttttttgtggtttcgttgatgcgcccgtagttgtcgtgcaaatgctgctgctgctggacatggtcgaggacagtgtcagcgcgtcaatcagcggagactcgttgctgcccgtgctgttggtgtcgccggcgatgattgtgccaaagttgaaaatgcggcgccgcgtgcgtggcacagtggcccagcatggactgttcgcgctgttgttggtgttgttgtactgctccgacttgtcggccgcagtcgactccttggcgcgcagtgacgacgacgacccgttcaacagcaaatagtcagcggcagcgcccggcgacgcaacgcccgagtccacggaggtggccggagacgaagcggcaaccgtcacggccccttcggcaactggcgatggtttgaatggcggcattgttgctgtagctccgtcgtcttcccttccatcgttggtcgacgggggaggcaccacaaagtcggcggttttgccattgatgttctaaattttgaaaaaaaatttcggattaatcccatccccatcatcatttgattactttctcgtcgtccttttctgacgcaacagttggcggtgccaaaggtgaaggcggcgcgagcagttcagccgcagctattgcagccgaagcggcggcggaatcgtccccaccggcgcgtccattgttggcaccaccgccaccatcatctccatgcctgttgttgttggcattcgctgctgctgatgtcgccgtcgtcaacacgctcaacgaggacagtgaccttggcaacaatgccgtcgtcattggagtgccggttccgcggtcgctgcagaattttggggagtcgccgttgccaaatgccgcaggcggcaccgcgttgggcgtcggcgatacggtgaaacgcgagatggcgccagtgatggcattacccgcagaagagggagcagtgacggcagcagagcgaggcttggtgaagagatcgatgggagacgaacgagcggaaccctttgggaaaaatgggtaaagcaaatgcaaagacagaatttcggaaatttattttctgtttttggcatgcaacccaaatttgcaacataaaaaataccaaaccgtttcgaaacagaccaaaaagaaaattttttaggaaatgtcaaaaacttagcgacgaaaaatttcctgcgcaccgaaaattggatgtgtactgagtcggcggcgcggaacagaatgcacaacggcgaccgcttggcggtggcgctgttcaacgacgccgcagcggcagccattttcagcgaccggtccaactcggcacgcaacagttcaacccgttggatgcgctccacgatggcaccaccgccaatggcactttgggaagaggatgacgaagaggtggtggacgaagaggacatgatcattttgagaataagtcaaaggttatatgggggaatgaatatgtgttgtacttctaatttatatgctaacctgaaaatggagaaaacattgaaaatggcattttttggaaaattggggaaatgaaatttaacaatggcaataaaaatgtaaatgaaacgcattgaaacaggcgttgttttaaggggtaagtgcaagtaataaaatatttagcactttccaatgcaatggaaatgtttagaaaatgtggaaaggcgtggaattttccaaaaaaatgacaatttttttttgtgtttaatttggaatggaaaaaatgcgcttaagcgtgggaggaggggatgggatgggacaaaaatatgtatgtacctaaactcggataaaacaaataaatttgtgttacagagatcatccgacaattgggggggggggggagagaatgaggaaaaatgaaaaatgggtgtcatcacacgactgaccact

SEQ ID NO: 22161 - DNA, 700 bp, Heterodera glycines
  unsure (1)..(700): unsure at all n locations
gaagcattttccgaagaaaacataacattctcttattactcacaaaacaaaagggaaaagcccattttaggagaagttaagcaaacaaaagggggggggggaggacaanaanngnggacaaacgcncagagaaaagggagggaagggcatcggacagggaaacaaacggaacggcacacggaaagaggggaacggcancagtcccaagggatggcatccgatcttcctcatccctcaaacagactcccatctaatgcatttccgcaggatctgctgctccccctttttgcccccgcccgcacaattccatgccaatttcggtgttgcctatcctatcttcgtccattttaatttcattatccctttgaggcttcccccccccccccccctctaaactctcattcattcatccatcttattcgtctctttcctccttctcctcctcacatcccacccattccattcaccttattttctcaactgggtgccgtggtattaatttgccgaaattaaaagcaaagcaaggaaagtgttgttttttgaaaaatggaaatttaaacgcgggagagtgaaagtgagtgaggggggnagggggggagggggaggtgagtcgaaaaaatacttacttattctaaattttacaatttaactctggacctgatcaaaattttctacatactgtattaaaatctttgtttta

SEQ ID NO: 22162 - DNA, 398 bp, Heterodera glycines
  unsure (1)..(398): unsure at all n locations
ggggggggggtgccaattggaatttgtcggaggaattgaaatggcacccgatggatgggtggtagggccaacccatccataagtcatattctcgcgtaaattgccgagtcgactgacgttccctttttggttaaatggtagcgcaaacattgattggccactcgctgttttcccaattcgtcattgtctaaattggtcaatgaatgaatgagtgcctttctctgccttttgattcccgcccccttttttgttgtgccttcgtcccatttcaatgccattgatttgctttccccccccntccgtccccaatgatttgtgccctcttttcagcttcgttcctcttcaccgaagacaagatcagtccctgtntcttcttcactccattcactggacctgca

SEQ ID NO: 22163 - DNA, 1660 bp, Heterodera glycines
tagcaaaaaatttcataatttccatcatcaaattgtaataataaacaaaaatttattgccaattgaaaatgaaatcatttattttattagttttaatattatttttaatcattatatttgatcaagatgaatcattgaagaaaaagttgcaagaaaagtcttttgatgaaatatttggagaaaaatggcaagaaaaagaagaacaacaacgaaatgaggagaaaataagagaaataatcagaaaattttataaaataaaagagaaaaataaaggaaaaaggaagaaaatattcagcaaaagaatggaataaaactgatggaaaaatagcgaaaaaattggggacaaatcgaagtaaaatttaccagtggatatcctccctttcctatgctggggatgctgggatagcacataggagaaggcgcgcgtcggcgccttacagtaggagaccggtgctggtgatgtgcgttatcctatggtgttgtactgtaaagtgacgcgatgtcctcttctgatacaacagaactttttgtaacccgatacctaaatactataattttttttttgccgatatttccattagtattttataattaataaaaatgttttattaagcaattttataaaaatggaaagaggatgaaataaatattatcatcaatttgttgtttttttcttcacaatgtgtccatgtttggctatgtgtcacaatttattttttgctatttggtccttgttcattatgctagttaattaaattattaattaaaataaaatagttttttaaataaaagcgagcacctgagacatccgttgcaattatcgcaattgtcagtgaattgttattttcatttttgccgcattttcgtccatattttgggaaagaaatatttttattaattaattatttaaaaattttgattgaaataattttttaattttatttttaattttttttcattaccaaattatttcttcaatttcctaattatatcataaattaggcaaattttcttgctaatttcggcgagatcagaaatggcacacttattaattaggctcattagatcctttaccttgacactaaaaatgagttggacagcatttacgcacctttgacaccgactcttccgacagatttgaagttgatgacgaaatacgattaattttttcaaaaaaatatgtttatcttgagaaaatgaataaaatatttgaaatatttaaacataaattgtcctgtttttgcacatttttgtcatggttttggtcaatgcaaagcttttcattttttaatggatcaaagattagcgtttctattattttcgtgaacagcaacatttttcatgataaaatattaatttgccattttacacaaattttctgatataatgaaatttcataaaatctctttaatttttctaaaatctctttacattgtgaatttattttatttttattgaaaatatgtttattattttcgaatgagctccagtagaaagtaataaaattttatttaatcattaatttaccaattgccaattattttgtcattaagataaaattattattattatttctttgcaattaaacaggatttccttattttattaagtaaaataatgatttattcagttttgtaatcagaaaaaaaatcatttaaat

SEQ ID NO: 22164 - DNA, 1550 bp, Heterodera glycines
  unsure (1)..(1550): unsure at all n locations
gtccatgaggggcaatttggcactcttttttccgatttttttccttcccaaatatggcagggtgggatccgcaactgacggaataaattaaaaaatatcatttccggatattttgccgtcagcagtgttgaccggtattgttgatgccataaatctgacggtccaacacgatggaaatagctgcgggtacttcgtgtgcctgtatgccgaatcctggcttatgaacaatcgcacatttgttctgcctgatttatccatcaattatgaaaaaaagcgcattttatggcacattaacgagctgtatggctctgataatgtgccatatcatccaagggaaggggtgccaactccttgcccaattgtctatcggcatacggatgaagcgcagtcgacatccaaggccgctgagctaatggaagttgatgaacatgatgatataatgatcatcgaaccacagacaagtggacaggcagttggtgccattctcacccaagctcaagtggccggtgaaaaccaagctgacacgcttggtttggtgtcggagtcttgcatcccgcaagagccaattgcgcaggcagatgatgtaattttcatcagacctaagacgccaccaaggcgatcactgcgcgtgcaaaaaaggctttcagcttctgttagccgttcgccttcaccggcgccaaaacgacccccgccagcaaattcgctgggaatggcaacgccgatcacacggcgttgctctgcatttcacaaggggtggcaatgcgctgcagcagcagccaaacatttcccggaatattgtgactccgggaaactcggtgacaaaaaatgcgccgattgcggtgcacatctcttctcacatgaagacagtaacatttgctgccggaagggaagagttgtgctgccaatgcttaacccgcatcctgatgagctcaaagagctgattgtggggaataagcaatcccgtgaagggaaagaatttgtgcgacacatgtcgcgttataacaacctgttccaatttgcgagcgtttccgctggcaacaaaccaagccctgctggcggtccgatggccgttattcttaacggagaattccatcgccgcataagcagcatgcaggctggtacaactcagattcctggctttggccagttgtacattctggacccagtcgaggctatggaacagcgtcgaaacaaccccaggtttactggggagaaaatcacaaacgaagatgagtttgtgcagggtcaccagctaaatgagcagactcttgagatcttagaaaaaatgatccaagtgcatcatcctgctgtgcaggcatataagcaggcgcgtgagcagctcactgagcttctccaacaacaaaatcaggaagagcttcgtttcttccgcatgactttgttggatagccgcagggctccagctggtcttanagacccaaaattgcacccacaccaaataatcaccccttctacgggtgaagggatgttcgctattcatgcggaccccactggtgctcctccgccccaagaatttgngtagagaacaaaca

SEQ ID NO: 22165 - DNA, 2309 bp, Heterodera glycines
atgcaaatatggtatcattggaaattcctatcattgctatccaatgggatgctacttatctgttgaaattggaatatgacaattttatacgcaattatttttttcaaagcatgatgggacaacacttatgaccatgactgtatgtcctgaatttgaaaaaaaaaacttggtcaacctgaatatacatatacttctgaacaattctaatgctaaaaaacaggtactcacgcgaaaactgaataaaaattttgtatttggtaaattttgtccaaaaatttttacgttggaaaattaccggtttttaccggtaccggtaccggtaccggttgaaaaagttggtaccggtaccggtaccggtttttgcagtaccggtcagtaccggtaccggtttttttgcaattaccgattaccgctcaactctaaatataagttgtggcaaaaagagtaattattttcatacaactttttaaagataaccaaatttgttaattttttgcaggctaatagagaaaaagcttggctatcgaatgatggatgctaagaatgtaaaatgtgattgcctttaagcaaagttatgccatgtttggtcgaaaaattagctaaaatggcggattttacgaaaagacctagcaccttttcaagttaccgggcacggaaccggtttcgggttggtaaatatttaaattctcacgaagtgattaatctcgacggtaaattcggatgagcctattttttaaagaaaatttaattttatgctattgaataaaaacaatatgaacatctaatttccatttgttatcactagggtcgcaacttttagtgaaaaaactttttttttgctcaattgttttgaagaaaggagctcaaaaaacgtatttctgcgttgcgttaaaattttttcatttggacgtcacttttcgtcactagaaatcactattttggcgttttgtcactattttttcactatttcgacattttttggaaatttgaataaatttaaatttcttattcaaaataagcaaaaaaagcgtaaattttttttgggcagatatttagctaataatgacttaatttttgctttatcttgttttttttcttctaaaatgctttttaacaccatatttagacatttttgaaagttttattttaatttaacgaatttgaagaaattttgagaaagtttttttttcatatttttgcacttttatgtccatatttcgcgattttttgtccatatttatggccatatttcatgattttatatccatataattacgaaccttattgattacatttaaacaaataaagtcaaaccttttttaaagaaaatttaggttacttactagcatttacaaattctttttcaaaagaaaattctttaattaaattgcgaaatagatatttgtaatgaatgaaataattcattaattgtccgatcactttcatttttcaccattcattctttgtttgcattacttaaccacataatatgagtagtggagtcgcttaatgatgaatgattatgatgagatggccaaacaaataatttgtataaattttcggctagaatcaattacaatacaaaacaaacaaaaattgcccaaaaatggaaaattgtcgattttatttgtgcgcgaaaattgctttgtggacaaaaagcgcgcgacaggaaaatccgacaaaaaaaaattatttatttgtccattaccgcaattatcagcagacagcaaagcactatataaattggtgaatgtgcggtaaaattaatcaaaaaataaattcaattaattaattaactaattaattttgtctcgaaaatggcaagaaaattcatcggattgttgttggtgctgaagcttgtgcatgcccagtgggacggtggcatgaacggtggtgcaccgatgggcggcggaatgggtggaggaggtaaaataattaattgatttaaataaaataaaaatatagttttaaattcagtccctcttttttttttattaaattggtcatttcaaagtttatgcttttaaaaaattttttaggcttattattaataagatctaattaattaatttttataaaaaatgtgaatttttttttttttggtcaaattcatagattcaaaatattttatcctttaggaataaataaataattttttattaaaggaatgggcggcggaatgagtcccggcggcatggatggtggtggcatgggtggcggtgagatgacgccgatgtccggcggtggcggtggcatggacggtgggatgggcggtggtggaggcggtggcatgatgggcggtggcggtg

SEQ ID NO: 22166 - DNA, 1874 bp, Heterodera glycines
agcggcacaggttggttaaacaattgtaaaaacaaattaaaagttttttaaatggttaggattgtctcaccgagtctcagaaagcgcttgaggatttggacaaagtgcagacggacttgacaacttaaatgaaccagccagcgacgaaaatataaaagtcgagcagaaatacaatcagatgcgaaagcccttcttcgaaaaacggacacacttcatcaaacagataccaaatttggggtgacagtggtgagtcactacgagcaattgcccattttataatgcattttgtcagttcataaaccatccacaaatcagcaatatcctcgaggaagaagaggaagaatgcttgcactatttgacgaaagtcgaggttatcaagcccaaaacattaaatttattactttcatttcaagattgaggaaaatgaagacatcaaggccggttataagttgaaagtaattaagggacagacgctgaaaagttggaccatcaaaacaaataaattctttcatttagttttctttcgacccaaatccattcttcgagaattctgaaatagtcaaagaattcaattggactgcagcagaaccgaacagtgtgacaactgaaatcaaatggaagcaaggaaaaaataaagtaagtattttcttgaaaattggctaaaaataacaaatgttcatttttggacaaaacttgtcagaaattactcaaatttcaaaatttttcctggctcggactcccaggtggggggatatttcgtaaataaattttgaccacccccttgtccgttataatccctaatgaattttgaaatttagaatctgggtttacttttgactcatccggttacacccctgacgtgtaccaccccaactttgagaatttaatcatatattcttttaatttgcgcttcgaaagttttcttacaaatcatttacattttcagttggctaatgggactggaagcgaggaacaaaccttcttcaagtggctttgccagaacattgaacccgtttctgatgaaattgccgaggcaatgaccaaatgctccttttgctttgttactcaatttccttatgaaggtgatcaaagacgacatttggccaaatccgctgcaatattttcttgcgcctgacgtggaagcactcgacgatgaagaaaatgaggaggaggacgatggtggggatgaggaggaggaagaggagaaggaaggggagggccaatgaagaggaacgaagtcccttcccaggagaaggccagcaacggataaatccatccaaattgcattttgttcaattatttattcgttctcataattaccctttgttatgattttcctattattacaaggataccttctcacaatggcatttttaatttgttgtctaaaattaataaactttttcgctttttaatgcatgaaaaagacaattttgcacttattccttattaatggagcacggggatttactctgatgggcggtttgtccattctttggccatggtattcgaaacgggccagttgcgtctgagccaagtttagagcatcataacttttttctttgttgaccaaatccaacaaaattggtatcattcgaagctcttaacaagctctatcggcttcctaaaaatcacaaagatacataggtatactgacatataaaaaagataaattaaaatatgcaaaaattctgactttttggcagtgttcatgtttcaacttttttataagttgttcaatcgcttagaaataacttatcaaaagcttctaaacatgtagagctttcgaatgataccaaatttataaaatttggccagcctgaaaaaaagttatgatgtattaagcttggctcagacgcaactaacccctaccg

SEQ ID NO: 22167 - DNA, 1268 bp, Heterodera glycines
  unsure (1)..(1268): unsure at all n locations
cgagccagtcgattttatcattcataatcctataatacaagcgtactacctagcgggggatgcgcngaagncgctgacnccngctagttccttaataattcttttttgatcagttggcgaaatgtcagttggcgaaatgaatgttttggctgagttggcgaaatgaatgtttttggctagagaccggaaatttcaaatttgcggatcctgttgcaggattggaattcaaaattttttacaggacaggatccggcaggattaatcctgcaaatcctgcaatcctgcatttaaaatctgcaggatcctgcgcaggattgcggattttatgaaatttcaaaaaattctgtattaataaaaaagtctttcaaagtaaaaaaagtattcaaatatatttttaaaccaaaaaatgatgaagatgaaaaattaataagttttttgcttacactccaagcaattgactgaatcttctttaatgcgtttaaaaagaccgatttgccaaattgggtagctcataataatagcttaaattaaagtaaaataatttttatttaaatttctttgcaaaaaagccataatccattatgtatagggatgggctttttaggcacaaaaaatcgcgaaataggcacttaaaaaggcagaaaaatcctaaaataggcacgaaaatagtaaaaaaaaatttattaacgctttttaggtagcaaaacacataaaaaattcaattgtataaacttttttcgaataaggataagtttttaaacgaaaaatttttattaagaaaaaaatttttgaaaaaagaaagtttctgaatatttggcattctatttttaaaaattttcaaaaaatcaatgcaggatcctgctgaatcctgcataaatcaaatttgcgggtcctgttgcaggattggaattcaaaattttttacaggacaggatccggcaggattaatcctgcaaatcctgtaaatcctgtattttcaaaaatatgcaggattgcggactgtgatcctgcaaaatcctgcgcaggatcctgtcctgcgccggtctctaccaagcactaactaaccaaattgggcagaatgcgctgagcaaacggtcaagcccaatcacaaggatcagtgaataaatatagaaatttgccaccaatggcacactttggatgacaaagcattggaagagtgatggacgaaaattgggcagaatgaagacgagaagcggggtgatgggactcagataggcaagcatcacgcagactgcgtggccgcgatca

SEQ ID NO: 22168 - DNA, 1254 bp, Heterodera glycines
gagttattagtgcccatttctaggcttttatttttagcgcctaaaaaacctaaaaaattttgaaagagcctatttttgcctattttggcgttttgccgaaaatttgttaacaaaaatgcaataaaaacaaaaaaatacacccctaagcagagattcaaaaatttctgaaaataaatccgctaagaaatgaacatcttctcaaaaatcgtgtttaaaaattttttttggacaattttttgaatttaaaaaataataatgtaactcaatactgatttgacttattttatttttttttattttacacccctaaatttgagactttttagagcctattttccattttttggagcttattttgggggttttttagagcctaaagcctacctattttagcggtttttaatgcctataaattggagcactattatgtacatatatatcggctcccggtaaattggacaccagaaaattgcacactagaatactggacaccaatggaaaattagacaccggaaaattggacactatttgataaaaatacatcccagtcacaacaaaaaggaacttcaagttttatggctctgaacttgagctcccagtcacaaggaatgatgatgtgccttcaggattggttacctccgtcggctcgacttttaagtgcaatgaatggtgcacctacttcctcccttttaatggccccttgatgaatgatgatgatgggatacgccgtggcggggattgtgaatgaataataaaatccgctacgccaggagggatcgaacttgaagttcctttttgttgtgactgggatatagtccacttggccgagtggatacatcccagttacaacagaaagaattggatattgataatgacttcgaggaactacaacaaaatgaatttgtccgtcctgtaatttcaccccagcccgaaaatctgccagccaaacgacgaatgtcattttttgaacgtctgaaaaatattacaggcgcgaacacaaataaacagggtgcttttttgtctcttaaaattaattttataataaattttaggcctccaaacatcgcaagacgatgacattgaaaaaaattaaagaatttctttcgatggaaattgcgaacccaaaagcaaatccgcttgatgaatggaaggaaattgctccgcgatttaaaatccttgcaaaatttgtggaaaaatatctctcagcacccaccaccagtgtcccgagtgaacaaacattcaaagtcgctcgtg

SEQ ID NO: 22169 - DNA, 1506 bp, Heterodera glycines
  unsure (1)..(1506): unsure at all n locations
atgtttagaagctttttctaagctactgcttctcgactatacaattatcaaaaaagttatacactgaaaattgcaaaaagtcgaaatttttgaagttttttcttaataaaattttttctaggcttgaaaatcctttcgatttggtaaggctaatagagcatgttaagagctttcgaatgataccaagattgttggatttggatgccaaagaaaaaagctttcgtggaaaaacatgctggcgcccaaacgagcgcgcccaaacgtgagcgcccaaacgcgcgcgcccaaacgggtgggtcccattcgaacctgggaccccccattttttaactaactcacagaccactaagacgaaaaatccaacttaattgtacttggagcccaaaattgaatcgccgtgaatagagatcgattccgatctgccgggccgaactgacattttcaaaaacgaccggtttccgggtccggtctctcaaaaagcggtcaaatttgatttttccaaaaatcaccggtctggtttccgggcccggctcggtttttatttttagtgcctattttagcagattttttagagcctaaaaattggatccctaataatagtatgccgtctaccgctattccaactgcgaccattctatttttccaagatgaaatagataaagaaccgaaaaaccgtgactttagcagagttaaagatgatgcattctgggcttttttacgtggatatcatccgctggacagtcttcgaaaagtacgttagcttagggctctatctccaaagtcccgaattgaaaaagaagggaccgagtttggcatcaggccggtataggattaccggaattcaaagcccgattttaaatttaggtaaataattattggaaattttcacaattttgaaaaaaagcccagtcgaaattttgacctggcccgggatgtccggtaaaacgggctttttttgaacgggcggaccggtcaactgtcaaagcccggtccgggtactttcaaaattccggtctctaataggtatgatattgccctttgccttcaaaaataataaccttcagcggagattggaacaaatcatcgatctgattcaagaatatggtgtgagtaggccacgagatgtgggcaagtcaattttgcttaacacgctcaatgaatgttaccgcaggatttatcacattaatttgtttaatggaaaaatggtgagagtttcatattaatttctattaatcaacactaaaccctttttccagttaactgcaatttttgggacccaaactggcaacaaagatctcgacgtgttcaatttcatacggaaatggtgtggcgcaatttttcgagcagaacagcaaagcggccattcgatcataagttatgtgcttgaggattatcctggtgaagcaaaggatatttttgtaagattttacataaaatanaagcagaattgtcattcattttttcatctttaaggtttcatcccgtcctatttatcactgcgatata

SEQ ID NO: 22170 - DNA, 1130 bp, Heterodera glycines
tatttttctttttacaattacgccagctaaatttgacaataaggcagacaacattttttatatcaaactatgtagtagtgtgccgtcagttctgaacgcatctgaccccaaacttacaagtaaagacattaaatatactgtccccataaatttatgaattattttaaagctcattttattttaacgagtcggattgcacaagtcaatgctggttggtttctttattacgttcaccgcgaatttttcgcatatggtccaaatctatggcgatttccaacaattatccttaaccaaataaatcctttcgttctgttctaaaaaggcccgttactttaattttgtatcccggtaatatttcgtatttttctttttacaattacgccagctaaatttgaaaaaaggcagacaacattttttatattaaactatgtagtagtgtgccgtcagttctgaacgcatctgaccccaaacttacaagtaaagacattaaatatactgtccccataaatttatgcaattattttaaagctcattttattttaacgagtcggattgcacaagtcaatgctggttggtttctttattacgttcaccgcgaatttttcgcatatggtccaaatctatggcgatttccaacaattatccttaaccaaataaatcctttcgttctgttctaaaaaggcccgttactttaattttgtatcccggtaatatttcgtatttttctttttacaattacgccagctaaatttgaaaaaaggcagacaacattttttatattaaactatgtagtagtgtgccgtcagttctgaacgcatctgaccccaaacttacaagtaaagacattaaatatactgtccccataaatttatgcaattattttaaagctcattttattttaacgagtcggattgcacaagtcaatgctggttggtttctttattacgttcaccgcgaatttttcgcatatggtccaaatctatggcgatttccaacaattatccttaaccaaataaatcctttcgttctgttctaaaaagcccgttacttttattttgtatcccggtaatatttcgtatttttcttttacattacgccagctaaaatttgaaaaaggaagaaacattttt

SEQ ID NO: 22171 - DNA, 1934 bp, Heterodera glycines
gtagcctaattaaaattataaattttcgcatacttctgaccgaattgcgcgcaacttttaaaattcaaaatcgccgcataattagttactttttgcgcggatttcatatggattgtaataccgtagccaaaaattttgtaatccaaagagatgctttatacggtatcaagtcagtctagaaacacataagaaaaatggaattggtaaaataattttcaaaaaattcagctccccaataactgaatcgactcggaccggaccaaaatggcataagcatttaaatgggtaaaccgcaaaatgtcgccgccgaaatttaaaaaaaaaagttcgaacttagaaagttaaatttctgtttgaaaattaaaaaaaagagatttggcagcggcgaaattttgtctcctccccatttaaatttggcactaatttaaacgccaaacaaatggccgcgtcgctgcgaccttttccaccgccgcctcaagtttcctacggtacagctcgatcagcttgacgcgcttgtagttgtgcaggaatgtgatcgtttcgtccaactcctcctgctcagctgcatccacctcaaaaagtgccaaaaaatgacgaaatgccaaaaaaagttttgaatttatgctacaatagcggcgcacctcggcggcgctggcgccgttttggcgtgccaatcggcagccggcagcgccgcccgcgccgtggatcggcactagcgagaaggagcgtttcttgcgcaacaccatccggcgccggagcggtgatgtgccgctggtcgccgtcgcgagttcaagcggccattccggctccaaaaagcagccgcgtttggtgacgacgctcgtcgacggttgcgcgtcatccgcgactccgccgccaccacctgctgatggtgtgggttttacagaatgccaacatggcgcagcgccatgccaaccttcgatggagatgcgtggcaacggtggcgacagtcgcggccgatttgtcgcggacgcggtggtcgctggcgccgcagcaatcgccgctcgcggcgtctgcggcggcggaatttggaagatgcagtcgcttgtctgcgccagcagattgactaattgcaggcgctgtggcgagtcggcgcggcccagcggcggaggcgtcgacggtgaagcggcggacgacgacagtcgccgctgcgacgccggcgagaagtcgaacgcggcaccgtttagtagcggaaagagcatgcgacgatacggggcccggcattcgccgcagtcgttttgtagttccgcgtcagcgtccgtgtcgtagtcgccgccaccgttgccgcccatgacgagtggcggtcgcgacggtacgttccagcgcgggggacgccgcacttccgccgacccgcccggcgactgttgttggtgctcaaaactgaaggacgcgtgccgtacttccgcgctcggcgtggaccaggcgggcgtcagcaactgttgggaggagggcgtcaattggcgagtgtcgcaaacgccgccgcccgttgtcgcgttgccgccgacggtatcacagtcgcgtgtcaataacggcgtcgggtcgctgtacgccctcgggcgaccgacagcggcggcgagcggtcgcagcagtcgctgctgctggtgcagtcgctgaagtaaaagttgtcgccgttcggcgggcgaccgttgctgctgctgcatgttgcttgacgcgcaaacggtgccggcacgcttcaccttcttgaacgacttggagaagtcgagcagcgcgcgttccgggtcctcttgctggcgtcgcagacgccgcgcgttgcgcgcgacaacgccggttgggccgccgaagccgcgcgtctgttgttgttggtggggtctctgctgcaactcgatagccgcttcggccgatgcgtcaacgcgtgacgtagacgagtcgcagagagcgactcgtgtacgcccaaa

SEQ ID NO: 22172 - DNA, 1825 bp, Heterodera glycines
  unsure (1)..(1825): unsure at all n locations
tctagagtnncggtgaaatnntgaattggaaataaaatgccaaagcaaaaaaacggagcacggcattttacacagtatgaaatcaacccgtggatgaagcggggtacggtagtggacgaacggaaagcgatggaccaatggacgcaactcaaaagggccattgagggggagggagtcgaagtgagtaaaacgaaagcatagaaaggcacggggaaagcccaactgaatattgttgccccttttggtgctgacgctggaccaagtgaacggactgccggacatggtcttcgcctgcaacagcggtcagtccgcacagagacggcactttcgcaatgccaaaaagcgttaaatgaaccaatgaatgaattccaacaaactctttgccaggccttttctaccgcaataagctttacctttcccactttcgccacgctcaacgaatcggagagcagcggcacttcgccgacttttacaaagggctcggcttggagctgtacggcgccgattgcgcggaagtattcgaaggcggcggcgatgcgtttttctccgacgagcgaacgctttgggccggctggggagggccgaggacgaacagaaaggccgggcaaagccaacgaatgcatcgtgacgagggatttcggtcactttaggcctacgaacacatccgaaagatgggcgacttcgaaacagtgccctgcgaattggtcgacccgcgcttttaccatttggacacgtgcctttgcccggttggcattgactcggcggtaagttttttggcatttttcaattttatttcatttttcagctttggttccctcccgctttttctgagaacaccaaaaaagaagtgaaaatatttcgatattcattacttttacgcgttccaatttatttaattattccatttttaattaatttttaggttttttaatcccccccccccttcttttggtcctacggcgtttgccgcgggcgatcgcagtttcggagaaagaagcaatgacgtttgtgtgcaatgccatcacaatccgacgccgagtgatcagtccgaagggaattagcgaagaaacacatgcgaaattggcctctattggctatgcagtcaaagaattggaaatgggcgaatttatgaaagtggggagagggattttaaatggtggcgatttaatcttttagtccggtggtgcatgccaatgtttggtgatgaaattgtgaaataagggagttttagaaatcaacgaatctaacccagccacatgttgtcttaacaaaaaaattttcatttacttaaaataaaacgtaatatgtgcaccgccctgaagaaaacaatctatttgattggatagcaagcagatttaagcgcacaaaatcaaagatcataaaaggcaagcgccaagtggcaatcccaaaagttaaacaaaaattaagtttgaaagaataaataaaagttgtcgaaaggcatggatcaagattatgtcagatcaaatcaaaacaaattacccgagatcatcccatccttcatgcattaaagcgagtgtccgcgaaaatatgtccattgtagcagaggcgtctgttcaactgctggtagtcgatttgctggttctcggcgcgcgggatatattgtggagtgctgcaaaagcaagaaaaactcttaaaaggcagttaaataataccgcttcaattccccaaaattggcacgaccacgcttagccaattctttagcctgacgaacaggagttggcaaagccggagccagcgtaacaatttgccagctgcagcagagagcaagcaagaaactacaaaaaattnagttgtgtataatacc

SEQ ID NO: 22173 - DNA, 1663 bp, Heterodera glycines
agtcgatgacttattttccagatttttataaaatttaattatattttttctgggcatttcatggatttttactcttgtggacatttcgtggcttggacactttgtgggtcagcggtttgaatccgtttggtgtgtacaaattaaatacaaaagtggaaacaaagcaaatcaatcacaccctttgcttttttctcaaatcactcatcaaaatttgtgccttttgtgtcacatttctccaatttctcattccctgccaataattccttctgctgtttttcgatcacatttttcaactccctgaataaatttgattcttcgccacacaaatttgaaattaattgctccaaattttgcatttttaagtcattaaaaatgacaattttccgtgcatcattcccctcaaggctcaaaaattcttccaattcgcattctccatttaaatattgcacaattccttttgctgataagcgtttgtccggctttagttgaagcacattctgaacaaatttaagtgttttaaaaagggtctattccattttacgcgtccaatcaatgaccatccttagcttcttgtgccataatttttcttaattgatcaatgctaactttttgatatcaaacgaatgcttaaagtctgtcacaagaaaataacaacaaaaaaatgttgacattaagaaaaaagaatccgggattcagtattttttgagtatattaaagaatatttttttgtgtctgtttgctttaacccagaatttagctatattcagaaaatacacccctaagaattgaaaatttttctcaaaaattgattgccaaaatttaattttttttttcttgataaaaaattttaggtttaaaaattttccttattcgaaaaaaaaaatttaaaaaccatttaaatgaccaaaattaagttttttgattaagttttacgtgttttgctcactaaaaatacttaataaaaaatttttaaatgcctttttcatgcctttttcgggattttcgtgctttttcccaattttttatgcctattaaacatttgtgccttttttacgttctctaatcataagggaaacaaaaaaacacccttaaaacgaaaaatattgagtaggaattttggaaaaaattgtttataaaaaatgtaatttaattgagggaacaaaactataaaagaaacattcaaatttattatcagggaacggatttatatgtttttacatattttttttgcgcatatgccatcgcatgaaaagctcaaaaatagcatttttacctgttttcctttcaatcagagcgagtttttagcaacataaaaaacatattttgatagggtgactgaacatttgcgccccgaacatttgcgcccctacatttgcgcccctacatttgcgcccctacatttgcgcccctacatttgcgcccctacatttgcgccacgattgtgaataaaaaatttattcatgaaattgccttttccaagagctaacgggagtgatttaatggaatatgcatgattttgtccttgaaatataggacgcactaataatggcctataaggctttcactccagcttcaacaagcgattttcggctcctaatccacctttgccaacgtaatttaagataaaaataccaaaacaattaaaggtttattagtcgaatca

SEQ ID NO: 22174 - DNA, 1489 bp, Heterodera glycines
tggtaattttggatcattttggtgagcaagggttaattttggtgaatggtatggtaacctgttaggagtcgaagatttggtatcaccggcacgatattttggggtttttggaggagggacttcaccagcgatgcatcgtgcgatgtctgcatcaattgacttttctcatatcgaattgtgttgatgaagcggaaaacagttgatataaacaagcaaaagcccgttgagtgaaaaaaattagggtttactttgcctgaagctataaaaaggcggtgccaaactgaagtttcgctttgtttttattttctaattgggatattcatttatattgtagctaaacatagatattttaagtttttccttgtttataattgacaaaaaacattttaagagttatgggcaaaaacagcttgccagactaaccgacccttctgatctactggccagactaaaacggccagactaaactgacccggtccgtaaattggtcactcactcttctctcttttttacgcattttcaacgtgattttttcttgacaaatacaaaaaaatttaaaaatttccatttttaaactttggcactttttaaccctttaggcttcttaaaaccctatgaaattctgttctttgctgaatttccgccgttctcctcctcctccccctccgccaatgcttacaaattctgtccctattgatttacgcttttacattaattttaattcggctgaaatgtctttcgctttaatttaatttttcatttcccggctttttctccattattttgcccattcgctgtattttctttatttaacattctctccccccctttcgctgcccgcttttatccgcttttctgtccacactttgtctttctcttcttcgtcttcttcattttcgtgctttttcttctccgttttgttcatttgtccgcttcatcctcggcggggcttatccccccccccccaattttcgatctgtcgcccaggaaccacctattgtgatgctttgtcccaattgttcttccaatgcttccggtgacgaatacaatgaactaaattaaacgcaaaattccaaagttcggataaaaatcaaatgctttttgtaattgctcacccaatggaattagagtcactatcaagtgcaaaagtacacatagtgacaattgttgtcccaagtgtaatctttatgctggttcacctctttctccaccataattttactacgaatcattatccaatgatcataatcgctaaagcacaaaaagcgaatgtttgtctaaagaattgggcaaattacacaaccaaaaatgtcactgatccggtgaaatagtccgtgctgattgaatacgtaatccacaagtgcaaatcaatgcctcttgtatcaaaaatgtgcagatgtgaacgaagagaagcgttgacgaagagatcaatgtcgctgagaaaatggaaggaatgattttattgccataaaggtttgattattaatta

SEQ ID NO: 22175 - DNA, 2067 bp, Heterodera glycines
aaaataaccaaattttgcgcgcaaaccttatattccctccacgatagtgacattctgccataaaatttcaaaattttctatatatttaagaaataagaacaaaataagaacaatagcccgaaataaggacaaatcttacaaataaggacatttttattttgtaagatttggaccctccaaataaggacaaatcttataaataaggacagatccgagccctgtgctaaaacaaaagtctgaggaggaaaactaaacaattcacaaacactaaattaagaacaaaacgccaaataaatttaaaacataaatgaataacgtattatcatcagagtgctcagttttcagcacacaaaaaaacaccaattaagcactgtaaacagcaccaaatttttccaaaataagcatgaaaaaagcacaaaaaggcaacatcagcacaaaaaattggaaaaaacataaaattaagagattaaaggcaccaaaaattgaaaaaagtcgtcaaaaaaatgtttatttgctccctgattataaaaaacctccaaaataggtgcaaaaaatgctaatgagatacataattttaaaaaatcaaaaccttgtcaaaaaaataaataaataaattttggagatgaattatttttgataaaatttttcatttcttaggggtgtatttttcgtttttattgtttttgataataaattttttgaaatgctgaaaatattttaaaaaattgctcaaaatgatgaaacagcataaaaaagcaccaaaatgccaaatcagcacaaaaatcaaaaaatcgagaaatcagaaaaaaagtatgaaaaaagtcgactggaagcctaaaaccaagttagaaatgcgtttttcatgcttattatcacgccccaagttagcaaaaaaaaagcatatgttgcaaaatgagcactctaattatcattcccctaatattttataacatttgttagaggttcggatccgctcgacagatattgaattattttgattttcttcaactattattccatctagaatatttttattagagatcggaccggtcggttttttttcagttttttcggtatttttcggtttttgaccgaaaaaaaccgaccgagaaatttttgactttttaggtttttttcggttcggttttttaaccgaaaccgaccgaccgaaataatcaaaaaaccgaaacaaccgaccgacttttatgaaaaaccgaaaaaaaaccgaatcaaattggagcgatatacctgttaataataataagtttattgctttttttgtgctctttttaattttgaagaatttattgtaaaatattttctgctattttgaaaaaaattattaacaaaaatgcaagaaaacgaaaaatacacccctgagaaatggaaaattttatcaaaaattcatattcaaaatttatttatttatttacttgactacatttttgattttttggctgcctttttcaattattttcccaacttatacaccattgatagagcttcaatagcactacaattttactcagaggtgatctttctctttttctattgataaaaatggtttattgtttttttgggaaaagataaaaaattcaaaaaaaccgaaaccgaaacggtataccgaaaatttttcttcgggttttttcggctcggtttttttcggtttttaaccgaaaccgaccctcttgtccggtctctaatttttattcagaaaacgagaataagttaggaatctagaaaagatatattatcttccttgctatattttttatggatttaagaaaatttaaccattcttatcgtttttcgaaacttttagattttttatgatcaatattgaggtcgacaccaaaaaagccgaaaatttacaatagcaaattactatgctcttaaaactggttttatagtgatttgaacacttcagttagaaattccctgttgagcaaaagagaaataaactgggagcacaacttttaagaattaagagctcaaatggaatttattggaggaatttccatattggaatggtgcatcaaagcatagagataaaactgaaaaaagaga

SEQ ID NO: 22176 - DNA, 2208 bp, Heterodera glycines
atcatagacataagaatcacagaaaatgcttgactgctccacacaggacgcgagtccaatctgaaaaaaggttcgtccgcctctttagcattttcgctttacccacgcgcccttttgcggcagaaaaagaaagtaattgagagagaacaccaaaacggaagagcaaatgctggccagcacatagcataacaaagtctgcttgttttcttcataaatttggcgttgtccgcgcgtcgcccgcttcgcacttttctgctggttcatttccttgcaatttgttttgttacggttttaaataattcaaaaaaaaatcattgggagatccaattgcaaaacgaatgaaagaagctcaaaatgaaagcatagaacaccagtttatccgagtcatattgagggcaaaagctgaaacaaaggcgaaacaaatcaaactgcgcaatcaatggaaattgtagaggaaaaagaacaacaacaggttgcaaatgtccacgagagaacggcttcagcacttcaatgcaaaacaagacggaacacttcattcgaaatgaaaaatcccccggaagaatttggtctcagaatgaagcagtggttgaatgaattcactgggtcatcgtcggtctaaagcaaagaacagttgaataaataaaccactgtaaaggacaccttaagctgaccaatcaccgtcaccaaaattgacccatccggaagcggctgactgtcagtctgaagttttattggttaataaatttccaaaccgaaaagaatgaaaggcaaaagactaatttggagaaaacctttgtaatcccatgttgaatcgttcggaaaggtagcgcctaaatataaaaaaaattaacgattaagtaaacataaagcaaaaaacaaacacttactccatatttgtccaaaatggcctgtcgacctttcacttggttcccctcaaaagtcataaaagagtgttcagcatcatacaaatcatgaaggccgacggtgcgagtcggaccatcgggcacatcaaatttggtgtaaaagtgttggacaaaggcctgcccaatggattcatagttgggattgtaagtagccatttgatatggttatatgtaactagaggagcaaacaaatttagagacttagtttttgaaaaaatggaattcttaagaaaaatgcaccaaatttgtggaactcgacaagtatcattaaagcaaaatgcgttttatggaaatcgcaataggtgcctaaatatgtagacaccaaaatgtcaatccctaaacgctatttcggaagccaatttccaatattttttcagccgtcggaatgccgattttcgaaatttttgcaaaaaaaaaagccgaaaatttacaaaatgttcccttgtaagttttgatcaattgtatattggctattaaaatttttgaaaagaaatttttttcgaagcaatgttaaaaaacaaaatgacgcacaagacatggacggtaaaaaacgaaaaaaattgccaaaaaataattggcgtaaaacaaaacgccaacacacgcaaaaacaaagtatatgcacttacactggtaaatgccttttttgtattttttattttgatcagccataacacgcttcattcccaacaaaagtgaacaaatttgatatctaaaaaaagattttgaaaaggagaatctttttctaagtgaatgctaagcaatttgacatctcagaaaaaagttgtgatactttcaaatttttatcacgttataactcaagtcctaaactgctgttttcaccaaaaatgctaaaactattaatttctctattaattctaaatgtcctaagcgattttgtacccttataaccaaaattattagaattttcgaatttatgtttttccatgtgttagagacatgaaaatagtacgccaaaaagagagaaaaagtaatgcattttcatgttttatatatatcttttgaaaaagtgtataaaacataaaatggctgcattacattatgcagaatttttttctcaatcgattgcaaaatttggtgcaacttgtatgcatagaaaaaaagttatatggagagaagtaaatgtagttttttacattattaagaatgaagagatagtacgtaaaagtgagagaaataaagataaaaagtaaatgtgactgaacgccaattttttccataaaaagatttattgtcgctttttttttcttttttaccgtccatgaag

SEQ ID NO: 22177 - DNA, 2454 bp, Heterodera glycines
  unsure (1)..(2454): unsure at all n locations
catccctttgatgttgccgccctgttggattttaatttacccaaatccgttgcgggtgttttttttcacccggcgcccgcgcagcgcgcggggaaggtcatcaatcatccaccttgtcacaatgtgacaggtgaaganaattcaattnttcttttgcaaatttaaatctttttgatcncaaacccttttgggccggttttattttctcaaatcctgagattttttatgatgggtttttcggatcctgaaattgaaaattcattttgaaaattagccaaaaccgtgcggtttttatcaccttcttccccctccctccccgcccgtccggcgatgcgatgccgccgccgcgaaaagtaatcgataatggaatttggaagaagtgcaaattaattgatattggcagcaaataatttcgattatgaattggacaataaaattacgatttaaatccaatttaaaagtaaaatcaaagaatgaataaataaattaaaaaactttttcaaaagtaggtcacctgtcaaccaaaattgattgatgggtttttatttctcttccattatttccgggttccgagcgggtgtttcgcgcacaaacccttacctatgggaggggtgcagctctttgaagttgccgccccggacattttcccgcacaatcccaagcctataggaggggtgcgtgccaaccgaaacctatgggctgtttctttgaagtctgccgccttgtggattttaatttccccaaatccacgcgggtgttttttcactccgggccgcgcagcgccgcgggaaggtcatcaatcatccgtctgtcaccaaaagcgacaggtggaggaaattcaattcttgcaaattaattccaaatctttttgctcgcacgcaaaccttttgggcggttttattttatgaaatcctgagattttttatcaagattttttatcctgaaattaaactattttttaaaatttgctaaaaccgtgcggttttttgcatatcttcccttcgccgcgcagcgccgtcatcaatcatgaacctgtcactaaagtgacaagtaattttcaaaaattcaatttttattttgcaaatttaattccaattcttatttatttattttggattttaatcaattatttgatcccccgttttccaattctcaattatttttgccacctcccccgagctcgtaaacctcgcgggtttctcgcgggtgtttcccgcacaatcccaagcctatgggaggggcacacaaacttttgaagatgccgccctaaaattccattccccgaatccgagctggcgtttaccgcacaaaccggttctatgtgaggcgtcaaacttttgaagatgccaccaagatgcaaaacctatcggggcaaaccgaaaacatattagattccctttgaagttgccgcccacataaatccgatttccccaaatccgtgcggttgctttttttttgcacatccctccccgcgccgcgcagcgacgcggaaggtcatcaatcatccacctgtcaccagagtaacagggggaggaaatttgaattcgttaaaaaggtgctatttttaaagtacccaaaaccgtgtgggtttttgcatttccttcccgccccgacgatgaggcacaatgcaggcgtcgcgcaaattaaatcgataatgaaattgtagaagttcaaatttaattggtaatgcagcaaataatgccgataaataaattaatgaactggacaataaaattaattatccaaatccaatttaaaaacaaaatcaaaaagaataaataaacatgatgaaaaaaaacttttccaaaaataggtcatctgtcaataaaatatgattaatgatttttagtaatatgggccaaaaatttttttaaaaatctttgattgataggctttccgtttttgaaacgctttcgcaatatggacccatttttgaaatgattaatgagttttatcctttccaacacaatgtgcaagtgacagacccaaaaccgagcgggtaccggaatggcccctccaaaatccgaaacctattgaaggggtattttcctttgaagttaccgcccgcttgcgggggcggtattttcttttgaaattgccgctacgtgatacttccccgcaaaatcccgagcctattgaaggggtgtttccctttgaagttaccgccgcgggattttctcctaacctattgaaggggtgaaatccgttgggtgatttatgaacaggttcacaaatcaaagatattgtattagtttaaccctttaaagtcgccgccacgcaaatccgatttccaaaaccgtgcgggtattttttttgtctccatctccctctccgccggtgcgccatgaagtcgccctgccgagcaccgccgcggaaagttaatcaatcattcccctgccacaaatgtgacatgtgaaaatactttcaaccataattcaagttcttatacatcat

SEQ ID NO: 22178 - DNA, 1570 bp, Heterodera glycines
cttccctcctcctcttcccatcgctcgctgtttacctttttgaattagcattttcctcctccctccccctccccctctccccacaaatgggaggggaatggacagaaagaaagcgatggcttttatgggtcaaagcaagtgaagcgagaggcactggatgagttgggggggggggagagatggttgtattccttcccacattaatcaaagccgttctctctctctcccattcacaaatcactttggtgaccaaacgagaggagcgcgaaatggcaatcaaaaattggcaaaatggcggcatgaatatcatgaataaatgcatttcaaaacttcaatcataatacatttgtctagccaagacaacaagcagtctgctgtttgattggttgcaaagcaaacatgtgatcgggaagactttgggtacataaaataaatttctttccatagaaaccgaaatcaaaacattgtgccaattaagtaagtaaaatacggtatttttggcaaataatcttaccaattaccaaaagattctctaccacatccttattaattcatttgtatatatgtaaatgaatgttgctattattctgctgatgccatttggcattttttccatttttaaatttttatttcatcggccgttgtctcattcatttatcgtcatcctcatcatcattcatccgttctctctcacatccggtcattgttcgttcgtcgcgttttcatcgttcgccaagtgcacatcgccaaactctctctctctctctctcttccgccaaatggcaatttattatccgtttttttcttctccttaactggacggacggacacacacaatttgcgttcattttgagcgtcacctttgctgctgccagccgccaatttgcccacggtgaaagcgacgcaaacagtgcaaatgggggggggggggggtgggatgattgatggctaatgatgtgttgtgtgcctaaagtgcctagttatggattttccgaaaaatacttcactaaaatgaaatacaaatcgaaaacacatcccctaagaaatgacccagaacagatttcataaaatacacccataagatttgaaatatatatttgtacaaggatcccaaaattaaatattttatattaataaaaattttttgaaattataatatgcagattttcgtgcctctttgaggattcttgcgacaatttaatgactatttcgcgatattcagtgcataaaaaaggaaaccctagctattgtaaatagaaaatctactgagattatacataatgactgcatagacaagatttcagacacttgtttggtaacattcttattatcattttttcttcccccacgattgtcgccaggcatgttactcgtaaatgacgatgtttatggctgatatgcggattttcaaaattttgatatcgatactcagctcctgcctaataaatggattggtaatgaatttaatattaagaaagatgactctgtttttaaattaccctgttggttaaatttggttaaaatgtgccaaggggttcacattttgaaattattgatataaaagaaattg

SEQ ID NO: 22179 - DNA, 2139 bp, Heterodera glycines
ataatggggaggggcataacatgctatcaattaataaacaaatgcaattagactgacgggtgactctgtcgccataaaattttcaatttttatcctactaggcccgtgcataggagagcatttcggaaatacaaatggattttttgatgaaaaatcgggaaaccttacttgccaaatctaaggcttattcgtaaagcaaacaaagacaattctataaaaaatgagttcaaaaaacaactaatttttaaacaaagaatcactctgagattcattatttttttcgggtctccgatcacattgaatatatgaacgagctggggaggcgaccggaaaatgcgtcagtggaaaatgcgtcagtggaaaatgcgtcagtggaaaatgcgtcagtggaaaatgcgtcagtggaaaatgcgtcagtggaaaatgcgtcagtggaaaatgcgtcagtggaaaatgcgtcagtggaaaatgcgtcagtggtttccgtgtatttaaaatgattttgaagaaaaaccctaatttcgaaattttgactttcgactctttttcgaattcgggttcggggttcaaaatttagaacgatatatgattttatataatttcatgtaaaataatttaaaaatatacaatttgaaattgctttgtcggtgctttaagttttagtttaattgttttgctatcgaatcgaccgaaatattttattctaataatcatttttttcaattatgaatattttttccaggaaaggggccggtttaaaaactttgacccgggcccgagcccggcttttctggatcctggcaatactcagacacagtttttgtccaaatgcctgggcccttgtataacactagtgatacttttttctgaattaaaaaaacaaaattatgttcaaattttaatgaaatatatggaaaagtcatcatcatcattatcaatcattttacagtaatggaatttgccggatttataaaaaaattgtaaaatgccaaaaaataggggggggggggatttatcttcatcattaattataattcattttaaatcaatcatcggtaacatcttcaatcacatcttcagcattatgctacttgctgctgcattagacagcttggacaaattggacgggatggcccgtctcggccataacattggccaccaaattggcattggtggcggccaccacctcggtgaaaatcattgacacggagccgaccaacggaattggcacactgtgccaaacgcccgggttcagccgaggtgcttgccctgaaaaacagcggaaaacatatgtgtgccggacgccagaatgacaatttagacaaccaattgtgcgcccgattaattggtgccaatgaattaattaccaaataattaagtagcacttattaaataattaattaattgccagacagaaactgcaagcatgtagaaaagaacgtgcaaaaacaaagtcccgtcatttaaatagattcatagccaaatatgtggaaaatgccgaaattaaacccaaatatataaaaaaaaatttttgaacaaattcttgagactttaaccttaaactttttaagaggctttttaataaccttttggattagccaaattcagagcccttaattaattagtaaatattacagaaccttaatcggttaacgaggcataaaaaattcaggaatttgtcgcctcgaaataaaacttactcggcaaattaatgcctagacccaaagtcaagtcgagaatcatggtcttgggactgaccatctctgaagatgaacgcctgcagtgtctggtcaatgggttcgcccgtctgcgtgtcggccaatgcgacggccattgcgaaggcgtcggacaggtcggagggatgcaaatagaagctaatcaagcgagaaacaaaaatcaaaaattttaatttaaaatttgcaaattgctctttgacctgccatccgggcgtgccatcaacgactgaattccaaatttgaaaataattttaaaaaatttttctggtgggggcggaggggggggggcaagaaagatcccaacggaaccgaactcatcagtcccatcggattgggttgaaaatttaacggtataactatgaaaaagtggtaaagcggtagaggaataccgtaaccaataata

SEQ ID NO: 22180 - DNA, 1278 bp, Heterodera glycines
gcaaaggaaggacaaatggcaaatggggacgggagagggcaaatcgatcatttggcggtgggaggggaaagtgagggaaagtgaacggaggggaagggaagggaagggaagggacagttggcaacaattggcaccgcaaatcgcacaattaaaagggcatttcataaattgacagattctctttgcattatttacaattaaattacaatagaaacgaaaaaggctaaggcatttggcgcaaattaatggacaagagatctcagcgaagcattcattcactcattcattcgttgtccttcacttcatccaaagtttgcatttggtcgacccgttttttaatctgcgatatgtgcggcctttccgagggccgtattaaaaccatcgattggatcagttcggcaatgtgccgatcaactctcaaaaataggctttattactgctcgcttaatgagattagaacttacggcaccgccgtgtcgaagtttatcttcgccgattgtaccgccaaagcgacgctgtcgcccctttcatgaacgccgtcaaaaggcgagcgaaagtaacacagggcgaacaacacacagccgagagactgaagacaaaatggcaaattgggggggggggagtaatagaccgattaatagtagtcagtcgttaatggcatttccgtccctaattaattggttttaccaaaaccaatggcacccacccaaatgtccacgctttccccaatcatcgctccaatttcacacgtgaataactcaggtgctctataaggcctaaaagtaaacaaaaagttcgacttccgccgttcgtttttggtactacaaaatgctcacattgtgcaaagttcggccgcctcgtccaaaatgcgtcggctgtcgcgtgcgtccaaaatgcgcagcggacactcagtggccgagccaaaatcgatcagttgcaatgtttgggggtcgctgaacatcaaattggccggctttaagtccctgcaaatgatcttcgcatttcaaaaggaaggcattgagccgaaaaatgcctatgggcaatgggcggacgatcggaatggagcacttcgatggcacagcaaatctgaggggggaaaagcggcgaaaaatgccattgggcgagccaagggaatgttttactttgtcgaacagaaaaagcactctctgctggtcccatgtaatcgtggtctgactctctcagacaaagtcgtcattcaaactgccgatctggcaccggaaaatgcatttcaaggaaaaaaggggggggggggggggg

SEQ ID NO: 22181 - DNA, 1483 bp, Heterodera glycines
attctttctctttccagacattgtcacttctttcctccggctgagatctcctcgaagttacgtcggttcccttcgggcagcaccaggtattgcatgtgcgcgtcacaggtggcctttgtcttctctgggattgacacaacaggcacaagtgctccatacagtgccacttgacccgtgattgtgcagttgggacgtattttggcccctctttccagtgagatgaaggccatccctcctgccaggccgccggatggcccagacctgttgtagccggcctttacttaaataaacaaaaatttcaggtgcgtgtgctcttcgaaacatggaagagggaacatttgaacggagtgctgcagcaattaagaggcatgaaaccaaggaggtcccaggattttagttttttggtgggggaagaaaagggtacagccttgagcgacctttttgcttttcatatcaccgtttttgtaatcacaaaggggaataaatctcattttacaattagccgaaaattgagtttttttcttcgccaaattttaattaaaaaaaaaggcaacgcttaaaataccaaaaaaaaccaaccatcgacaccacattcagtggaggcgcgcttggtccaaataagtgttcttctctttgcgcattaacactttggcggcgccgtatgcattctgctgcgaacacaatgcataagtgtcgagagagccgccaccgcccgtgaagaagcaggttcccctctctgagtggctgttcaaagggtcggcttcggccacctcgaagtacatcaggccgccagcgcttccgcttcttgccaagccgacagaaacgccaaccatttttgcacagactacagtttttttataaaattcaattttacattttaaaaattttgttttataaagttgccagaaaaaattatgaattttttcttaaattttgtcttcttatctagatttacttgtaatcatgtaagcatccaaccgcttaaattcccctgtgtatattgcaatttttgccagaaattttcgtaaattttttgatagggaaacggccatagggaaacggccacaggaaatggccatagggaaatggccatagggaaacggtcatagggaaatggctcgatccccttctaaaggggcggaagcaacttgatacaattttaaattgttcatatgatgtaatcccaactttgccgtctctctgtgattggcagaaatcactagccgttgttggtttgctgggggtgcacttcatttcccctgtcgaaccacccctccacaataaaaagcaattcttgacaaaaaaattttttgaaaaaataccataaaatttcaaataacgctagaaagcttcaaaacaatttgtttagcggcggaaccgatgtacgacaagcttgaccaaatttgtcgctgacacggaaagcaacgctgcaggccattatccagggaggggagtggggcacgtgcaaactccccccgaaaat

SEQ ID NO: 22182 - DNA, 1908 bp, Heterodera glycines
atgatgacgaataaaacaaattaataattttaaaatatcttccaaaaataaaatcttttggacggcacaataaacaatcacttagcaattgattaaaccaataacaactaattaatcttttttgttgttgctaatttgataaattttgttgaacgactaagcttactttggtgcattttcctcattttggcgttatgatacaaaagataaaaaatataagataagctaaccaagccaagaatgcgctcaattttttgccgatttaacaaactcaagtctgagaaaaaatacgttagacaaaatctattcctgctttattcattcatatcgcatgcttaatgattagagcccggaaaattttctccgaacatgatttagagagacttattagcacctaaaaactaaaacgaggggggggggattagcacgtattttggcagttttaaattttagcacctgttttggtctttttccataaatttcatagcaaaaagcaataaaaatgaaaaatacacccctaagaatcgatcccaaaaactttaaaaaatatatccctaaaaattgaccaaaatttcagaaaatattcccctaagaaatgaaaaattttccaaaaaattcgttctccaaaatttatttatttgttttcttgacaagttgcaattgtgcgggcgaaattgataaaaaaatgattcacttttgtaattattgtgcattaagacacaggattttccaatttttagcacctattttgcactttttagcacctattttagtcctatttcagcatttttagcacctaaaaacctagctctattaataatattacgccaaaacaatcatagtccaaatcagaatctttctactccaaatcagggttggcacgtttcaacaaaaatgatgaaactgaaaatacgaaagtaccttatattttctttacaaaaagctaataatattcactttttgacatttatttctgatagaatgacacaacttaggtgcgcattgtgcatcggctataacaatagatccactgaatagatgctcaagagaaaaaatgaataattattcccaacgaatcatgtgaatatgaaccataactcgagtgaaagaagcccctaacggaaaaggagaaaaaaagtgccaaaagcaaaaagaataatgccaaaacggacttatgtcaaacggaaggcgatggtcggacatacacctgaaaggagagagaatgagaatgagggaaggggggggggcgggagaagcactggaggacgaggtcggctggcaattcgcggctgatgttccaaagtttccgctcggggggaggatcaatggccaaatattgttggtcttggcacatctccaaaatgataaatgctttcttatattttcttgcttagacttcggtccaccaacctgcgcaagcagttcgagctgatgccgataatagtcgatcatttctctgtcctcctctcggcacgactcggcgcatgccaccaaagtgcgacagttggtgccggcgtaattccaacagacgaacacttcgaatttgcgctgaataaaatggatttaaaaggcccaaatcgtttgatcacctctttgtccacttttgctcccattggcttcatcatcgtccgcataaaaatgtcgcgatttcgttcactgggaaaatggcataaactctcgaattcgaattaaatttaaaataattatttatttcagcaggtggttacttgagcacggtgttgcaaatcaattcttgaatctttttgttggcctcccctcggcacatacaaaggtcggccaaataagtcagaaaacggccgcttctgttattccgcttaagaaggaccaaaaaactgacagaaaaagacagagaaatgagagagagagagagcgagagagagagaggaa

SEQ ID NO: 22183 - DNA, 1498 bp, Heterodera glycines
  unsure (1)..(1498): unsure at all n locations
ttttctttcttcacaattcacattattcatattaagccccccaatattaaaggattaaaaaaaattatactgtatttattgataataagggatggcaaatttaggcaaatgccatttaaatgagattttaagcagttttaactgttatctttttatttttcaaattaaatatttaattcttagttatatttttattttggtttatttaaataaatattctcatgctggtattcacaatgctaacatccgtatgaacaatgctaaggtaatcagcgtttttataaattctaaggaattaatctttttaaatttatgtttcagttattttatgttatttggttttttatataccataacgagatggtaatttcattcaaatgagtcatttttttgttgctatattaaggtacaatgtttttccagtttttataattataatttaagaaacgagaaaaaatataattaagaatttaaaaattttataataacatgaaatttttttagaatttaccttttggatttttctattatatatattagctgtttttataagtaattgtttttgtttatataaaaagggatttttaatgcgctttttgttggctactaatattttacaattcatataatttttaaaatttttaataatatttatttattctttataatataatttatgcttattctaacaggctataataatttaaatttgcagtataagtaaaaattattttttgtaaatttatttttgattaattagcaaaacaatttccttttttatttcattaatttattcaattaataatattattttttcatattgtatcaatgaaaatgattcatgagtagttttaatatttttgtgcatatttatttttctattataatttataattttataaaatattatttaattatttggaaaacattatttttatttttcgaatgaaatttttttagcaaatctaaatgattcatattttattgagttctgaattatttatttattttttacaggattttaccggcaaatttttgcaattagtaatcttatttaatatttttatataatttgtgatttaattatagatttttgttttatttgatctcttgattggagatcatcgccatctcgcacattaggaattttgttctttgctaatttatttgcttattattattttaattcttaaaattttttatgttcaaaaatatttctttataataaaggggtaatcattttccttttattatttatttatgattttgccaattcaattttgtcaaaattggttttgcaaattgtcattaacttatttatttaaatgaatattttgttttttttttatgtttcgcctgtttcatatatttagttgctttttgattttccattttttctcattatcagggaatgatttatatttgctanaatcgccaaatatttacatatatatgtgccaaaaaactcacaaaatatgtgctaaaaattttaaaaaaa

SEQ ID NO: 22184 - DNA, 2196 bp, Heterodera glycines
ccgtcgcgtttttgcgcgttttgcgacttttctctgctcaacccgccccggcctccgtgtccgttgtcgtgtcgccaaacatggcaactgaaaatgccataaaaatgagtttgtttggtataattgcccttgggcacctgcgtttttatccgcaaattccactcgctgtgtcgtcgtccctttgtcctgctgagtcgtccctttgtcctgctgagtcgtccctttgtcctgctgagtcgtccctttgtccgcttcttccgccgttttcttccgtccttcccttttttctccatggtcttccgacaactgtttcttctgctggcgatttagcttaatcgccggcgacgcattgccaaaggaacgcggaaaaactgccgaggggcgctctcttcccaactgattttgtcagttatttttgaggttaacaacgaaaattaaataaaaaatatatttccttatttaatttaaaaaaacgctttaaaaatacaaaattttttcgagggggacgaccatctgctctttccatcgaaaaaattataagtcttttgatggaaatcatagaccagacgatgatggaaaccccaccgttttgaactcatcaaaaaaacataaaatttaatttaacccccccccccctcgcaatcttaagaattgccaaaaataattcacgttaaaagtgtggggtcgcttcagaatgccctttctcggcggtgtctccgccactgtcaaactgccggtactgtgccgttgctgtagcgaaattggcagggaaagcgtagcggaggggccggggggagaggagaagttcagctggggattggaatggcattgtccacggtggtgaagcgaagtgccgcccaatttgttaagggcagacgcaccgccggtggtccgatgggaggggtcaaaactcaaatagccgggcaaattggtgacactcggcatttcaaaaaagctcttaataatatgtctgtatgaaacgaattttttttacaataatttaaaaaagtcagatttaatatagtgaaatttttttaaattatttccaaaaaagttagggacaaaatcattgagtctcgatttttaaatactagaggatttagaacttattgttagctcaatatcaaaattgattaattcgaataaatttgagctaagtaattatttaatattctgtaaattaaataaaataataattaaatttaaattaaaatattatttcattattctttttttaacaccgacgaagaataaatattaaaaaacaaaacaagagaaaagaagcgattttgttgcttaaacttcagacgtttttctgctgctgctgtgagtttctttctcattttgctgctctttgtaatgtgaggcaatgaaatggagaatgccaacccaacctcaacaatcagtaagcaatcccaaaacaaaactctgaaaataaaactgacaaacttttgctttccgaagcactttttggaacggcaactgacggaagggaaggcaatgcttttccttttgcttttccttttgcttacgtctttcgttattaatgaaaaggtgcaaagaaaacaaatgagagagtgaagaagacagaagtgatgagacgtcaacattattaaatgcttaattaatgggctaatccggagaacacaaattggtggcattaattaatttcactggcgaaaagcatacgctaatcccttgaataacggacgaatgaaccgaaagagagagggagagagagacactttaacaaagaaaaagagacaaagtcagtgagaggaagggaaagagagtaacgcaacgagggacaaatgacagacggcgagagggaggacagacactcatttggccatttgagcaaattgccttttggggttggtcaaaaagggaacaacaaaaagcattcaaagaaaagctcaaaaacaggtcaaaaatcattgtgcgtactcattggtgggcgtgggactgactgatacaacggcaaaagcagtgaatggcacgccaattggccaaatgccacgcgaagggtccccccccctctcttcccattctttttcccccactatttcttctttctgactggtcttcccccctattcctttttggccgttatttcccttttctcattttcccttcccttttcatccatcgcttcttcccctctttgcgtgccccttcgtccattctctgctgctg

SEQ ID NO: 22185 - DNA, 685 bp, Heterodera glycines
caattgggtggtattatttactctattcgcttatgtctttttaccttgaactttgcacctcaaaaacttattttaatctctcaaaagtccgaccaaatttttttcagccgaattacgcgctgaaggaaatgaagtgctctgtctggagacaccgccgaatttcagtgcagttggactccattaccaacgcttcgatcaaaccagcgacgaagaggtcatccgctgcatggaaaaagccaaaaattggagcgaaagtcggaagaactaacaaagtgtattttacacggtcaatttttgtctgacccaagccccacgagagtatttatcatgtgatcacatccttctctttgagaatcacatttaaattgtgccatattcggcattacaaacaataattaatgaagttaacattaaaagttaaagaattctatcaatgttgtttgtacatggattatattggcaaaaatcaagaaaatataagggtttccaaaatcatatttctcaacaaaaaataggctctattgcagttttacacgaccaaaattaataattttttctagaagcatccgattaaaaaagtttttttgaatttttctggtcatatgttttgaaacatgaattatttgaaattttgcatgataagggagaactcttacgtctattaaataataccgtctttttaggg

SEQ ID NO: 22186 - DNA, 1366 bp, Heterodera glycines
aaaagaggcgcccgtagctcagttggttagagcacggcacggattgctggggtcgtgggttcgagtcccaccgggcgagttaccttttatgttctacaaaactgtatccaggtctttttgttgcagtttagtttcctatttcacgcttttcaaagaatttttgtcagaaaattaaatgaatttttatttacttatttttggattttcttatatatacccttaaggtaccagccataatcatgataatgcaaaataaactcaaaaaaacaaaaaagaataaaaacaaaagaaatacataatttggatagaattttcaaattaaatatattcgtaatagaattaatctttaaaagaatgttatttatatcactgttttataaattcaaaaaacatatccagttatattataaatttaatgcgagaaaaaaattgtgcataatgaattataaaatttttccaacattctttttttcaaatcagtgacaatgagacaaggatggataaccgatgaatcttctaataaaataaatttaggcgacggattagtaaaataaaataaaataaatactttatttaaatcgtagttattatttttacgattttaataccataaagcaaatatattaatgcgaaaataatgggttttttctaatctaataaatacagaaattaacttattaattagaaagcaggaaggtgaatgcaccacagaaaaatacgaaaatttacttaaaattttcttaaaaattatattttatttgcaaaaattggcctttttggtgaaatttgttaacaaatcagtacctatagacaccgccggacccacacacctccccccgtagccctaaaatttttttggaaaaatgcactgcaaaaaaatgttaaaaatgtgattgttttatccagattacactgaaatgtataatctgttaatttcctccgcaaatttttaaagatgataattggaggcaaaaaaaagaaccgtcctaaaaattctattaaataactttaagattaaaaaattttcagtaagattccatatcgtaaagtttattgtttcttaattcaatgttaattgctgcattataaatcaaatacatttgtagatattatcgaataaatatcaaaaaatatcaatattaaattttattaatattataagtataacacgaaaaagaatatagtaattacaataaatatataatttaaattgtaataaatatgtaaaaataaaataaaagtatatttctttatcaaaaggcaaatatatttaaacaatttaaaaaattgaaataaaccaaaatttaaaatcgaatgaatttttttataatcttctgaaataatcaaagcgtcaaaaatgaaacat

SEQ ID NO: 22187 - DNA, 2119 bp, Heterodera glycines
cccatagcgttgcgtcattgaggtcaacggcaagcccaaaatcggccactttgacgatgccccgttcagtaagcctgtgaatgagagttggcaggaaaaaaaatgaaaatattagcagccattttttaatctgaatttttatttcatggacttgacccataaattttctatagaaacaaagcaaaaaaattcagcgaacaatttattatgtaaattaaaataaaaagggctttggcaacaaaaaaaaattattggattttttcggaacaaaaattcaaaagggcttttagtcttttgaattttctatttttaaaatttcctgatctgaattgcccttggatatggtagacaaaataatacagtacatgcaattgcgcgcggccaggtcacggtgcacaaagccttggtcggccaagtaggccatgcccgtggcaatttgaagggcgaaccatgccaactccattaccgtaatcacctgcattgtgtttttatcgtactgtgcacatttgcaaaaattgctgacaactcataaacaattattgttctgctaatttaagaagattttgtccaaaaaataaatttttaaaaaatttattatggcccagggtcgggttgtcactttggcgccggacaatttggcgccgccaaatttaaaatgttctaacttttttcatatgcagccaaataagacaaacttaatgtcaatcgataggcctaagagttctcgattagcctgcataatttcaaaaaataaccttaggttacaaaacaaattatggcgcgcgacaccaaaatggccaaaaaaaccaagtttttgagggtttttggccgtaacttttttaaataaaaatgttatagcgtttggcgccaaagtggctggcgcaaaagtgggcgattcccccatggcattaagaaaaaataataaatttcttagactgctaaatgttttctaaaaatgcttttggcactcgaaatgagtcgccgacgaatgtccgaaggtcgccaaagtgcatgaacggcatcacaacggacggcgcagcggcgccgtcgtcggcgggcgactgggccaaaaatgagacgccataaatgcgaagaatctgttgcatgaaaatgtccgttttatgaagtttatagtctcgtctcgaactcggactcggacgacccgaattcgataagtattttaccgtacgaaacgcaaatttcgggtgattttccctgcatataatgtactgtattcaatcaatacagtagtgtaaaatcgctctgcttaatgaacaaacgaacgagtgatgaaacctcattcattacttgagccaattacgtaattactggttacggatttttgcgattttcccgtaatttttggtccgtaaatggaatttttaaccaaaaatccttaaaaaattattgtaaaaaatttttccgatgcttgaaaatttgcattttttattttcagttattcatagttttgcaaaatttttgacaaatttcttaataaacttcactaaaaattctctttgttttcctacaaagactcaaaaccgaaattgcagaatcaaaaattagcatctttttgacaaaacttttaggaaatttagaaaaaatgaataaaatttctaagaattttttttaatgaaaaaatgaatacaaaaattaactgttattaggaaatgactttttgtgaccattttcaaatgatgtaattacattttttagtcaatcttatggatattttttaattgcttcgagaaaagaaaaaattgactactgtttaaaaaaattccaatttttaattacccccccccccccttcctctcgcctaattaattaattacatttcgatggcttaatcgcctcatgattgacgcctcgcgcaaaaactgctcaaatgtgtgcatgttgttggcaccagccttcagcgttttgactgccaccggcacaatttggcccgaaaatgggtcggacagttgggcacggaacacattgccaaaatggcctggaaatacccaaatttgaaacaattaacgtaatgtcatgtttaaccgtctaaaaaatcactgtaaataggggttttgatcatattaagtcgaagataatgataatgtggaaaactgattca

SEQ ID NO: 22188 - DNA, 1415 bp, Heterodera glycines
aaaaaaaataccaaaataccaaaatacaattttttgttttaaaaattaattttttccggagagatccgatgaatattttttaatatttggtagtttattttatttgaaaaattgtttttatggaaattttatttcatttatgaataaataaatgtataaataaatggccatcaataatcaaaagaaagaattttgtattttttttaaataattttgagaatttttgataaatgaaaatattattattatattttcttttattttcaattttccaattaaatcaaagtgaatccgaaaataaaaaattgcaacaacaaaagtcatttgacgaaatatttggagaaaaatgggaagaaaaagaagaagaaaatttggaagaaaaaagagaaaaaattgaaaaatattataaaataaaagagaaaataaagcaaaaaggaagaaaatattcagcgaaagaatggagtaaaattgatggaaaaataacgaaaaaaattggggacaaatcgaaacaaaatttataaatggattaaagaattggggtttttggcataaatcacaaaataattcagacaaaaattttgttatttacggttaacaaacagattttttagtcaacgaaaaaaatttaataataatttttgtaattacattaatcattatgtcctgatttattaattatatttgccctgatttccggaaattcaacccgaaacattgaaaatatccatttttcaataatatttttgctttgacaatcaatccaacgcaataaattatgcggccatttttgtatttatcatattttattaaaattaatcgtataaataaaattaattaatttctatttgaaaattaaaaaaaaaatgaaaatttgtctattattattttcaaaatttttgttggatttaaggaaaatgaatcagaaagtttcataatttattaaattaaattttttttagtcaaattacaattttaaagacaccttttttataatttgttaaacaagttgcaataataaaaaaatgataaaaaaatcatttccactaaaatttaatttcattatatctttttcattgcagttttttattttctatttaattggaataattagggtattaaaaataaaacaaaataataataataatttcattttctttaattattttcttcaaattttgtataatttttctttataatttctaaaatgtttaaattttactcatccaaatcaataataaattctcattttctcattaaataaatatttattattaaagctaaaattttccaatttccggcatcaaatccattcaattttagctaatattatttattgccaatttaaaagagttttacttgttatttaaaaaaattttattttttgtaaacattaaattatttagatagaaacattg

SEQ ID NO: 22189 - DNA, 1616 bp, Heterodera glycines
  unsure (1)..(1616): unsure at all n locations
ccccccccctcgctggccccctttgcgagcgaggggggggggggggggggtcgacccccttccncctaaaaaatgtatgaacgacacacctgtgccttacggtagatggccttcacattgtttggctgccgctccaacactttttcacaatgtttgatcgtctcaattgggtcgcccattcgcaagtgggccaacgcactgttcaactgtgacaatatgcatgcggaaattttgtagaatttttttatttgtaaatattaaaaaagtgcccgatatcatactgtacttttgtgtctgacaccgtcaagatttaatttatttaatgccaaacaaaaagcagacctgtgccgcaatgaacatctgttcaaattttgccgcaatttcatctccgcctaaatttggaaaggaagagcggttaccaccaaccatatttccaccgattacagtagtacttgacaaattttaaaatcttgggttttttataaaaaattcaaaaaaatgttttggaattttttttttgaaatttaaagaaaacgttttttaattttttaaaatttagtgcacccatcaaatttgaccttcctgtggcgctttggttggctttgcaaattccatcatataaatcactgtgtcgtatttggccagtgccaatgcgaatttgccctggtgcaaaaagtcggtgccacggtctttgtatgccttcacacggtccaacttttcctcgtcagtcaattcccaagtggccttgacctgaaagtgtgaaaacccccaaaaataacataattgtacaaataaatacaaattaattagtgcaattttagctaattattaattgtgttcgcacgggaaaatttgtcagggaaattcccccgttttggaaaaagcagagaatgaactcgtttttcgattaaagatggaggaatttggtacttttaacaaaattataacgaaaaatcccaggttagctctccgttggcaaaactggggattttttgcatgcttttgcccgctggcgtttttctttaaaataaattagtaaggcctggagcggaaaaaaggcctttgtttatgctcaccttttcataatccttgaggtgcagcatgaacacaatctcttcgtaaatgcccaggccgagttccgcgggcggacatttgccgtagccgaatttgcccttcagcgtcacacgactcttttcaccgcggtccatccgtttcaacgccctgccggatgaatgagaaatttaaaattcggctaataaataaaataagaaatttaaaagtgggtcatggaaatggccgggagttgagtgcccctcattttttaaaaaatttgaatttttttttccggcgacgatttggggtgtatatgctcttggcttgaatgtccccgtttcaaatcaatcccgaatcgaaaaaggcacaaattcgcaccggagaatcggaatatgtggacagtcaaaactgggagtgttagaaatttccaaatttggcgttttctcttgccctcctcccccacttgtccactccgtccggcagtccatggtcaaggccttcgcccagcacatagtccaaagaagcgtcgaggaacacgcggccgtccgtcgttgtgccaaccg

SEQ ID NO: 22190 - DNA, 2890 bp, Heterodera glycines
ctcttagaagtcataatggaatggggtggggtgaacagccaataaacggacagagaaattgagttaaaaatttgaaattttttttaaattatcggaaacaaatttaaaattaatattttataaaattaaaaaatctgtcccgtcttacctatttacaaaaaaaaatgtgagactatttctaaaccaggaaaaactttgacgcaaaatttctgaaattaattaatttattttttaatttaaaagaaagtttacaaaaatatctatattatttttcactttaaggcttctttttttgaaaaaaatttaattgccctttggttaatttagcatcatttcttatccctgcaattaagtgccattattatgccattggtaagctctcgtgccaaaaccacctgggcctggataaatttttgacacatttctacccaaaaaaaggtggcttgttcaccaccaattccatgaggagcaggtaaaaatccattaatgggcagtggacagataggtcatccgtgggttaatccaaaccgggaattggtgccttagtccaataatggcttatccgaaaattttggcactttttgtaattcaaatcactcaggtgtaaaaaatggaacaaaaacaaattctttaaatttctataaataaattttaattttaatgaaacaaaatattttttattaaaaaaaattactaacgtacatattgtagaaaataaaattaaatcggattttttaaaaacaaattttaaaatttgacttttaaacaaaaacaataatagttttattaagtaatttaatttgaaataatttaagataaggttaaacttcacagattgttttgtatttctagaaatttaatttatacaaagaaaaatttattcaaacaaaaaaatttttcgtcattttaatcttccatttcaaattttgcaaatttcccccccccctctccaactgaaggattaactccattttctcaattatttgttcaagaataacgaacttccaaatccatcataaattccattcatcagcaagcaagcaaccaaacccaagagcagttttgcctcttccactccccccccccctcgaaattcatcattttgtccaccggggccatttggtgagtaatctgagccctcccccccccgcgccggccaattcccctgcttctaatggtggtggccaatttcctcgtcttcatcgctaaattatagccccctgctcattttcgtgtccgttagtccgttgccccccgggcgatggatgccacgccatgatgaaaagatacaattatttgtggaaaaaaagatgatgatggatatatgataatgatgaaatcggtggggtgcaaaaaatggctgccattatccattattaaatcatttgtctccggatgaattgagtcgggcaaaaaaaaaagaaattgcgcaaaaattgcatgttattcttttgagattttttaactggaaggcgatggaagaaaatgtgatggaaaattttgagtgtgaaagaaaatgagagcagcagaaagtgagagagtgtattcattgatgagacgcaaagaaacaaagatttgaaatggttaaaattaattaatgaattaattaattaattaattaaaatgtcagagtatggtcggagaagtgaccgatctaaagtgcactcaaatttttaaataaaacccgaagagggttgggcctctaatcgaaaaccctttcttaaatgatcagaaattaaattaagtagttttggacagattttcctttggtaaatgaacaaatcttgggggctaatcgatcagcataattaacacatcaaattcatcagtttagtaccgatctcgactagcaaagtgttcatcactgtcgaatgatcagtctcatcctttggcctcctgatcacttaatcacactcaaattgaaaattcattttgccccgatctgatcaacaaaattctgcaaccatactctgacagtttattccgttataattacggtagtaattgattccaccgtatacctggcctgcatcaattctttggtccgattgtttgcgcattggtctgtgatgttggtcagtctgttcggattgcactcaagcagtgtaaagcgtccaaaatttgcttcatggatgacaattccatgttgggccggacaatgcaatgaagcgagcccaccctcacacacaacaattgtccctggaaaaaataagaaatttaatttaaattaacataaatattaatgttaatttaaataatttacaaaaaaaaattaatcgaatgtgaaaagaatttaaaaatagttgaaaatgaaaatttaagaatgaaaaaagaaaaaataatgcaattattccaataatttaataataaaaaatgtatgttttcaaaataattaatcaataaaatactaaaatagctaaattaataaacaataaaaaatcggctttatccatcattcatctaaagttttgttattttattatcttttaattatttaaaatagaaattaaaaaattaatattttttttgtgatggtatttaaattttcttttaaaataaaaaattattattttttattatatttctttaaatttaaaattaatcttttgatattaattttcttttaaatatattaaaaacgaaattagaaaatagttttttctttaaattttctcctttttttctttttcgatacagtaaacaagataaagtcaatacagtaagactctgagcatgccattgttaaatttccgtccaaaacttttcattatagtgaccccagcgccacacccttttaagttcaatggaaaggtgccccataaagtaccgctgctgtgctgaagatccctcgcaaaactataattatttatttgcgcacgtatcaaatttc

SEQ ID NO: 22191 - DNA, 2741 bp, Heterodera glycines
  unsure (1)..(2741): unsure at all n locations
atattaacattttattaaaaatagtatncatgtttgtaatacatttaatcaaagaaaaataacaacaaaatttattcaaagcaaatgtctttgaaatgttgaaattttttctacaaaaaattacttaaaataaatttcaaaaaacattccaaatttcaaaatttcacttttcaattattccattattattttaactataatcaaaatggttatatttcattatttggaactcgcttttttgatttatatttatcttttgcacatggccaacaaaccaccgacaatcataggggttaaaaatcatgaaattaaaatgattaattttaaacatacaattcacaaaaaacccataaataacaaatattttaaatcgaaaattataagcataatcatgtaaacaatgaaattgtttcaagaaactaaatataaataattaattaaaatcatttatagaactaattatgtgaaacatttatacaattatttaggcaattgatataaaaataaaaagatggaaaaaatagaagattaaaaataaataaatacaatttttatatctcaaaaatattttttaaaaagataaaaagaaatgagagaaattaaggttttatttttaaatttattcatatgaaattaaattacatattaaaatattcatagaaaaataaaattaaacaaatatttgaaaaacaaataaacagaaaaagaaaataagaatttggcaatgaaaaatttattttaattattagcaaaaagaaatattaattaatttcatacctccataaaagttaaaaataaattcagattaaaacaaaattatttgcattacttgtgaatgataaaaagaggattttggcattgtcggatcatgaaattttacaaaaaaaaataatttgaaaaaaagataaaatttaaacaaaaataatttaaataaattagttaaaataatcacaaaagaacacaaataaaatactatagtaatgcaatttaataaaaaattattatttttaaataaaagagaataagttaaaaaataaggaaaattaaaggtttattcttcaaattgaagtgcagccaaacatcggcatacaataaaaagtgatttattgtttttataaatcatcataaatacaataccattaaaatataaacaaaaaaagaaacaatcaatagaaaaaataataattttcttatattaatatatatatatttatatatataatatatatatacgaataatattattagtgaaatgaaaataaaatatcagaaatgaaaataaagatttatataattggtaatattattaatatattagacagataaatatggccgagataaaacacggcgatcgcatgaattaaataaataaaaagcaagaaattaaaataattgataaagaattgttataattgaataaattttaaaattcagcaaaaaatcacataaaatttctattttttgaatattctttcatattatattgtaacaacataaattataggaaaagataattttataatacaaaaattttaaatcataaaacaggataaattcaaaagcaataattaaaatcattaaaagaatttgaacacaataattaataaaattgtcagcggatgttcgttggaaaaaaatttaaaactaaaaaaatatcgcttaaaaaatgtacaatcaacaaaaagcgcctaagcccaaaaaattacaaaaatttgaaatttttggcaaaatttcttaaaataaattttatttgtaatactttagtcatatttcagtgttttggtccattttcagcatattttactgtaaattttcatccatattttaatgcatatttttcaaattttaaaaaatttgttactttcgccccgcgagggattttttctgtttttctcttcatccactttatctttgttctttccttctctgctgctctctctctctctctctcttttccccgctttttcccctcccccgtcacttttttctctcatccgttcgttacgtttgcccacctgcaaaattggacaaatatttgagttttaaaagagaatttttggcgggtcattttttcattttgatggacttttgtgcttccttaatgagcccccccccccccaatttccccactccttaaacgattcattttattctcccaaagtttgttcctttattatttcgtatttttaggcatgtttaatcaaatgtttttcaacaacaaatcataattgttttgtgctcctcgttttcacccctaccctgctgatcatcgccattttgaccgccacaattcgtcgacttcgaatcaatctcgaaatccgagccgttggacgtgtgccgagttgcgaaatcgaaaccgttgagcgactgttctgttcgaccccagcctttccgtccgtcaaaagcaggggacgcttttttgtcagggagcgggcatgttggaatatttgaccttttgtttgtgattttaaattattttggcattatgttctcattttttattttaattttcttctcatttgttaattaaatatatgttctgttctcacttctctccgattctaaaatatttgttcttcatctcctccgacgcttttattcgaattgtataatttgatttgtttggaattgatattataaagagttttccaaattcccgctccaaaggctaaaggtcccggtcccaattaaaagcccaattcttcgaccaattccgatcgtttccaacaattattcaaatt

SEQ ID NO: 22192 - DNA, 1349 bp, Heterodera glycines
  unsure (1)..(1349): unsure at all n locations
tgttcgaattcgggtccggggttcggcattgaccaaatattcgaattcggcttcgggattcgaaatatgtggaaattgatgtcatattcgtgatcagtgcccccgagtacttcaccgtattgtataaaacccctttttaatctttttttttatgggaccaataaaatacatgctcattaaatatgcaacaatattttttgtttcgccacttctttctttcattatttacccgcgcatattcatcaatcatttttggtgtgtgataaaaaagttgaatcatttgaatgaattttaaacgatggacaagacataagagagagagagagagtgagagatcatcaccaaataaacgaacaaaaaaaagagtcaaaacattcaatcatcaccagaagcaatcagttaaaaatttttctcaagacccggagtgttttaataaaaaaaaaacatttgacaattcactaacaaaataactaaaaaagtttctcctagacgtatgactattttcctctgaacacaaaaaactcctcaacattctcctcttattcgtgccgcgcattggtttggtttgccctgtttaggtgccgtcgccgaaccggctcaaccccaactccaccaattcctcttctgaccgggaacagttcgccgttttgagcgcctaaaacaaacaaaaatgtgtttaaaaaaatttggtttggcaaattgcttaatttctattgtgtgagcagttagtagagttgtccattctttgaaaaaatgcaaaaaaaaaaaatttatttttgccggtgcaatgtgatgtgcaaaaccgttacttttttcgtttgttttgatttcggcttaccattgtgacagtgcggattaaatagacaaagtcccggccgtaggttcgctgtgccgtgtcggtgtttgggtcactaaaaaacgtctgtttaacaaaaatgcaataattcaaccatgatttttaaaaggtgtaatacactggcagcatgaaaaaacacagatcgagatgactacccatttcaaaagaaagtttaagaccaaaaaaaatctaggttatctatttgtatttaaaaaaaaattttttttttttttttggaaattccaattttcattattccatcactctcacctcgtctccatttgcagcatttgctgggccaattcctgaatgcgctgctccgtcaatggttcaatcttcggccgaggtttcattcgcacggcggcggtgccattggcgttgtggtccaacagttgttcctaaatggtaaagcatatgactccacattttcagtatacaatttcaagaaagtggaaaccttttgaaatttgacccanaaaaatcgagaaaagca

SEQ ID NO: 22193 - DNA, 1656 bp, Heterodera glycines
gaatcagttccaccgcatcattttcccggcaaaaaaaaatcgaattcatttttcttccccctctatctcttattacctattgctttttccgtttcagttcactttcttcgattatgccactgtcagttacaataatccgatacggtgggcaatgcctttttcaccgtatcagactcactaatcaatcattatttccatttccatctgctgaagacagtctttgttcactttcgacgattgctcctccaaagattgcatttcgaaggcggaggcggcagcggaagcccttaaagtgttttttcctcttttcttttactttttaccttttgtgtttatttttagcgcatttatccccttgttgacgccaagggaattcacatgaaaattccgatgcccggctatccctactcaaaagacggtggattttggagtgggtggggtaaactaaaacccaaattatttttgcaggcaaagcgcaagtggcggaggagtgccgtcgtctcgaggaatgcgtgcgcaattgtgacgtggtgagtgaatgtctgccagattctggcgatttccgtggcatcgttcgcctttctctcagctttttctggtgatggacagtcgcgagtcgcggtggctccccactcttttggctgctgtgcataacaaagtaaagccgaccattttttgattcgcttaatggaaattaagtttgctcttttgacctgttttagttggcctttacagttgccctcggtttttccgaatttgtgatcattcgtcacggtgccaaccctctccatgttgcccattctcgtgctgctggtgaggacaccgaaacttcgtcttccgtcactgatttttcgctctcgaagaggacagaagtgactggtgccgagttgggctgctatttttgtaatgatgtgaccgccccgggcaattcgaccaacggtagttccaatttggcaatcatttgcaattgctccgttcttagacagggcacttgaccagcaatgcaccatttcacgttcgggcatttcaatgattgcttccggtgggttaaatttggcatttcgattatcaattacattatttaatattattttatttgttaggaattgccaccgaactgttggcttctgtccttcaacacgaattgggcgcagaagcgcccgcccttttggccgaagtggacgaaaacgcgagtcaattgggcgccactccgcaccaaatccgcggttttatgtcacgctttcatctgatgatgcccaccgtacgacggtacgaccgatgcacagcgtgtgggcatacggtactgtttggtttggtttactgtctttgtatttttctccatttaatttttaaaaaatgcttcattttatccttacattctctcaggtcaaacagttctaccggactgagggatttgaatttttgaaccgaatcttccaaagtcctgccgagttggagcaaatcaccggattagccgagttacagagacaagcggacgcatttcaatcggaagttatcgaaatggacgacagtgaaagcatttaaacaagtgcattaacgggtggccatcattcaccatttgcttttgaacaattttggcgacgcaaaattctatttttatattttaattcactttaaaattgattactaaatttt

SEQ ID NO: 22194 - DNA, 2094 bp, Heterodera glycines
caaatttaaaagttacggtaaacaaccaagaataattccaattttaatttacttagatattaatatatttattttaaaaaatcgcttgaagagtggctataaaaaccaaattaatcaaactgaaaacaatttttacttttgactaagcaaaataattttaaaatttatacacttaactattcgtccttaataaatcaaaaaaagaatagaagatttaaaataaatataaaaagttaaaaataaaacttaaatgcttaaatgattttcgacttttgcttttttaaggtgtattaactaattaaaacacccatagaaagcaattaaaataaataattttagaaatgaaattgaaaaaaaatttaaaaaatcttagaaaaattagatttttaaaaattgatacaattctggaaaattaggtgtaaaaacgaagtaatagatcgaatcggagcaacaaaaaattgcgagatcttaaaatttttaattgaaaaataaaataaaagtttatcttgaattttaaattcaatttgaaaaacaataaatattcaattatctttaataaatatgaaacaatgttatatcaattttaataccttatgcttttaatttttaatttgtcttatttaaaatgaaggaaaagcatggaaaattcaaatttatttcaaatttaaaaattttgataataatttatagcaacaatccttttaatgaataaaacacaatatattaaataaatatgcgatattcggttgtcgaagttttgactaaaacgaaaattttcagcacttgaagcaaatattattaaaaaatctacaaaataattaaatcattataaaaaaaacaataacaaatttttaaattattatactggagatacaggcggtaaataattcgtttatattttgcaaaaatttattttgtagggtcaagcgttattgtatcatttcctattttatttttatttatttttatttcgtgtccaattataaagattaaattataataattttctgaaagtgtagtattcaaaatgtaaacttgccaataaatggcatacttagtcgcatcaatataaacttttatgctaatatatgtaagaataaaattgaacaattttatgtttaatttatgttgaataaaattgtttcttatttcataaaataaaataatgaattatctttaatggaaatcttgaaattttttttattaaagttacataaatctcttacctaagacttaataaaaagcaattctccgaattgattatgctaactatcattacgaagaatatgtacgaaattaaatattttataaactttttcctttatgaaaattatcaaatttttgattataaaattaatatgttactttaaatggtttcttatttatgtcaaaattatttatgcttggtcccttgatggaattacattcttcatttatatttgattaaaatttatgtaaaaattggagaacacttccaacttttttattattagatattagacacttgacgattcagttccgcgggtaatagacacattaatcccgggcccgtcacttagttgaaatttttcgaaacaaaaattgcaccattcgatttctctcatcgatgggattcgaaccaaaaccgaaaacgaaaaaaacagaaaactcaaaaaattctcggtcggtcggttttggttaaaaaaccgaaagcgaaaaaaacccaaaaaactcaaaaatttctcggtcggtttttttcggtcaaatccgaaaccgaaagataccgaaaaaaacagaccggtccgatctctaataaacaatacttactagcatattaaaagctgtttttaccccgaattttttaaattacttttcgaaatataaggataacaacctttaatcttttaatacagacgaacccttttagataaactatttcagtacttttaaaaaaaaattaaactcaataaaaaatagatatattggtcaaaaataagaaaattgaaaaaaactaattcactaaataacataaaatcaataaaatttaaattcttgctattgtttaaattttctaattaatttttctgaatatttaattttacattctgattaata

SEQ ID NO: 22195 - DNA, 2498 bp, Heterodera glycines
  unsure (1)..(2498): unsure at all n locations
tagaacgtgcatattcataaattctctatacttatgaaatgacatattcataagcatagaaaatttatatccataactacacccattcatagagctgggaatattcataaactgcattttttatgttaagccatacgtattgcattgttggctattgttgaggtgtgcgtgcgctgccccacccttaaatttgtatatgttcataaatatatatacacatgagatcgcatatgaatagaaaatttgtatacataactcataacactcatagggatgggcatgcatattcacaaaaaataaattattgattttaaaatattagagaatacgtattttattgttggccattagcgtgcgtgcgctgcaatcattataaaagcggactggtgggatatgcatataaatgtgcaatacgcaagtaatttatttatttatgaacatccttatttaagatgataacgcataaaaatatagcatatacctatctacctattcataaaaaggcatacacacagaaaatccacgtagcttatgattggcaaaattgggcaagcgcgctctttttataaaagcatagagcgagtggggaagaatcacattaaaacaaatacaacaaaatttggcatttttcttttttaaaaaattatagttcggctgaaaattaatgagtcattgggccccagcatgttttttgtagagcttgttaatagctttcgaatgataccaagactgttggatctggataacaaagaaaaaagttatagccaaaaacatgctggggtcaaacttgtggggccaaccgtggtaggaagaaaaagaaattgaggaaaagaagcgagcagaggaagagtaagaaagggggagaatgaagagcgggaggaagaggaagaaaagaaaggaggaaaagaagcggagggatggggaagaaaagaagcggaggagcgagaaaggaggatgaagagagggaggaagaggaagaaaaaaagcgaggaaaagaaattacgtagaaagagtaagaacggaggaggatgaagagagggaggaaaaggaagaaaagaaaggaggaaaagaagcggaggagcgagaaaggaggatgaagagagggaggaagaggaagaaaacaaagggaggaaaagaagcggaggaggaagaggaaaaaggaggataatgcagtagggctgtgcgagaagtgatttttaccgggaaccgagaaacgagaccgagaaatgaccccgagaaacgatacgagaacctagaccccaaaaaacccgagaaatttctcgactcgggaatcgagaaccgagaaatctaaagtgacggcatttttttgcttttaaaaacgtttttgctgtttttccaaaaaatttttgtaatttctttctgattgttaacagattttcaccanaaactgataattttttgcgttttgagacaattagcgactatttttacattcaaaatggctttttttgcgcattctttcaaaaactttttttaggcggaggaagtccggcgccagaaaattttttggtatttttagtgcgacttgataacagattttaaccaaaaaggctacgctaattttttcatggcaaattttaggtaaactttgaaatctttggggaattttgtggcacggcggtgccgataggcgccgccgggaaaattttttgggatttttaaggaattttgttaagaaaatttgttcaaaattttggtagggggtcgagtccgttttaggtcgattcttaggggcgtattttttgaattttttggcatcggaaccggaaaatttaaaaaatagttaaatcactaaaagttatgaccaccttggaactgtttatcatttgcagttctcttgttaatggatgtataatgatcataatttttgaaagatattttccttttaccacccattaaaattttattagggaaaattggcttttgaaaatttggaagtttttggaagcagttttaggataaaccagcaaattttctcaaaaagcagcacaaacattggttgtttgtttgactcgaattttttatcgagaatattgaacaatttattttcttaaaaattgataaatcaatgtcaaaataagcaaaaatgtgaaaatttcgatttggtttttttttgctaaaagtaagtaattttcaaaatgatttaaataccatacatattcagcaatttttggcagttttattttttctagtcctaataataatagtaataataatttgtgcgtatgatatgggggaaaaatgccgaaccgagagcggaaatttgaagaaaaatatgggatacaaatttcagtataaattcgaatttttaaagactcgtgaaaacacctcccctgcggtatacatgatcgctgatcactcgggatcggatttttatgtgctaaaaaatgctgaaatatgtgctaaaaagcccaaaaaatgctaaaatatgtggtaacaattggaaaacccatgtgtttttgcataaaaatcccaaa

SEQ ID NO: 22196 - DNA, 1395 bp, Heterodera glycines
ctgcaggtctagctgatttctagatggctgaaaacaaaaagcacaatgaaacggatggctgtgctttttctgtttctccctccaaatcattgtctaatcttttgcttgacgacagtccgtcggatgaaagcgccgatgaacgcgatgatcagactgacttttgtgggcagcgtcagcaggtgggataatttgacactgtgattcgcatttggagttcagttcagattggtgacactcacagtcattcgtcatttgttgccgaagttgtcgattcccttcagggggctttggaggacggttttttgagagagaatgaaaaggcgaaactgagtggggatttgctgaacaaaataaaattggaagtcaatgcctccaaattggcctacaatattcccgcagaagaagtgccgggccttctcttcactgcttttcttagtctccctggcgttgtcgacaaattttcggagttcacaaaggtgtcaattactcataattatttatcttgcatttataattatctttctccgttagatgtacaaccattggcgtggactttggaaaatgttttacagaaccacttttgctcaatcacaaatgctttttgctattgaggtaaaaaattaaaaaattgtttttcaaacgatgtaatattttttggtcttttatactacaacaattatgcaaattattttgctctaattataatttgaaaaagatttaggagaaagcgtctgattctgaccgcttccgtcgtgttctgccaaaagtgctttactttttgagtcaggaagttaaggcaatggacgatgctttaattgttgattggtactccaatttggaagaaaagtcgcaactgaagaaagaagagaaactggctgaattggtcacgtggcttcaaaatgcggaggaatccagtgaaacggacgacgaaggagaggattaaaaattgggaatggaaatggaaacacgcgaagggcaagacaaaagggaccatctttgttgttatttggtcaaaattgtttactttaatgtgatgtaataaaacttaaatctgaaattttaaattattgaattagctataaatctattggatatttgtttcgctttcattaaataataatttttgttagcgatagttcaggcgatatgtcttcagatttaaaagaaaaggaaattctgaagattttgaagcaaaaagctctaggaacagtcgctatctttgaacagaaggtaaaacgaacaatttgactgatataatgacaccactgaatttcaagggtgctttcgctgttatggtgacgatgtgtacattttggccaacgaaattctgatgagtcatgtcgctattcaattcgacacaatcagtcttataatattaagaaatttgattatttg

SEQ ID NO: 22197 - DNA, 1331 bp, Heterodera glycines
caacaacgtataaaacaacttatttttaaaatttcggtcaatttttgaaaatttatttcagcgggaaatatcacttgggagagagataacgcaaaatgagagagtgctgaactttcagtcccagtcatacaaaacgtttttcatgagaaatataaagaaaaataaatttcaaaaattgaccgaaattttaaaaataagttgttttatacgttgttggcaaaatcattgttaaaataataattattaattaaataacaacttaaatgtgaaatatggatctataccaggtactgccccgaccttagcatcacgagtcgtggcccgaaaatttgcctcagacctaaaccttcctcgtcctgcagaaaacctaatagaagatagattgatggaaatatattgaatcattagaaaatcttttagtaatctacatgaataaaaaattttaaggatatgatggaagcaaagcatgtggttcgtgttgggccatttccgctgcggcggtgctcaccgatcgaatttgcattgaacgactcaaaaagggcattcactcgtacaccaatcacgcgtcgtccttcgcttccgcgcaagacattttggattcgcatttggacaataaatgtccgtcatttaatgttgctttgcttaaaaataaattgataacaaaggttcctgttcgaccgaaagttcgacagcaattgtatggaaatggttcgccgagacgggcgtcgtcacaggcacaaattactcaatgggcttgggctgcaagccgtacatttatcccccaacaaaagaattgcctgtgaaggccaatggttgccgaaaacaatgcgacaagcaattgacgttcaattacagagagggcagagtgttcagtgagtgaaacggggaaaaagcggataattagagtacatatcagggatggcacggaattccgatttccgtttttgaaaaaagcgcgccgtaaaaaacgtgtaaattagtcactccttttcccaaaaatgttctaaaataatgcaaaatgacataaaaaaagattttgataaaatcattgaataatttttcaagcaaaatattcaaataaccaaaaacatttttgaaacaccttttactaggtaataattaaaaaatttagcctttaaaatatttagaaaattttttattatattttttattttttgaaaatttccgacttccgacgtttttggggtaggaattccgatttccgacttccgaaaattttttgggcctcggaattccggtttccgaaaattttttgatccccggaattccgatttacggaaatttttggggcctcggaatgccatgcctgg

SEQ ID NO: 22198 - DNA, 1473 bp, Heterodera glycines
  unsure (1)..(1473): unsure at all n locations
tgggggcacaactgaaacgggcgaggggccgactgatgcctaaatgggccaactgatgtcagaaagaattccttacattcatccctaaattgccaaaaattatttcagaaatgaaaaacggaaagtgagcaccggtgcggacggagtttcgttcccaacgggtcaaacaagcgaaatgttacgcagtccgacctttgccgacttttccctgactcctttcacttccggcgacactttggcattcaatttggtcgctaccatcaacgccgaaaatggtattttcgagtgccccatttactctttgttcgcgtcctttgtcagattgttttcttgtcccttctttggacggttccctgtcaaacaatgagaaaaggaacagtcagaggattttttccgttcattggctcaacaacaaagagcaccgcttcatcttgagcactttgcaacttttgatggacgcactgccattttcgggctctgaaaatggcgttagaggtaacactgacagtcgatgttcggactctttgcttggctttctgtaaatttcagatttccaagcgcttcattctctgcactcgtcgacgagcagtgccggaattgccgccgcatctgcggtcgacctgctcgacgtctcccaccaccccccgccccactcagtcacatcgccaaacctttcaaaaacaatcgcagcaacaattgtaaaaacaaaaattaaaacagtaaatggcttgttacaattcaactttttcgttaaggaggaagcatcgtatgcgaaggatttgctcgactacaaattggaaatgcttcttcgtcaatggaataagtccagcgaccttttgtttgccattcatccgttggacggaagtcttatgacttggttcttattctttctcacatccgcagttccttccatgcgtttcttgcttaattcaggactctcgagtggcttgatgacgcgtggaaacagccgaccgtaagtttcgcttcgcgccttcccgacgcctttccgctggccgacgtcgcgtcaatgtcaatttggctgcacatttggcaccccttctctcagcatggctttaacgcgttgtacttttctcagcataataaatggagcagtgacgaggagaaccaacagaacccattcggttggattgaagcggttgcatgataaaaccgcatttttgctaattgagggcatttgcatgcgaataattcggggatggcggagagggacgatgtctgtctgctgaccaaacagcacaacagtcgatcgttggacctttggcgtttccaaatcgacgaacaaagcgatcgcagttataacatttttggtgtgngaagaagagcggagcctcacttgttgtcagtgcccttttcaatcgcttcggtgctccatgaatttcggctgagcgaagagcaaaagtcggacggaacactttngttggaggtgctcagcagcgaaagcctttttgatgc

SEQ ID NO: 22199 - DNA, 1358 bp, Heterodera glycines
  unsure (1)..(1358): unsure at all n locations
cagttgatgagtgcggactgcgttccctgatgcaaagaaacaacacgaatatttgctcgctgcttgccgatcaaacagagaagagcccttaaagcgaagtcagcggtcacagcccgaacattcaaatgatttttacagaggcatttcctccgctttatataatttgggcgttacattcganccaccgaaattggagctgctcaattccatcnccatgttgccaacggcaaggaagaaagttgggaggaattgcgctcttacggaattgcctggtggttgaggaacaacgcaatgctgncgcaattgcatggaaagggtggccaaaaacgcatttcagaaaaggcaggagccaatggacgcggcccttttttatttggccatgcgcaagaaaaacgtactcacgcagctgttcaaagtcagaaaacattcatgggaaacttattaattgccaattgtttttcagactgtcaacgacagcagaatgtacgaattcttccgtgaggattttaaacttgaaaagtggagaaaaggcgctttgaaaaatgccttcgttttgatgagcaaacaacggtttcagcatgcggcggctttctttctgctgggcggctcactgaaagatgcaattcaggtaaaccgaggtcaatgggggtggggacgtgtccggcacttttgtgccatgatttgctcacccatccttaccttttcagaccattctcagccgtattggcgatcttcaattggcattggttgttcttcgtttttacgagtctgatccggaaagacaattcgaattgcttacggaattgctgtgcagagagattttgggctgcgagccgtcgcaattccattcgctggtcaaagaaggcaaagtgcactttccctccgccagcaggtgcaactgacaatgagacggcgaattgaacctttttgttttgttcagagaccctttcaagcggtcgatggctttttggttgataaacgaatacgcactttctgccgccacattgcttgaagagccatcgacggcacaaaacgacggcgaagacgagcagaggaggggcagtcttgtgaaggcacgccctttcctatttgactgtttttgcgttgagtgatttcgtgagtgatttcgcacatttaaggattcgaatctctgtgtggatgtcgccgccatgccggaaattttcaatttctactcctttcttcgacggcatccactcgtggttggttttgaaattcgaaatagaaacaaagagctaattttgaaacagattcgacaaaagttagcgaaagcgggcatttctacgaccagcactgagcagtttttgacttggacccaccgaattggtgaaaaactaaat

SEQ ID NO: 22200 - DNA, 2463 bp, Heterodera glycines
  unsure (1)..(2463): unsure at all n locations
ctacccctttggaagaaatcgataaacaattgtttttaaagtaatttgcgcacataaataaaaaaaggggaatatatatttcgcattttgaaatgaataatgataatgtgaagaatgccgatgggggaaaacggtaaaagttaataaaatgctgtacaggagaaaagggcgggagtgggctgaaggaaatgcggaattgaatatgcaatcgttggcagtgagtcgtcaatgtgagtggcttcaaatactcttccgtctttcctccgcttccattcattcgtttcgctttttcttctgcggcgtgctctccgtcgaatttgcctttcgcagccttttgcttttgcgcggagtttccaaaacattcgccgcctctttcgtcgccgacgccaaattcgactcgcttttaagggactcggacgccttcaggggcgatttcagcggagaacggattgacgacggacggcgcttcggaacggagcgaagagtcttcgtgcggtagaactcggggacctaatgagatcttgtaaaaattaataaagctttgaggtccgcaattagaaaagtttcggggaggggagggcacaactcgacaaccttttttttggctttctgcctcccaaatttacctcgcgttcgtcgattgcttcgtaaacatggcttgatgatggcgactcggcacccgcctttttcaatggacatccaattcggaaatcgaagctccattttcgcactttctcctccattgcgttattttccaggcctgaacaatttaatttggtgctatgtcattacttaaaaaccatcataaatgggcgttacttaaaaaaccatcataatgaaaatttttgcttataactttgctctaaaaagaccaaatttttaatccttgctgtcattcgatagatctaaatgttctttatgagcctgtaaaatttcaaaaaattttattaagtttaaaaaagttatggccaaaaatgtacgaaaatcaaggctttttgagttcctcgagctataacttttttgaaaggttgctttcgagcaaagttataaatattttgttcgacaaaaattttcataatgtatggttttttaaataacgcccattatgatggtttttaaggaacgaccctgcacctttaatttgagaaaaaaataaagagattacttttcagccattcatccgcgtcatttggtcgcccagaaccaaacagcgatcggcgagtaacacgttcattccgctgatcgctttgttgactatcagacattgaccagaaattcaatactttaacaaaaaattccaatcataacttaaaatagtcagctcccttcgtttgctacttttaatttgccttttaaaaatataaaataaaaaaacacttatgactaaaaagcactgagtacaaggcttccgaaacaagcctcacctccccggaaaattgagaggttctggatcaggagtggagcgcgaccattaatcgcgctgagaatgagtcaaagtgaaagagaaattcagtaccacaaaaataacggaaggaacttgtggaaaagtatttgaacaaacatacaatttttgcagtcattttttagtggtccatttttggaccctctcttgctctgtggatataagtcgtagacccacattcaaaggacaattcggaacagaattttgtgctctttccaatggaaatctggcattatttgaaaaaagggtggaggttcgagaccgctttacaaaaaaacgtcaatttttgaaattttcgctatcaatatgcaaaaggtaaagaaataatatgcctacactctctatttattggttcatctctcgttaataatatgcctacactctctatttattggttcatctctcgttttttagggaagaatgttcaaaaaactatcacccaacttgatcagatctttccatggtgatcttgtacaccaaaaaaaaaacgttggaatcgggaattttcgaaaattctgggggttggaaattttttctggaaaaatgagtaggccagaaagggcaaatacaaaattgttctatattaacaaattttgggtcagatcacttcaccgcagggacttgcgaatttatcgccgaaaagttttcagtttaactgcaattcgaacaaaaaaaggatatactatacacaacagcccaattttgtgctctcagtgcaaataggtttattatttatttagtaatcagaacgccaaaactttgcaaaacttaaaattttttggggattttccctgggtttcccttgtaaaaatagaagagccgatctcgagttaaaaactagacagctaaaaaataaactgtgattcgatagaggggtacaaaatatgggcctatacaaaatttcaaaaaaagttacccacaggaaaaaattttttcccagggcaaaatatttacgaaatcacttatagtatggtaaaaaantggtacttacacgtaaaaaa

SEQ ID NO: 22201 - DNA, 1497 bp, Heterodera glycines
ctcattctatcaattttcatcatttttgcaattgcccgttcactcatttttggattttctttttttatttcccaataaatttttattttttccattttttcttccttcgttattattttcttgctaatgccaaattgtttcttccatttgataattgtccctttgcttactccaattttcttacaaatttcggcataattttgtttccattctttttgcgaatattttcttttttgtttaaattcatttgccatttcattaaatttttgtacaatttctattttttcttcatcactttttgatttatagtttttatgaatttgtttttgaagaccaaattctttaatccattgataaattgtggttcgatttgtccccaattttttcgttatttttaattcaatttttttccattcttttcttgggtattttcttcctttttgcttgattttctcttttattttataaaattttgcaattatttctctttttttgagttcatttcgcctttcttcttccttttcttcccatttttcatccaatcgcttgtataacactttataaaattaatatagcatcaacttttgtatttttcgcctccaattatcatatttaacgattttgggaagtaaattagtaaattcagtgcatttttaatctaaaaaaacaaattttttgcggcgcatttttccaaggaattttggagaacgggggatgggagtgggtccggcggtgccgataggcgccacctgaaaaatttttgtaatttctttgcggataatcgaatggatgagaacgccttccaggaatggcttttatctgctccatctccgcttaaactccgcctaacgagagcaattaaacttctcaggcgccgcaaaaatgaaataatctcgctgacgaaagtgcggcggcacgtgatcacgtgaatattcttatggcgtgagaaacgaaagaaaaatgaatgaagtgaactttggaactctgaaaattgtaactcatacggtaaacaaaataatagggcataattttcatttttcaattggttctctattttcagccagttaaaatcgcacccctttgattggttatcagcccgggcctttttgctttaccgcaatttatttctctttttttttgtctcactttttctctctcttttttttttgtttttggcctctttctctcttgtttctggcctctcattcgttcaaaaaatgcgcactgtgcccccagaccaactatgcaccgtttatcccggatggaatttgggagggaatgaggaaaagccaaggcgcctttgaccaagccccgaacccccaaacgactcattgactgttaaagatgtgtttattcattcgttgttggatttacagaagcgagaaattggaataataattgaagtctgttccataactaactgactaactgatcactggggaaggagaaaatgcgaagagaatgggcggagaaacattacaatgagaaaaggaaaaa

SEQ ID NO: 22202 - DNA, 579 bp, Heterodera glycines
aaaattaaaaaacgggcgcgaagcgcccgtcgcgtttttcacaaacttaggcctggatttctcaaaaaatttaaattttcagaaataaatttataactcatttcaaaaaaggcgctaaagaatatttaaatattcagagggggaagggttcgaacccggacggtgtacattatttttttttgtgtttttaggttattttaaacgttgttaaataattgaaaatattttcttttaattaattacactttaaaggtgtgggagcgcggttggggtggcgcggggggaggagggaggcgggtgtcgagcaggagcacaaccaacttcggaagaacaacaacaacggcaaattgatcgtcgtccgtgagttggccaaaattggtaaaaaaaagggggaaatgattgccaattgaagcggacaaatcggcagactattgtccgagggagagggaaatgtgcgcaaaattaatgcacaatgagggaccagctggaacagcagctgatcgcacgagtggacgagtccgaggacatttgtatcgcggaaggggtactattgggcagaagggggggggggagggattg

SEQ ID NO: 22203 - DNA, 964 bp, Heterodera glycines
ttctgatctacttttggtatactttgattaaaaatgatcattaatcaatctattttttagcagttttgctgataagtttggctcatcttctgattaaaacgggtatacttgatctgattaaacattttggttgatcagggtatctctttgaccccgccctccatttgtgccaatgtttttgcgcctcttaccgctcatttcgccctccggcacgcccggccattgcacctccgtggactgttccacgtggtgcacaaagtcggcaaccaattggccgtacggtgcaaatgccaccgaatcggcgtcacttaacggcttcaattccttggcaaacgattgggacaattgcggcaatttggcaacctgtgagagtgaggaagacgatcaaacaaagaaaacacattttcaatcagttttcgattgatttgaatcacgcccggggcctttccctttttagagcacacatggaagggctggatgcaactgagtttaaattacgggaatccgtaattacggcgatttcttaatttcagaaatccgttacgggggtcggtccaaaaacgccgatatctgtaatatgtaacccgtaatggggggcggcgggtcgccgacaaagggggaaagaggagaaattgtttaaatttgaacaaagtcaagaacgtcattttgggaggaaatctgttaaatattcaaagtttttctctcggcgaaagcctaagggtataaaaatttaaaaaatgattggagtggaatggcattttcgaaaattttgttcccctgctggacaacacccaacagcactatgcctggccattttccgtttggcactctgtgtttggcacaacaccttttttgagggcagcgcctcctccggtggtatgcccagacgtcggacactgatcggactcactcgattaaccttcaaacaaaaaaaatgttgttttaaaaatttgaacagaatgcc

SEQ ID NO: 22204 - DNA, 2699 bp, Heterodera glycines
tgttttgtcatttcttaataaaatgacagaatcaaagaaaaataattaagttaattaaaagctttaatggaaaatgaataaaaatttaaaaaaagttaaggccgggatttgggacaaggaaagtgtcggttagggacacaaaaaagcgagaatccgagaaccaaaaccaggattccggaacagtcatggatgtcttacagatatttgcagaaaattttgaaaaaaaattcgtgaaaaaataaaaataaataaatggataggccttgtcagtaagtctcttccaatttcagataaaaagaaaagtatttatatcttttgaggcaagcttaattgcaagaaaaattgttttttacaaatttaaatgaactgaactattatttattattttatcatttaatattaaaaaaataataactatttaaaactattttttcatgaaaatttacttcccgacgaaggtgttgctccccgacatttttagtcttttcaggcatctccaaagaattttcgataaatttccccccgatccccgattttctttcccagagggtaggggacgaacccgagattaaagcttgttttggtgttcagcaaggatggcattccgtggccccgagaagaatatataatattttttcaaaatttaattattaattagcggtgaagcaaaaactgattattctttggcatggacaccgactcagttctgcagcccgtctttatcttcgcttttgctgccgttgagcttctgatcaatttggtttgtgttcccgtgtcggccatcaacttctttctcgtcgccaaaagttcggtgatccatccgaacctcaaacacattctcatctatcagagcggaagcattctcggggtaaactgtgcagaaaatgaacaaaaagaagcgcaaagactgtgctaaactgggcaattaaaaccaaattaattaattaattaattaaatttgtaaagaaattaattaaataaacaacaaattaatttcctcctttctcttggttttcatagattcgatcattgctcaattagccttctattttctcgcttaaccccctttttcagaggggaatgtgccggttcaccacctgtctgctcaaatttgtcctgttaagtccgttggcaagcgaatcctttcaatcgattggcaccatttactcatttttcatcttcgagcgcaacacaatggcccacgttctgatcattgaacgcgttttggccacggtaacggccaaaagttatgagcgcagacggaagcccttcttcactttgggttggctgatcattgtggtcagcagttaatttttaaataattattttaacattgtttaaaaaagacttttttggagaattccgagatcaacaagcttttgtaactgtttaattttaatttttgtattaaacgaatcaatggccctggagctgatctcatgacaagatccaaatcttcaatctcacattaaaaaactgcgagatgatttactgaacacagatttatatatttttagcattttttgaattttagcacttatttttgtgtgttgcaaaaatgttaagaaagacactaaaacttgaaaatattaatttttcaaggcaattttttgatgagatcacgaaaatttaaaataattaaacaatttttttcacactagtgattaatttgacaaaattgtctaaaaatatatagaattttttttataaataaaaaatccttatttttcgaattataggcagcagaataattttaaaacaaatttaagcatattggagaataatttgatttaaaattttttttaaagcatttttcgtctagtctttagcacattttcataacttaaccgattttttaattttttcagatttccttgggccttttcaatgcaattggctacaaagaaaatggtttttccattgttttgacgaattttgcgctgcttttctccgctggcattgaattgtgtgtgttttcactgcttcgatggcacaatgaaaaagcgtactttcggacattgcacagttcgaacggacacaatttgtcagaacgataccaagtagggaaacggagccaaaaatgaacaaagttttaacagaacaccccgtaaatttaaatggaatttccctatttacgcctccataattgcttttgagcccaatttgggcaaaaacgcattaattatttagggcagctttcatttataattagggataggatttttaagggccaaaaagtcaaaagtttttatataaaataattttaaattaaggcaaacaattattcattgattacagttgcaaataattatatatatttgaaattttgaatacattttttttaaataaaaaaaaaatttcaaaaatcaaaatttggtcaagaaagaaaataaattacaaaaatttgatcaagaaaaaaaaacaaatttagtggaaattttttgaatttttgaacaaatcgccaaaaaaaggtgatcgtgtcaaaaaaaaaattgttttaagtgcatttttgttaaagaattagtgaattttccttatcacatttaaaaaaatcgtgaaataagggcgaaaataaagatgaaacgccacaataatgggcaaaaatttattttaagggcgaacatataaaaataaggaatttttaagggcgataaaacgcaaaaatttctcaacaaaaaatatgttttttcgtgcatttc

SEQ ID NO: 22205 - DNA, 1940 bp, Heterodera glycines
  unsure (1)..(1940): unsure at all n locations
ttgcgccaggcgttgtcacgacgtcgtccgcgtcggtagctgcaacagcggcggcaggtgttatggcagctgctgggtttcaggtgagcaaacaaacccacacacacaaatggggcggtgggcgggcagaaggcaatgaaaatgccctccncaccccccaggcgatgaagcggctgtcaatttgatgactgacaaattggggtggtggtggcaccaagcaattagcattaaatatcacgacgatgatgaattacacacacacattggctggccctcctcccaatttggaatgtgtgtgtaaacagttggtggctgtaatctttattcagcaattctttccccctattctcgttaatttattttccttttatctttccaattatcttcccaattatattttctatttttcttccatactctctctatctctaccctctctctctctccacctcactctctctctgatttcacgtctctcgtgttcacacgatctctcgttgtcaaatcacttttgaaaattttttcttattctctctctcgtcctataaatatttttcgttaattttttatgcttaatctttttatctttctttcgctctcttccatcctcacgctatttcagcattcaccgcgtcactcttcccactctcttatgaacccgtgttcttttctggattttaaagggtcgcgtgccgaatgtacagttatgcaaacaaaggcgcaagattttattctgccattcaaacatatctatagcctcctttctgctgagcattgagaatgccttacactaaatttggccaggcaaacaaaaaatttacatagatttaaaaaaaataaaaatttttatctcaataattactattttatgttttctctcaagtcctcaaaatttgccattttaagcaaccgcgaacaaatcgttttatttttaatttgcttctggcggcaattcttgctccacaagtggcattttttaccgatagaattttattttttgcattttaaaatataaagttacccttttatttttaaattttcattttaaattttatttaattttcgtataattttaggttttttatttcatttatttttttgcctacaaattgtgcgtacacaatttgttgcatgtcccgcttcttttggcaacccaataatgggtcggctgcgcccaatgggcttaatcagggggcccaaccgtttaccgctgttgccattgctgcgggcaatttaccatcccaggcggcactgaacagtgtgagcagagcaacaaccatcaagcatttctaaatatgagcccataaaatgtttaatctccctttcgaatgatagcaattaattaatgggattaattagtcgccgtaatatgtatctgatttatggtaattaaatttatttattcttttttacctagaccgaaaatttctcatttcaaaatcgagggttaagtgatttttccttgaactgttcccgacggagaatttcgatttaatcgagaacgagaaatttctcgtctcaaaatcaaagcttaaatgaaattttatcccgataaaatttgacctttttcagtgcgaaaacctcggtatttgagagtaaagacgaaaaagcggcaaaaaataaataaaaataataaaagatgttgatagccgcctcccctccccaaactcaataatggctatggctaattagcagtcttttgcgctcaacacagaatgccattcttttaatatttttgccacgattttgaccgtttaaaattgcagcaacatctcgccagcttgcaacagcaacagcaactgctcgccgtctcctcccagcagcaccaccactcggctgcggcggtggcgcaccatcatcaccaccaccagttgcagcaacagcaacatccaaacgtagtcagcgcgttgcaggcggcacacgctgcaacagccatgggc

SEQ ID NO: 22206 - DNA, 1678 bp, Heterodera glycines
  unsure (1)..(1678): unsure at all n locations
ccttttacaaatggnccattcgcttttgccatcgaaatgcgcgtcaaccaaagcatcgaaacggtcggaaagcattgccaatttgaggccgagttcaacacgtccaaataaggggaatatgtccatccaaacatcgctgcaaatccagcttaaaatgtaaaagtatggcacagaattaagaatttaggactttttcgggttggaaatccgacgatttccgaaaaagtttgctaaatttgtccaaaaaatcaacaaaatgcaatttttgatgaaaatttgctaaaaatatgcaaaaatgttatgtagggccattagtacattttttcatggttgggaaatggttttaaccctaaaattcacattcattaaatttctcacattttccgcaaaattcgcttttccattttcatttgatgttctccaaatgctgtctcaaatgatgaacccaacgattgctgctgattttcaccaattgtggcagatgaaattaagcaatggtcggcggaggaaagttttttctcgtttttagcgggcgatgccattgaaaattaatttggcttaaaaatgtatgaattaggctaattataaatagggcgtgtaattatatgaatataaaattgcgaaatatggccataaaatatggaccaaaaatcgcgaaatatggacataaaatggcaaaaatatggacataaatttttccaattgagggtataatttcccaaaagttctttaaatttgttaaatataaagtaaaaccttcaaaaatggctaaatatggtattaaaaatcattttagaagaaaaaaaacacgataagctaaaatttacttatttttagcgaaaaatcaacctgaaagcgaaattttggtttttttgcttatattgacataaatttattaatttctaagaaaatttgaatttattcaatattctcgagaaaatttagcgaaaaaataattttttgtaaaattttccggtttttaggctcaaaaaggcaaatttagctgctgggggccgttctaatagaggttttttggaaaaatcccaaaatatggacataaatcccgaaatatggaaaaaatggatatagaaatccatcctagaagcttcaaaccaagctaaaaacatgtttttcgtgcgtttcaggcctccaataatccaggaaaaaaatggatttccatataattacacgccctaattataagtcatattaaaagtatatttttaatatcatttagccattttttaaagttttacattacatttagcgaaactaaagaaaaattgagaaattacacctcaattggaaaaattttatccatatttttgccattttatgtcaatattttgcgatttttggtcaaaaatcaaaggaaaaatcgacaaaataatcatttaaataacggtaaaagtaatcatttcaaagagaaaatgagcaactaatcaattcacatccatcaatagtgtgattcaaaatgatcagacacaaataatcatttcttttctgctgatcaatgggcccattattaagacggggatgcgacatttgcggcgctgacacttcctgcgcccagtcaaaacgacatttgcggcgcagaattaatccaccccaaaaattatttaaacaattttttgattaaaaaacatttgtttaatcacactttcaatccctttcttca

SEQ ID NO: 22207 - DNA, 1896 bp, Heterodera glycines
  unsure (1)..(1896): unsure at all n locations
tgtagtatgagtgcgagtctgtgggtgtacgtagtggctggcgttgttgccggtgtgttgtcgtgttggccagggtggtgggcgcggtcgattcctccccccccncccatcggcgtcaccgacggttcaccgagttctgctgctgttgctgctgcatgaggcgttgttccgtggccagttgttcactgtgcgaattgaatgaatcaggcaaattgaacgccgccgggggagtcccgaaaggaatttctgctcaaagagcatgagacacagaacgatgctcgtcaaatgaaccggtcggattttcccggtcgtacaatgggcactcgtctcccaccatggcccaacattcatttctaattcgtccgtccgtccttttccctctcacctctgctcctcctccctgaacatgcgcacacacgcgccccgaccgaaccgagcgtccatcagaatgcgttggatgttcattttggtgaccactttcttaattgaatgttcataattaaggcaaatgcttttctaggggaaaatttttcttaaaaaaacgaagaaagctataaaaaattcaaagaaagagagagagaatattttcaaaaaatcctaacaaattaaattttaactaaaaaaatgttgtctaaaaaattcaagtaattataaataattttgattgcacaaatgcacctcgtcgtcgttgaggttgcccaagtggcggacgagcaggtcgatgatttccgactcgacttcgtacaattgttgttgttgctgctgctgttgctgggcgtggtgctgttgttgctgttggtggtggtgttgcaattgttgcagttggtgctgctgttgctgatgaactgcttgctgctgttgttgttgggaatggtgttgtgctgctgcggccgtagcggtggacagaatgtactgcggcaggggctgttgttgtgccgatgccatcatcagcgaggaggaagacgaggaggacggagtgccgacgccgaccatttgatgttgccgaaaggatgctgaagtgccgctccgatttgtgccgctggtggacgccgaattgacgacatgtggaccctttggagaattgtgataagaatcagtctcaaacaatgtgggagtgccacggaataacagtgtgtgtgccaagacaccccaccggaaaaaaatttcaagaaaattttttgaaaaatttatattcatgaaattttcttataaaaaattctcagattttttcttggaaggtagggggagatggcgggaaggaattgccaaaaccccgtcaaattggcagacttaaaaacggcacttttatttagtgataattaggggagggggaagggcgaagtcgtcggcaaaatctttgaaagcggccgcccacgacaaaatgcccaccgaatgaggcgacgaattgggcccaatcggcggctgttgctgatggtgggccaaaagcggtgccgacgacgacgactgttggtggtggtggctgagcacgagtcgatctgcaaaaacagtaaaaacacacaaaagcaaacgaatgccgccgaacggagggactaaccgccggggtcaatgaacaaatgttgcgcctgttgctgtcggttggtctgcaactgttgcaactgatgctgttgctgctggtgatggtcaagtgtcgtccccgccgccgttgttgccgttggtggccttttcctggcggtgccattccgtgctgttgccggcactgcttgggtgttgttgtgccgtcgtggaggtggccgatgcgaagaaactggacgactgctgctgctgttgttggagctggtcgattccatcggcacaccatggcatggtggttggaagatgtcggtgcaacaccagctgcagcagcagcagcgacggagtccggcgggatggtgatga

SEQ ID NO: 22208 - DNA, 2354 bp, Heterodera glycines
agacaagttaagctccgtcagggggcttttcgaagcagccatgctgcgagctatcagaaccgaaccgcggtctctgcacaagcaatcgctgaagtcgactatttccaacctggccagcttttccagtgcgctggccatggcactcgctcccgattctccgaatgtgttgtcgccaagattgagtatttttagcgatgcattttgccgcacggattccgataatttgagtatcccttcagcgctaattccgttttgtggcatggagatttcctcaagggtgccaattatctgtaaaattaacaaaatgcgtttgttgataaacgaatggaaagactaaattcttttaaattaaattattcatctagtgcctgaaatgcttcagctagcgcagccgttgacgtgtactccaagcgattccttccggcgacaaagattttcagacaaagcggagtgccatggctaactgatcgccgatggcattctatcaaacagtgagcaattgtctgtggaaaattgcaacaattgaagagaagggtaaggatggacctttcccgcaattccaaggccgcagttgttaagcttcagcgtctttaaggcaaaggccgcctcgccagcaagaaattcttttatccccggcacagccataggaccaatggcattgtcactcaggtcaagctcggtcagcctcgctccactcagaatcattgcgtcgcacaaagttttctaaaattaatacaagaagttgtggggcgacagcgtaccaatgtcctgggaatctcttctttgagtcgtccggtgaacatgtcactccaaagggctctcttaatcaacagggtgacaaatggaatgcgacaattgctaccttcaagttgctctggcactccaatgcttcggcgatcggagcggtcgcacccacaccaagcgtattgccgcgcatttccaacacctccaagccggcacactcgcggattttggccgctatcttctcacctgaaacaaaatcagccctttatagggaacaaaaaattaaacttgttaatttcgtaaaagtcccccatataatatttttttgtccaaatattaccatctccgattgtgtccaatttgagttgtaatccagcaaatgacagaacacgcattacacccactaatagtatatatagaaaatatgtttgtaaaaaaaaattaaatgaacatcaaaagttaaataacttatcataaagaaatgatttataaacctaattcaaaaataacaaattaagaatgaatctgcacaatttaaacaattgaataaggcgtttaatctcacaatcagtctgaaagtttaagctttttgaggacatttttgacttcggcgttccctgcgtcttttttgctctttcttttctctcttttccttttttcgctctcttttctctttgctcttcgctccgatttcgaaaacccgcgccctaatcgcttccatctttctccggagcattgttttgaactgcgccggcacatttttcattttcaggtgatgttcaatttcggtcggcttatttattcgctttgcaattgccacctaaatagagtctgtgtaagcatcttccagcgaatggtaattatgtgcctaattaaatattctcaagataaaacgtacgattagcccattcatatggtgtttgtaagccaaatcaagtttcgtccctatttgtaactttgcgcaggttttggtaaccagcctttgttcgaccatctgaagaagtgagtggaagccgtaagttgtcgcaaagtccaacaattcgggaatgtttgacactaaatattgtgttgtaataataccggctaatgtaactaacattaaatgttttatgatccaaaaaggaaaaacacacaatccattactaatttaattaccataaaatgccgattttaagccaacgacgcgaaacgccaacttaacgagcgaaggtttgaagcgactttcaaggcgaatgggattttgctttgacgttccctttcctccatttataagtgcaggcaaaatggttgaatggaattcgaggaactaaacttatatagtccataaacaatcaaaagtatggtttttcaattaccgtcctttcaacgtatatctgctcattgccaatatttagacaaattttaaaaggtccttccgcaagatcgggtccaaaagccctaaatattttaaaaaaaaattaaaaaatataaggaaccgtaacaaatatcacaccagcctaactgcttgtttctcatgcgatatgttaacaaagttttccatgaatgaattatttctaaaggaaaaagcaaggagggtcaatacgttgggttaagactgctgatccgaagga

SEQ ID NO: 22209 - DNA, 2420 bp, Heterodera glycines
  unsure (1)..(2420): unsure at all n locations
tcaaaaaagagttctcaatttgtgccattctttcagactctccctgttgcntgatgttactgttcgaattcgcgntnaaacttgattgacttgnctccatggttcgtattcatccccccccccccccaattgtgtgtttagttttgtgccgttcaattaattttttgccgtttaatgccatccctaattggcttttccccccttttccatgtgtccgtctgcttgcacacgccccacactctgtcccaatggcattcccttcactattggcttcttacagtgggcgaattttgaatttgacttcaagaatctgttcattatcttcagactgatgttctcgtcactgtcatttttgcgttcgattcccttttaaaggtaattaatactaattagtcaattaattattattttttaattaaattaaattcattaatagaccagttcccgcgccgctctccgcgatcgctggtgccagttcgatttgctccttctgtttttccatttcctttccattggtgtacattgcattgaaattttctccaaagattggctatggcttggcatttcctacgaaggatggtccgtaattgatggacgttattgttttatctccccactaattgctcctaattatcccttaattgtttcaggtggggcaccgtccgttccccgcgtccgcttgttatggtcaaattcattcgatctgtcatccgtttcaaattgcctcggcagcgaattcaacttataatgaagtccaatctccgttttttaattattttaaatatttcgaaattttccccctaaggcgttcctctcaacaaattcaaaatgtgaccattttcttcctgttcttcatgactttgtatgccataatgggtgtccaactgttcggtcgaatggaataccattgcgttttacccggcacggacccacgaaatgttacgatagcaggtactgtattcaggcaacaaatacacattgaaccgatagtatagataattaaattaccaattggtttcgccagatttggccatccctgacacaatgtgttccccccatggccatggctacgaatgccctgcaaatatgcaatgcatgaaactgtcgttgaaagccaaccaaattggcttctacggcatgtttaacgatttcggtaccattgttggccttcgttaattctacccaattagcacattccgcaatgaaggcttcagtctgtttacggtgtatttggccgcttctcaagagggttgggtgttcgtcctctacgacactttggacacttttccctcctattgcggctttttttatttcctcactttgattttctttttggcttggcttgttaaggtttgtcatcatttgttgtattaaacaacatttcatttgcttttgaacagaatgttttcatcgctgtaattaccgaaacattcgccgaaattcgcgttcagttcagcgaaatgtggcaaagcagagaaatggcgcaggacgaagacgcaaatcaaacggtaaaactcagacaaaacattaatttaaatttcagaattattttcgacagaaattggaacgcgacgacgacggcgagtggcgactgcgcgagttcgacccgaaggtgaacgacttggacaccatcgaccagtgccgcgtgcgccgttggctgtccgcattggtccgctccacttccttccacacattcatgctctgtttagtgtaattaatcaattatttgactttttaaatttaattttttgagtgttttcaatgccctcatcaacgcatcattcgtttatcggcacaacagaagcgatgcgagacgaaagcgcatttatcatgccattgaggtgcagctaaaatgccaagcaaacccatcccaccattctttaattgcttcattaattggttaattaatgttttctccaattattttttcatttgccaggcttttttcacgctgctctttcttctggaggtgtttctgaaggtgttcggcttcggctggcgtcccttttggcgccgtggtcagcaccgttttgagctgtttctctgtttgggcagtgctttgaacgtcgtcccgtccctttaccacaccaattatttcacctatttccaagtctttcggcttcttcgactcgttaaactttcgccaatgctcgaagattttgtttataaggtttaaaaaatgtcgttgttagccaatttatttatttatttttataattttgtcagatttttggacccggcaaaaaattgggcggcctcattctgttcacacttacgnctggtggtgatcacttctgcaatttcgcttcaactcnttctgttatgtgcccaatttggacaagtttcacaccttcnccccaggcgttcattgtccatggtttcaaattataaacccaagtaatttcactnttcaaggaatt

SEQ ID NO: 22210 - DNA, 2283 bp, Heterodera glycines
  unsure (1)..(2283): unsure at all n locations
caactcgtactgctccaactcgtactgctccacctcgtactgctccanctcgtactgctccaactcgtactgctccanctcgtactgctccaactcgtactgctccaactcgtactgctccaactcgtactgctccaactcgtactgctccaactcgtactgctcaactcgtacagcttcaactcgtactgtttttcgacaaaaaaatgtcataacttttgttaaggtcgaccaaattaaaaacattcttggtatcattcaatagcctttaaaatgcaagaaaattttattgcatttcaaaaaagaaagttatgaccaaaaatcgtaaaaaaaattcatccataacttttttcaaacatgacaaaactttttgaaacttagtgggtagatagagaatttgaagggctattgaatgataccaagaatgtttaatttggttgactttaacaaaagttatgacgattttttgccaaaaaacagtacgagttgggtttttatcgcctgaaacacacgaaaaacatgtttttagcatggtttgaagcttctaggatggatttctatatccatattttccatatttcgcgatttatttccatattttcgcatttttgtccaaattttatgtccatattttgtgatttacctctattagacggccccaatcagctaattggccttttggattccccaaagaccagaaaattttccaaaaaaatcatttttttgcaaaattttcacgagaatattgaataaacttcaaattttcttaaaattggtaaatttatgtcaaaaataagcaaaaatttcgcttttcgggtttggttttcgctaaaaattagtaaattttagctttatcatatttttttattctaaaatgatttttaaaaccatattagccagttttatatgtattttagtaaatttatttaatttgaagaaaatttggaaatttacacttcaattcggaaaatttatgtccatatttttgcaattttaggtccatatttagcgaattttgatccatattttatggccatattttgcgattttatatccatataattcccagccctacttaagactagagttataatatgcaataaaaatccctaaaatatgcccttaaaacccgatttttaacaccatatttagccaacttttgaaaacaaaaaaaaaagattttttcgaaaaaaggagggagggataaactttactattaccgccgtttttacacatccgatttattaacatatatttgagaggattttcttcataaaatacatttgatcactgatttgaattatgctcggtcgatcattcttaattacaatttcatttcttctgcgtctgctcattgattttgttcgtttgtccgtcactcatcatttgtcagcagaagacggcccttttgtgatgctttgtccggattcttctgcgaatggtggcggagacaatggccttaattaagcgaaatttgaattatttaaacaaaatcaaatgcttttttaattgctcacccaatgcaatcattgcaaatgtaaagccaaatggccactttgttacaattgtcatctttcttctgctgctgaaccgccgcggtctccccaataattttgcatcgtttcattatccatcggttgcccaattcctttgctttggccaatgtcagcttttcctttgtccattcgttaagaaattcaaatggcaccatttgtattgacggcgcatgaataggaaaatgaatttcgtaagtgacggaagaaatggcattggcacggagaaaatgctaaacaatttgattggaaaaacaaaaatcacaaaaatgttgggccacacctccttgaaattgttgatccaatcgaagttcgtttgttctttaatgtctttgcaatgcaatcgcttgggttggccatcttttctcggtgtgtgcaaccatttggacaatgcttggccagcagaaattgtttcatttggcacattaaaacaatcaccaatcgcagcgggcaacaaagcaccggaatggattgaagtcaactgatcaagatcggtgagaattgtcggcgaagtgcgacgaagcaaattgtccaaatgatcaccaccggtaaagcgcaaacagcgaatgtttgtcgaaaaaattggccaaatttcacgaccaaaaatgtcccaaatccggtggccatccgtggtgtttgaataaggaatacacaaatgtaaatcgatgcctcttttgtcaaaaatttggtgatttgaaagaagaaaagcgatgacggagtgatcgatgta

SEQ ID NO: 22211 - DNA, 2355 bp, Heterodera glycines
  unsure (1)..(2355): unsure at all n locations
cgggtcattttagtaccgaataatgattttaattaattagtaatataattattttaatcaattaattagatttgctgaccataattataatttagattatttatttaaatatttcccaaacaaattatatttttgagagaaatacagtgtcccccaaaaagtcttgactcaaacctgattaactatcttatagttcatctaaaaatttgaaataattcatgcctgcctaacttttggtgctgatcacaaaagtctcttataccaacttgatcagatcactccttcctagtgaccgggacaccccaaaatacactggaaatcggggaaattttcgaaatccctagggagctgggaaatttttctagagaaaatgtgcaagcccattggaaagagcacaaaattctctactggtttgccttttgaataatggggctacgacttttacataaaaagatatacttggttgaatatttgatcaccacgaaaatgattatttttgatcagtgccataactctttctagaagcatccaaattaagcattcttggtatcatttgatagctctaggtgtcctttatttgtctttaaaatttcagaaaattcggttcagtttcaaagaagttgcgactaaaattttctgaaattttaaaggcaaataaaggacacttagggctatcaaatgatatcaagaatgtttaatttggatgcttctataaagagttatggtgcattaaatttatcaagatattacgtggtcgtgtttttttcgtggttgtgtaaactgaagtagagccagatatatttagtatgattagcttattattaatttttaatatagtttttagtgtattttttaagtttgtttaagcaaataatctttgagagcttaaagcatatttcggccttttatagtccatattttatggccatatttggtgttttttagtcaatataatttaaatattttaaccctaataattaatacttaaaatgcacatattttttcctggtttctccatgctctaaatagtaggaaaaacactttcttttttgtgtttgcgaacaaaaaccgggacttttatttacatatttttacatatttcggggtttttatacatatttacatattttggatttttttcatatatattttcatttttttacatattttgaaaatttataaagaaaaaataagtttgaaaatgttgcctaaaaataccaaaaaaagtaatttttatgtcattttgtggctatttcatactttacggggaatttctttcccaaaaaataccattaaaaaccattttatttgcatatttggggttttttgtacatattttgggatttttcttacatatttatgtacatatttggaccactttttgtacatatttttggcagccctattcattaaccattctcgcaataactttctgtttatatattttatttaaattacttaaactaaaaatcaatacattaaatttttgtcataaaataaagtaaaagaaatttatgtataaatttattttaatgttcgaaaccaaatttattatttgaaaccaatttaaaagttcaagacgaaaaacgcacaaaatttatgaaaaagtgaacaaattaaaatgttggaaaatattttcaaacaaaaaggaatttacttgagagagggaaaacattcgcgaaaagaatggcaagaatttaaagcagaaattaataaaggttttggataatttcaaaatgggtcaagtaatttgacaaaagaaattttaaatgacaatttttgaaaaattttaattaataattgttgtttaaaattcagagagtaaaattttaaaactgccgaaaaatgaagaatgtgaagcaatattggcaaatgaaaaagaaaaaggcaaaaatagcgacagaaaaattgcaaaattttgagcattgacagaaaagtttgaaaagaaaaacaaatataaaatttaatgagaaataattttaaaatactaatttgtaaaataaatgttgattctaatattttttgtagtcaattaatatcattatttctttcattttgcgcaagtgaattatgcattcttaaaattaaagtgcaattggtgtccggcggtgccataggcgccgtggggcaaattttttgaaaagtatttgcccgatctgttaaaaaagtattaattttttgtggttttaaaacggtgcgggagaaaaatttaaaaattagggcacaaaaataaatgtataaacttttagagaataatgtaaatatccctgacagatattgtgttttttgttttttcccatacttccccctgccccattgccctntttattcaaaatgtttttcgactctnnagag

SEQ ID NO: 22212 - DNA, 1852 bp, Heterodera glycines
  unsure (1)..(1852): unsure at all n locations
gctgatgattaatcaaagctctacgacgggnntntaaaaaatcatganntgnttgaaaaaaaaaattgcttnttcaacaaaaaataaaaaatgctaatttattcattttttacttttttccaacagttgatcgagatgatttnaacactaatgatgagtaagcagtcgagaagcaagcagtgaacaattaaaccacttctctgattaccacagacaacagcccaactgctgctgatgctgctaattatattgatgatgagataattagcattaaattataaacacacaaaaaactgggcaatcgcaagcaaaagtgtaatagtaattttggccatgaaaatcctactaattcattccttcatcggtcctactaaaaattttttttaatttgttttttttttaattaaaggactttcgccaaacatttgattatttaactggaaaccgaaagtatatttttgtttatctgaaattgatttttttcaaaattctcttttttgaatatttcttataaatacaaaaaattatattaaacaatcttttaataaataacaatttttttttgggtttatgaatattattttgacaatttttactaaaaagaatttttgaaattataaaactaatacgcttttcattagctttttgactgttgtactcattgtgattgccgctcctgtgcaaaaagcagcgatggagcagttgatggctggtatagtaattaaaatatatctaaaattaatttggaaaattgattatatataataccaaaaaaaaaagaaataattatttattttttatttaaaaatgaattttctatttggttaaagagttctataattttgttattttttcctataaagatttggttttctattaaaaatagttaatatcattaaaaaaaaacctatttttttaatcaaaactcttttattgtagcatctgctggataacatttatttaaattaatgaatttaattcattttattttaattatatttgtcccttccttttatctccgtttctgtatttatttcataatttattttaaatggcaaaaatataaaaatgaaaaacaatttttaaattggaaatttggaaattaaatttaatcgtataaattcaattctgaacattctctgttgctacgcgaattgcccattgttgttgttgcgttccgatgattgttgtgttgtaattggttggttgaagaaacttgaacactttttgaaatgcattccgatattccatgcttaaaaaaaagttaatttatcatgtaataattaataaggcacttaagagttcattgtagtgctggtcgggaccgggatttttgacaaaaaccgggaccgggaattttcggattgaaaagccgggattttttggctgggaaaaccgggaaaaaaccggactagtcccggtcccggtcaaaactggtcaaaaccgggactgggtactcagttgtacccgtttttttcagaaccagtcccggttccgacaagctctagttcattgcaatttatcgaaattacaatttttttatgagtaaaaatttaatttggttaatgagtttattattaattttagtcattgttnaaagtagactaaaaaaatattatacactattttatatttctcacgtcaattttttcaagagaaaaaaaattctaaatattctaatttacaattttatatttttccccctaaatttacttcattttgtaaagcactggcccattcacagccagcacaatgtttgtcaagcagctgagcaaaatggtgtgacagctttactggtcacagacaattggaagtgcggaatggtcagccgggcaatgcttgaccatgtgtg

SEQ ID NO: 22213 - DNA, 3063 bp, Heterodera glycines
  unsure (1)..(3063): unsure at all n locations
agttggacacattctcattgtcaaagagagccattaaagccccccggggggggggcaccactgatttggacggaggtgggaaaatgaatgagcaaaagggaccctttgcgttttaaagaagtcgacgaacagaagacaaagcaaccatttttctgggaggggggctctgtgacataaattacggtagtaatgccaaacaataagcgaaaggaaattccaaatttgcaaatgtgtcacgcactgatcactaattggagcagcgccgtaattaagaacggaattgggtcctaagcccagacacatttggtgacgctttcattcacaattaattttggactcggatttaaactggctaccggattattgacgagcaaagctcgaagttcgtcttgaaccgtttggttgacgagttgctcaggcgtcggcgaaccccaaccaaaccaacgtgaccatcccgaaggaccgcgagattctgtacgagcagagaatggcaatgccaaacggatttcccgacacaccttccaatgtctttttaagttcacgaattcggtcagaggccgcgttggcaaggaaagcgcacgattggtcccacgcccttcggtcgggcaccacttggtcagcgacggcattcaattggataacacgctgaacacccaccagaattatttgtaaagacaaacgatgaccaatcaccaaataatccaacgcttttgaatcccatctgtgctgctccaacacggcactgaccaccgcagccttcagtgctttcaacaaatttccaccatccggcgatttttggctgccgtgcgtccgattggacttcagcgtctgtccgcccctttcctcgccgctcacttgacgccgaaagatttgtgaaagtgtttcccatccgacctttaaattttggtactgattaggtaattgagattataattgtcggacctgcactgatcggttggccaattccttttccgcccaatgtttcagtttaatgtccaccacagtgttgaaagaacttgtactttcaaccttaaaatagggtcatttaacgtaaacaccaccataattcgtccatttttaccgttgacgcgggcatcagaatttggtcgaacacttggggacagatggcattccacaaatgcgcacgaagaagcacttcccattcgtcggcagagacaagcgacaaattgaccacttcgtcgagcacttcgccacgggcctaaaaatgaaaaaaccgtgggggagggaaaccgacggaactttgtcgaagagttcgtccctggtcaagtcgcgttggtgcgcaaaagtgtttttccattccgtctccaaattgaagcgattggcgcggaaagcgtccgcctgcgcttcgatggattcgcgaaccatccgccaaaaacagtccgaaacctaaacaaatggacgggaaacgtttcattagcttaaaaaagtttttaccgccaatgacatattccgcgtcgtcatttgggtggccttcaaaacgccatccctaaagagtttggaactctcgaagaagtcctcctcgtatttgcggatctccgcaatgctcgcgtcccgcttgtccatgccggtgacaacgccgaaatagccgagcgctttcatcggaaatagtttcccgtcgaggatcttctttatccgatgcgggttgctcaagtttttctccgccaaatcaacctacagaattgcaaaatgactgcaaatgccgtcctgcggttgaaggacaacctttgtcagcaccaaaatcgtgcgctgaccgtccgggtcgacgttggtcaccaaatcggtcacattgcttcgttctgcgtccactgaaccatctgaaagaaacggaaaagaatgagacaaatttgctgcgatgccttggatgcaaagaattatggcgtttggattctccatgtgctgcttgcacatcttcgcgatgtcctccttcgtctccctggccatgtctgtggtaacagtcgaaatcactccgggcaaatcgacaagaaccattcggggcaaagacggacctaaaatagaaacaatgacggaaattggcgttggaatgaagtcaccttttacagtcaaagaaatgacttcgttggacaccgtttttccatcccgcaccgaattgcgcattcttagttcaatttcattgcgcaactgctccaattcggacgcatttgtcaggtcaaattcgcgattgctgtcccgaaattgggccatgtgataagggccttcgctgagagtcaccggaaatgttaacaattatgtcaagggtctgaagtgatccgattgtggcactgacatttgtgccccaacagaaccaacatttctataactttaaagcttcagtgatagagttttaccatacgataactttccgtatcactttttgcggcgttaatttatgcgttagtttttaaaattaagtaaaattttaatggcccggcggtggcaatttgataatggtgttcgataaagaactttcccgaggcttgagacattgaccattcgctgttggttttcataaaagaaggatataactatgaaaaacgcaacatcatcaccaaaatttcgaaaaaaggcttaaaaattctaaaaaggcttaaaaattctaagatttttccctaaaacaaagtttgaaaaatctcttgagccgagatctcgaacatcactaaaattgagtccccgtaaagttggaattttactgaaatttgtatataaaaaaaactcagtctcaggaatttgccccccccccaaatggatatccaatctttcccaagtgaccgactttgaccggtgctcgtgtcatcatttctccgctgccccgtgggaatatcctcgcttgggcaatcatttcgagcactgacgttttgccggccgattggtcaccgacaacgacgacacgcggcaaattgtccgcagttccgtaggaggagtcgaattcgatgagaatgtcgagcatttcggagtacaattcgatcaacgaacgctgaacaaaatggcagatattanaaatgattttcgttggttttcactttgattttcttctgtcgcttcatt

SEQ ID NO: 22214 - DNA, 1230 bp, Heterodera glycines
  unsure (1)..(1230): unsure at all n locations
ttttttggaaaaattttatccgcccaaattgtttcaagcaagatggggagagcgggcccaatggattttatatttcccggagatttttgggttttaagaggaatcagaaaaagtatatctatttttctgaaaattttatcccgccacaaatgctctcaagcatgatagggagagcggtgcgcaatggatattatatggcccaggaattttttggcttctaagaggaattccagaaaaatggctatctatttttctgaaaaattttataccgcacaaatgctctcaagcatgatagggagagcggtgcgcaatggatattatattgcccagagaatttttggcttctaagaggaattccagaaaaatggctatctatttttctgaaaaattttataccgcacaaatgctctcaagcatgatagggagagcggtgtgcaatggatattatattgcccagagaatttttggcttctaagaggaattccagaaaaatggctatctatttttctgaaaaattttataccgcacaaatgctctcaagcatgatagggagagcggtgcgcaatggatattatattgcccagagaatttttggcttctaagaggaattccagaaaaatggctatctatttttctgaaaaattttataccgcacaaatgctctcaagcatgatagggagagcggtgcgcaatggatattatattgcccagagaatttttggcttctaagaggaattccagaaaaatggctatctatttttctgaaaaattttataccgcacaaatgctctcaagcatgatagggagagcggtgcgcaatggatattatattgcccagagaatttttggcttctaagaggaattccagaaaaatggctatctatttttctgaaaaattttataccgcacaaatgctctcaagcatgatagggagagcggtgcgcaatggatattatattgcccagagaatttttggcttctaagaggaattccagaaaaatggctatctatttttctgaaaaattttataccgcacaaatgctctcaagcatgatagggagagcggtgtgcaatggatattatattgcccagagaatttttggcttctgaggaattccagaaaaatggctatctatttttctganaaatttataccgcacaaatgctctncagcatgataggggagagcggtgcgcaatggatattatattgcccagagaatttttggct

SEQ ID NO: 22215 - DNA, 2168 bp, Heterodera glycines
gctacaattctaaatttatttatttattgtatttgtaattaattaaggagtcaaaatagaaaatagcgcgatgtttgaatgataactttcttaaaaatgccacagcttttcctggccctaaaatttgtcaagccagttttattaaagtgcagctgttcgcgttcattatacgcacaaagtctggtcctgcctaaaaagtggaactcaaagacggaatatactgccgtaataatacaaaaccaattattctgctacaattctaaatttatttatttattgtatttgtaattaattaaggagtcaaaatagaaaatagcgcgatgtttgaatgataactttcttaaaaatgccacagcttttcctggccctaaaatttgtcaagccagttttattaaagtgcagctgttcgcgttcattatacgcacaaagtctggtcctgcctaaaaagtggaactcaaagacggaatatactgccgtaataatacaaacccaattattctgctacaattctaaaatttatttatttattgtatttgtaattaattaaggagtcaaaatagaaaatagcgcgatgtttgaaggataactttcttaaaaatgccacagcttttcctggccctaaaatttgtcgagccagttttattgaagtgcagctgttcgcgttcattatacgcacaaagtctggccctgcctaaaaagtggaactcaaagacggaatatactgccgtaataatacaaaaccaattattctgctacaattctaaaatttatttagtattaattttgtaattaattaaggagtcaaaatagaaaatagcgcgatgtttgaaggataactttcttagaaatgtcactgcttttcctggccctaaaattcgtccacactagttttattgaagtgcactttttcattccatagactttgttttaaattttttgaacaaaaagtggtttacgacgtgctttttagcacggactaccgtcgcgcactgcgtaccgtatacgatgggccggcggaacaacggcggtaactccgccagcagcagcaactgcaacagcagcagcatccgacgcaaatgtacggtattcgcaaccgtaacattatggtgcagcataaccacagatattgagcagcagcaggaatcgtttcgaattcgatcgacaattttttcgacttcaagcgattaattttgaaagtgataatttttgcgaaaatattttttggcacagtaaacaaaaattggcatggcaaaattactcaaccaattagccaataattctatgtacgtaatattttgggtcattaaaacatagtttgggggttttggtagtttttggtacatattttggcgatttttggaaaaaaatgaattttttacaaaagtagcttttttggcacccaattcttggcaaaatgtccgaaattttaaatttttttttgtattttttgaccttttttatgagtttttcgcttttaaggcaaaatttgaattttgacgaagaaattccgttaaaataagtaaatctttgaaggcgagaaaaaatgtacgccaaaaagcattgaaagattttgatttgcgttatgctagagaaatggaaaaaaatgagactttttgggaaacttaaactattttttgatgatttttttcagtttttgtgacatattttggttgcctttgggaattttaggacatttttgtttggtttttttttatcaagggcctaattaatcattgagtaaaatttataaaattaattttttttttcattctcaatataaataattcattcatctttcattttgcaacaaatgacaaacaaaatactggaggtgccaccgatttattccccttttttgtccccggaggcgttgttttatttgttttcgattttattgcttcgttcatttcctttggcgctgtttcattttttggcatttcctttggtgctgtttcactttttggcatttcctttggcgctgtttcactttttggcatttcctttggcgttgtttcactttttggcattttttggctgtttggcattgtcttcggcgttgagtttggcattgttttcggcgctgttttggtctcagttggcggcactggctttcttggcacggcaggtggcactgttgcttgtttgctaattgatgctgccatttttgc

SEQ ID NO: 22216 - DNA, 1414 bp, Heterodera glycines
gaagccgggaccgggacctcgattttttttcgggaccgggaaccgggaccaaccgggaaattttaaaaattcaaaaaaattttaaaaatttaaaaaaaaattcaaattttaatttatatcaagtgaaaataatacaaaattatttggttttttatttaataaattaaattaatgaaaattttcaaacaaattttcttcaattatttcaaacaattaatcatttttggactaaatcatcgaatattaatagaaattcagatttgattttcacatcacttttttcggagcgctttttcaaaaaacttttgggaaagaaggggtccggcggtgccgataggcgccgccgggggaaattttaaaaatttgggtgcaaattgttaaaaattttcaacaaaaaaatgttggtttttgcgattattaagctcaattggtaggattttcatttaaaaaatgataaaatatgtatcaatttaaaaaaaactatgagtaatcatattttctttataggaaacccacgagtatacaaaaaaaaaattgaaaataatctaatttctgtagagggattgaaccaggggaaagaagaagggaaagtcaaggagactagccattaggccatttgcacacttgggcagtgttacttttaaagaatatattaattattattttttatttttccctttgactccaattttcttcactaatttttcactcagacccccattcttaccagtgcttgtttttcccggttcccggttgccctaccgggaccgggacctgagcttttcaaaacccgggacctcggatgaccgggaattcccggcccggtcccgtggcactctaatttttacatctgggcaaagcatgaccgcattttggagttcgttttgcgcaacatttggccaatgctcgaaaaaaacatttgtggcatggaattgcccttcggatttttgcaccgtttgcgtaaatttgcccctttttgaaactatgttcgttggatcagatactaaaaaaaaattcttaggataaagaaattttgctgaaagaaggggggagggagggtaccatccgaaacatatctgagtgtttttttaaaattttctatttaaaaaattctctacctttttaaaaattcattttggtttccagcagttatgaagtgcaaaaacggcaggggaagtgaggaagggatgattgaagaaagagaagaggagtactttgaggttggaaaatgtggtgccgttttctgttcagcggataatggtaaaatgaatttaaaattttttttattaccttacgccgaaaattgggcgtaaatcaaagaaaaaaaaacggaaaaatgggcgaaaatcgaagaaaaaaaaatcaagttggagggtggagagggcaaagccacagatggacgacaaatgaaaga

SEQ ID NO: 22217 - DNA, 1052 bp, Heterodera glycines
agcctaaaaaatgtatgataatttttctttaccataatcagcaaaaataataaaaaaattgtaatcaatgtttacttaatcgattttttgcttattttccattattcattttattattaattataagagcaataataaaagtaaaatttactttcaaagccatttagtaaataatatttgtttgtattaaatatttttggatttatactaacaaataggctcttaattaagttttattccctttttcacatggctcttggggttctccacaaattattattaagagcaaaaaatattttataataccttaataatgctttaacaatcacgttctttaatttaaatgtttcttacctaaataatttttaatttataatttcttgtaaaatacgcagaaacaagacgaataatattataatatttgtctaatattctttgtttaattcatatctatttacctgtagattcttctataataaagaaaaattattataagtcggcgtatattaatagtagctaaatatttcattcgaataattcttacaattttttaatttaaaaaatttagtgtttggcagtcttcgtatgttataatatgtttaaatttgttcgattaaaaaaaggaaatttaaattttactttttaaaaataacataaaatgattattaaatttttatttttcttatgacaatattaataaatattattattatttcattaattaatgatattattcagcaaagaatgtgttacattttattctttccattcataatttttcataaacattatcctttttaaaagataaattacaaaatttgctgaccccaaatttattattttattaataccagagatttatagaaatttatttaaatatatggctataattattttgaatgatacaattatttttaaaattttccaagataagaataaattcaatcttatatgttaaaatatcaaaaaattcttaatttgcatattaaagcggacaaaatgaatgaattcgcgaattaaaaatgcaaaaatggccaagctcaaactgccat

SEQ ID NO: 22218 - DNA, 1317 bp, Heterodera glycines
gaagatatttctagagtgaagcgggaccgggacctggtagcggacaactggctttattaataataatttcaataataaaaaataatatttttccaccatttttgtcaaatgtatatatatttaagtaaaaattttatttgagaatctctctcttcaaaatattttcagaatcaaattttaagaaatgcaatattttagtctagaataaaaaacaaaatttaattcaaaaacatttattaaatacaacaaacaaaagttaaaaaattccttgaagaaactggttaaaatttaaaaatatttttgttttaatcttttacaacagttcaatttaaataaatttattttacgaaaaaaagaaattgtatcgttataaatcgatggctttcataatttgaatggctctataattgtcgacaagtaattagttaataacaaaataataataataattagtctctctctatatttttattaaaaaattctctaatattttgcttttaatttttataaatggattaacaggaattcattgtaatttttgatataatatataaatttttatttggcatatttttctataaattttcatttttctgcaaaagttatataatcattttaaattgatccatggtcttcatacgtcctgttatttcagcgaagcgtagttgtacaaaaaaaattattaaataatttaatcaaagctttttttatatttttttcttttaaatcacagttgttaccgtcgattgctccttaaattgaaactattattttctaacaattacttatgaatgggttttattacttaaaaattattttatatcccaatggtttttagaaattttatattaaatttaatttcgaatccattccagatgaatttttgttattttaatgtattttatcatttggcaattaaatttttttctattgtagattattgtattttttcaacgattttgaacactgtttctcgcgaatattcatttactcaaacaaaaataaaggattcaacttatttgtcttatataacctttaatagtctattatatttaattcttacaaattagtaatacagccgagacacccactcagtcagttttttctgatcactttcactttttaaaatatattaaagtcggcagattcgttcccggctctattttttgtagggctcatttggccgcttcgcggcctcgaagtgcgctttgcgcccatctctgaataattaaatcagattacttagtgtagctctaattaatacgatttttaatgtttgtttttttttgctattttgaaatccaatatttgatttag

SEQ ID NO: 22219 - DNA, 2155 bp, Heterodera glycines
tattcttgggtctgcaactaacaaatcccaaagaatttttccggtagaaacatgttttggacacgttggagaggaatcaaaatatgttgctgtgatccaaataagaaaacaaatttatatcaaacatttagatccaaattcaatcattttctaaacaacagctgacaaataattgaattcatcaagaagtttccatcggtttctgttgttcgataggcccaatttgactcaacagcgctccaatcgcttcgacatttaaaatttgctgctcacaatacccaggctgaatagttacaacagttctgttagtatttattagctttctaaaaatgaacttgcctccccattggtgccatccacccatttgagcaccttaaaaatgaattgctagtaaattaacgtgtatttttgtattcaccgcaatttcgatattctgcgcccccgattggaccactggggctaaagacttgagcatcagtttaagcgtagactcctcatcagctgtgttgtcgttgccgtattctttctccagatactccttcacaatcttttcatttcgccctattgaaccggccaacaattcgtagtaaactccggacggttccgtcttgaaaagatgaggggtcccatcagaatcgaagcctccgacaagcattgaaattccaaaaggccgacggccagtggtttgagtgtatctctaaacaaacaaaaagttactcagatgttgtaagtcaattgacctgttttatatcagctatgatgcgagagatatgcatgacagatacgcggtcctcaagcgtcaatttgtaattttcgcattcaactcgagcacggtcgataaggacgcgtgcatcggcgctgagtccggcgaatgcgaccataacatgctaaacataggcgtgcattgaagaggaataaggaatttaccgaatccaatgcatgtattttacgaatggtacgttcgtcttgcagagtcgggatagatttctgcaaaataaaagttcaccagaacagtttaagcaatttttatgtctgtgaatacactagctaaaaataatttactttttcgactccaattacaacacaattttttcctttcacggcaacctaaagcaatgcacattaatatttttaaaaagcaataaaacgcaccgctgttgagcccttcttcactgcttcttgcgcatagtcaacttgaaaaagtctgccatccggagaaaaaatcgtaattgcacgatcataacgctccatagtttatttgctaaaatcaagcttacaaaaagcggttaggcatttaaaatttaagctccgtaaaaattcaattaaaaatcatcacatttatttttttaatttttcaatttttaaatttttcttttttggcgaactgtctacccttgtaacttctaaaaaaggagttgagactgaaatcccgcgccagatcccgtcccgacctgtctctgttttccatagtgaacaaataattattgttgtatttttactctttcgctgctccacacacatctctttcatgaactttagacaaaaagtattttaatgcgtcttgagaagtgttggttttgttcatcaacaatttatccgggccacggaattcaattcgtacgtaacgacgcaacggtgaaaacaatttattgttatagtacataataaattaaaatttttgtttaggttttcaagttttgtaggtcaaaatgcaacaaattatttaaaaagaagaagaacccgcgcaaattgaaatggacgaaggcatcgcggcgaattcggggaaaagttagtgtttgatttttgtttttactcttttacatttattgtaaatttaaatttcttttactctttaggaattggtcaacgatgttactcaagcgatggaaattcgcagaaacgaaccgacaaaatatgatagaaacctttgggaaactgcaggtaaatcgtccatatataccaacaaaccgtaacgacgaaaaaaagtaccggaagggagaatccgcaaaatctttgctctcggacacttaaacatttttcctgttttaaatttttcatggacgaaaaaacatatacagcggttttcgccaaaaaaaaaataaccaatttgggtagacaagtatgtctaataaatcttccatttgaattttgattt

SEQ ID NO: 22220 - DNA, 725 bp, Heterodera glycines
gaaaagcggtcgttatgactcaaagctcatcaaaatgaatgctacccccagagaatcgtcgctcaaacgccgccccttttgccgaggtgcactatttagccgaaagcggacgaccccaatgagttttttgaaaagcggccgttatgactcaaagcacctcaaaatgaatgctacccccagagaatcgtcgctcaaacgccgccccttttgctgaggtgcactatttagccgaaagcggacgaccccaatgagttttttgaaaagcggccgttatgactcaaagcacctcaaaatgaatgctacccccagagaatcgtcgctcaaacgccgccctttttgctgaggtgcactatttagccgaaagcggacgaccccaatgagttttttgaaaagcggccgttatgactcaaagcacctcaaaatgaatgctacccccagagaatcgtcgctcaaacgccgccccttttgctgaggtgcactatttagccgaaagcggacgaccccaatgagttttttgaaaagcggccgttatgactcaaagcacctcaaaatgaatgctacccccagagaatcgtcgctcaaacgccgccccttttgttgaggtgcactatttagccgaaagcggacgaccccaatgagttttttgaaagcagccgttatgactcaaatcacctcaaaatgaatgctactcccagagaatcgtctctcatacgccgccccttttg

SEQ ID NO: 22221 - DNA, 2742 bp, Heterodera glycines
  unsure (1)..(2742): unsure at all n locations
aattaaacttacaaattagtatgaataatctgagctgaaagattagatctactactacttattatccacatacttatttgcttaaatgcgtatgccattcgatgagaaattatgaacgtaattncaggggatggcacaaagctcgaattaataaaccaaactccgtatttttaggcattggaattcaaatccttccctaataaatgaccatttaaactgtttattcctccggctttcgcttaattaatataattacctccttaggcgtcttctgtacgccaaccacttctcgtgactccgcgcctccgccgcgtggtgccgtctccgctcgttgctgcggcgtgcagagaccgcacgagcgcgcgcactgctgacggacgagcggagagacggcctggtggaagcacagatggcctaacgacgtgcagtcgtcggccgcgtcaaagcatgcgtcggctgcgcacaggccgcacgtgtgctcgcacatggacatcatcacctgacaaatcagggagggaacggcatttggttaattaattaaagggataagcaaataataaaacaattaacgggcaattaaataatgaaataattaacgggcaatttatattcatagagagtagaagaagacaaattttttaaaaacggatttccttctggtaaagaccaattttgggacccgaaactcggttgtcagtcaaaaaacagtgcctactaataagatactcctaattagcacattaattacccttctccaactcggctctttgcatttggtcttatgcgtcgcgcagtcaatcaccgtgccaccgctgtccacgcaattgaactgcggcgtttcgcaacaaaatgcgcatgttttggcacaacggcgtgccaaatcggacaattctgtcattaaataattatttttcaattttttgctttttaaatttaaatttgttgcctttgttcagacaagtcaatgggcggggcgattctttgctatggcggaattgttctttgttaccgaaaaaaattgtttcacacgtcccactgcctaattcgtcgtcacaatccgtcgcggatggccaaagagtgccattcttatgaggaaaaaaacaaatatggaatttaaaaagatagttgtaatttaaatttaaacaatacggaaaattggcatctgcgcattgcgcgaatgttttccgtccccgagggcaaagtgaagggcaaacttttgatgtcaatggcacggggcaatggtaacgcaggaggcaaattctgctaattaatttttttcaaaattaaaattaatttttattcatacaaaaaataaaagttaaaacccttcnggaacaaacacacttttggcatattatttctgcctttgttttgtaccgtttctgcaatattgctcaagagatcgaaaatgtcggggcgaccctaaaatagaaatgaagaacgctgatttgtggaaaataattaagccattcatcagtgaataaattaacttggtatttaaagggatcggaattcctatgatattgtcataaaagggatggataatttttgtttaggttttcttggttctttttttaattttcttccatttctgttcacaaaatactaatttcgaatgaattggatgaataagaaatttgaaaatttagtttaagctattaatttttcatattggtccatttgtactagttgatggcgttccgaagccctaaaattttccaaaatcggattctgaattctgagtccaaaaatgtattaaatcggacgtcagaattccgcgccattccttgtcggtaccgagaggatctacgggaatatttttgaaaaaaaaaacaccagaaagtctcaaaaaattgcagaagtaaggcaaattgataaataaaacaaaaaatatattacataattaaatttattattcgtatttattcatattaaaaagcgaaataaatacattttcagttgggccagcagcagtcgttgcaattgcattaccgtattgcgcccaaatgaataccgtagtaaggacagcgcgaaataatgaaacacatatattctttgtggaaaacattgtaagatggggaatgtacttggaagaacaataattcctatttattatatgaatctcgaggaaactcccgccaggaaaattcgctgccgcagagactccgcccagcgaaaaatgtggacaaacaaaacgccaaaacaaatgcccttgtgatcagagcagaaacagcaggggaaacgaaaccatgttgttttgttgtcccaaattattattcagggctttgtcctgtaaaagcattcccaaaaaagggaattaatgaatgcttttgccggcggaagggcgggggggggaagggtttgttgtttgatcagcagcggggcaattaatttgtaatttggcaaaacagttaattattaattgtacaaggcatgttgcagataatgattggaaaaaataataatatttcaatttaattaatttttatactataattgagcttagtaattcatcgtaaatagttaaataagcacaagcctaattaattaattgcttaaatcagtgcttaacgatctgaaaattttcaaaataaaaatatttaaaaaatgtaacatcaattaaacagcaattgtctaaattcagagcaactttggtgagatttgttatcaattttttacagtttattttttaattatttgtgaagttgcgggtttaattgaaatttattaagaaaatttaaa

SEQ ID NO: 22222 - DNA, 3084 bp, Heterodera glycines
  unsure (1)..(3084): unsure at all n locations
atttattttatccattttttgtgtgttttggcactttctccccccaaattcgaccatcatcaattcattttcattcatccattcactacgagtgtgcgcatttgatctgctgattccaacttgatcatcctccccccccagcgatttgtttcatatttttacattttttgtcccaaaatttcctccgccgtttcggttgttgcttctgttgttgtttttaatatattattattacaatattatcatttacatattcattaatttcttttcgttgtcgcgtcgttcgttcgttcgtccgccgctttctttcgttttgctttttccctttttttgatatattttcataattatttatttctgatgctgttaccgcacaagcaaaacatacagtctcgaagacgtaatattcatgctttttgatattgaaattgaacatgtttttcgcctttttattgttgttcttttgattgatgagaacacaaaaagaacaaacaattaatcgaattgccgacggttttgatcattttggcaaaaacagaaaaaatagttggaaattggaaaaacaaattgcaccaaaagcagcagaaattgatacaacaaacaaattaatgtgataggcctcttgctattatctctgctatttccggttacattttggagagagaaaaaaactgcgagaaattcactcgtgacaaatgcaaatgagtaataatcggccaaatgaacggagtaggaacggaaatagaaaagtgtgtaaacattcatcatcatcacattaacaaaaaacgatgataatgcgcacaatcctcggatgctgctggttgtgaatttctcagataagtgacaaagggatttggaataagtttgatttggcgctattggcattttgccatattctctctggccttcttttctttcttttcactctctgttgctcaacgattttcgacagagcttttgctgggttctgcaatcacccacagaaattccactcactacctgctgcttcgtcttgtttacatttcaaaaatccatccaaatttcaccccccccccccttgggggtcgttttatttgcctcaaatgtttcttctcgcgtcatccatcgatttctcccccactatcgcttttttgccgttgctaatccctcattctccttccattttcctctcccccttttcccatgttggcctcgtcgttgttcatcaccagcaacaaagacggcttttctgctgctgatgccgaatcgccgccccattctctgctgagcgctctgttcggctggtggcccgacgattttgtccatcggctcgtccaaatgtcggcgggagggccggcggcagcggatggcggctacgccggcccgacactgcactttggcgaaagggaatatgttgtggtcggcttttggaagattggcagcggactcggtacaccccccccccccgggatatcgcttaaaattcggcaatttgttaattgaaactcaaatttcatggttggccgcttccatgctggtggtggcgttgatcgctgtgctgcacgaggcatttttaaaaattttaatccaaatttcaaatctaacaaatctctcacccaatttttggccgtgttgggcctgcgcttctttttggagcgcgagcagttgctgctgctcgccactgcggacgaccggcataacactaacgcatacgaaggtaaatgccaaagaaaagtgggcccgaaagcgaatgggcacgggcgcctttagaatttttggataataattaatggatttgattgactgtcaaaaaaacatgggaaaactctgtgagcttaaaatatctgataaaagttttgaatcaatttttggggaccgaaacggatttaattttaataaaattgaccgtaaaaactcaactcgttctagccaaattcgtagtgcccttgatttatagagtttttcgacaaaaaatcgtcgtagcttttgtcaaagtcaaccaattacaacattcttggctcttaattttcgatttgtgtgcaaatttcaaaagtaattaccatttaaaaaaaatttaaatatcattacgagttgggacagtacgagttgaactcgtacaattgttcctcctttattattttaagatgacaattttaattagttattaagatttgttggaaaatttattggacacttgttttatgcttttttgcgggttaaatccataaaattaaaattggctaatttggtcctctgctgctgagaattccatttggttcaattgctgaaaattgttttgccgcttagttcagcgacgtcgtcggcattcgtacgtgaacagcagtgtcaccggggacggggagcagcagccgaagaaaagcaaaagacaaattgtgagggaggaggtgcgcgacattttcaggcagctgattttttcaatatgtctttgttttttgttagtctaaagttttagttaaaatttaaaaattattttccaaatttggcagaactttttaaaattgacaaaattttcgacttttgtactgagaattctataaattttttggtttttaatttgctgttccccctgctgcttgaatgcatccgttaagactttaaaactgttccccgttgaaagccattttaatttacaggcgaattttcacccgagctcggatgcttcaggcacttctttaccttattcaggtgaattgtgccgcatgcacttacaaattagtgctttaaagtgcagaaaaattgctttttataaccgaatatccatttttgaagtgtttatttgagagtttgggtcggaccaagtcatggaacccgcaatgattagcaattagacccgcagaatggcattatcaacaataccataatgggagaaaaagagcaaccgtgggaaagactctcaatggctccaagcccttcaaaatgggtccctcccctcctccgactgtcgcgcaattcgtccctccccacgaagtctttttgggcatggccagggacggtcccaggattttcttttgnnggggtacgtctgcccccanggcgacgatcgtttttttcgcctctttttttgcggagcccatttttctcaaa

SEQ ID NO: 22223 - DNA, 1953 bp, Heterodera glycines
  unsure (1)..(1953): unsure at all n locations
gattatgcacgtttctccctttttaagaaatgttgcagctatcccagaaaaagccatatntaacattatctttttattcccacgtactaagtgataaagtgtcgttagcaaaaaagatntaccggttccaccgggtccatcaatgtatagtaaaatctaattatttttttcaatgcatttgttttaataaaattataaatatttttctgatttatattcagaaattcgtacctatcctctgcaattttcaattcttcttcaggaacaaataaatcatcattttcgttaacattatcataaaattcttgaggtaaagttttataatggtgctgggacgtttcttaaaaaccgccacattgggcgtttcttaaaaccgccagggcgtttcttaaaaccgccagggcgtttcttaaaaccgccaggtgggcgtttcttaaaaccgccactttgggcgtttcttaaaaccgccagggcgtttcttaaaaccgccaactcatatgattatgtatataaatatatatatattagaagtttacataacaataaaaaatttaaaatacatatgcatatctattgacggtaaaataaaataattatttttatccttctttaaaacattctccaaaaatatgaactgaccagcataatatattctaaaaaataaaatatttaagatatgagttggagaacagacttttgttagaaagcaattaggatattcattaaggcaattgcaaaatttaatatcacaatcgtaacgtttctgatatttatttatgtagcacacatcgtggttatagcaacaattatcaactgcaaaattttcgaatataaaattgctaattcgtaatttgttacttttttgaaagttgcaaaaccagattacaggagctattagacaagagtctaatagagaggtgccacaataagtcccacagaatttctttgcaactttcaaaagggaatgaatttttataaagattatcacagaaataaaacaaaataattaatttatctttgttggctgtttaatcagttcacaatgtccatcattataatacaaaaatactgatgctgttgtttctttttgactcagattcgtaagctagatttttagtctgtcactgctagactaataatatttccggctgacacttacttgcacaacaaataaaaattaatagatattattgaatatttaatttaacggatatacatacataatcatatgagttggcggttttaagaaacgccctggcggttttaagaaacgcccaaagtggcggttttaagaaacgcccacctggcggttttaagaaacgccctggcggttttaagaaacgccctggcggttttaagaaacgcccaatgtggcggtttttaagaaacgacctagcaccgttacaaattcccaaaagtcgcaccacgcataaaaacagctttcgaatgagctattgagtgtttggagaagtaaagttttcaattttatatgatttttgaaattaatttatccctaggggtcagtcacatgagacgagcgtctgtcatttgattccgcttggctgcggtttatttttttatgacacttgataaaaaatcacaaaatgaaggttcatgcataatcagagcttagattcgtgatctgagtatttttgaaaaaagttcagaatactgccaactttgaatttgcatcagaatcatatatcgatcgattcctctcagtgagggaagtcgaatggtaccatttttagggcgcggcggcaattctgaatagagttacagacccgggactgaaatggccaaatggctttgggactgaaccgtccaaagccataaacgcatggaattgcgaccaaataaataccaatcgatcactcacggtctgctaatcatgaatccngagggaattttttggataanaaagaaattgacaaaangtatggctcctcaaaa

SEQ ID NO: 22224 - DNA, 1531 bp, Heterodera glycines
  unsure (1)..(1531): unsure at all n locations
atttttttttttttttgtttacttttattatttctgataaatnttgagaatggagaaaaacaccgaaagcctttccaagttggatcctagcgaaagtaattacaactttctgttccctgtaacaaaaaccacttttagctttgggaaccgatgccctcttacaattgatggaactgatcaaactgaggcctaaacagaagcaggtgacccaggaaaagttttatgttctttatatctcttctgcattttaagggggaagtcgagtcggaaaaaagggaaatggaaaaaccaattgcggactttcaccaccgcaaaacggatcagataaacccggacagcagtgaactgaagaaggaactgcgtgaaaaagggaaattggaaagttacggacgaatcactgatgaaaagggggaggagaaaggtaaaaaagacaaatcaattccaaaatttattttgttgcttttcagattcttggggccatgcgcttcagaaggaattggacgaaaaggtgcgaaaattcagagagctcaaccgaaagaaatgaacgagaatttaattgattttaccggcattttcactttttcacaatgttagaaatttatagcattattcattttgtttgattcgttcattcggcacaacaactcaaaaccagaaaatccagggattatgccacacagaaaattgttattaatataacactttaatatccaattttgtttcctatgacgaataaagctctgaagctgtgcactagacaaggcaaaaccacggaagtagaaaaggaaaataaaacccattcccctaatttagtctgcaaaaaatccattcaaaatttattcattggaaacaaattgaaaacaatagacagctacataaatattctttggacaaaagatacaaaagtcaatcaaagcgaacaattggaaacaaacgcgactcccccgggtttatacaacaactttgttcatgttcaaacaaaccttatctttttggtatcattcgaaagcacaaagtctgaataatgtcacaacccgaaaacccaaaagaagacaatcattactttactcgcaattgccatcatactagcatctatgcttgataataattgctgggtcgttaacagaataaagacggcgaatgtatgtacttcacacaaaggcagtgttgacaaaatggttctatgtattaaaacaaaattttacaacttttgttttttttatcattttattatttaaaagtgacagtgatttttgggcgctggccttttggcgctgaattctttaagaaaattaatttttcatagtcagtcaaatacaactttttggttatcgacatggaattccgatttgcaaaaaaatggaagtctggattccgatttccgaaatttttgcaaaaattcggaaatttattttttttaattttttgccaattcaaaatggtttattattgtgaaataattattttgtatgtggctttctacttcgaccatccctgctctattaccgtatatgctctaattatagcccat

SEQ ID NO: 22225 - DNA, 1584 bp, Heterodera glycines
caattggccctttccccccgttttgtttttttccccctcaattagggatgatccatcccacccttttcccttttggcaaaggaacgaacattttctcggaccatttgttccatcccccccctccctccctcccttctcattttctctttcttccccttttttttcacaaaaaattgagtttttacaatttgatgtccaacaaaaagaagtgcaaaatggaaagttgccaaacgcacttttttagcctcattttgttgtgacgaaagaaaagatgggaaaacgcagaaaaagggggggggggtatcagctgacaaaagcaaaaagaaagggaaggatttgatttcaaagcaaagactgagagggaaagtgggcttatgaaatgaagagacgctccattgtaaaagggacggagagataagacatgaattaaagaaataaagacaaaaccaatggcaaatcgaccgagggaacacacaacgaaatgccaaccaattcagtctctgtctcccattgtacgccgtcgccaaaaatgcaatgattcgccgatatttcgccattaagcgcaccttcccttccttccctctctgtctgctctcatactgcaactcatccatgctcaactcgctcgcgattggtatcttttgagattgaatgacctccgaaggattggaggagagagtttagaaacgaaaggaagggcagagatcataagacagataagggagcacaggttgacaaaagtgaccactgcaagtgatcaatcagtacagcagaagggccgcgaagagtaaacaaaccaatggaaggaaaccgaaattggactcccccccccccaccgaagcccaacttctcaacttattttgagacaaggggcaccgcccaccttcaaaatccgtgtattcgccgttcttcagaaaggcgcccgacccaaagtcaatcagtttgagttgtcctgtcttcatgtcgatgatgaccttaacgcatttgggatgaatggaaataattggtgaagtcagctcacattttcgtctttgatgtctcgatgaacgacggatcggcccgcacaagcgatggccgtgtccacaatttgtttgaaaaagaagcgcgtgaccgattcgtcgagggcacctctgacagtgataaagtcgaacaggtcgcagtagggcgaaggtcgttccatgacgattaagaagccgtcgtaacgttcaaaccaatccagcagcagaatgactccagggcaggcggaacacttttcaagcagagcgatttccaacggaacatctttgccacgcagctgggcccaatcggtaacattgcgcctggccacgtatttgatcgccaccggctcccggtccgcgactcgaaaaccggaatagacgacgccgaaccctccgcggcctaactcaggccccaacttgtaattgcgctcgaaaaagtgcaggtcgtacgctaaacaggaaatgaaagaatcagcaaaaaatattgaaatttaattattacgcttccttcgtatctaaaaaccaaaccatggaagacatccctgtctccccgctcccccactctctccctcctctacatccctct

SEQ ID NO: 22226 - DNA, 2856 bp, Heterodera glycines
  unsure (1)..(2856): unsure at all n locations
attaattttcatttttaaggtgatcgccaatccgaaccctttggccaatgcgccggnaaaattcaaaaatatttaaaacccgaatttgcatcaattacaccgtcagtttccttcgtttgttcagacacgcatttgggcgaaatttgggtgtccagcgggcacaatgccagcgggttcttttcactgttcagtgaagaggcgcatttgcaaacgaatcatttcaacgccaaactgaagacgggtgacaccagcacggcattcgcacgcaccggctatttgggcttcttacggcaaacgcaagcgatcacagcggacggaggtgggcgaagggagagaacgacggggaggggagcaaaaggaatggcaaatgacatgagacatttaaggcgaaacaatatttgaaaattcgcatttttggatcgaaaaatgaaaaataccgtcgattccaagtgtgtttttagcatgctctttcgatttttttctaaatccaatgcttcccctttttcacattgtcagaattacacgacgcaatctttgtggtcggtgctttggaggaagcgctgatgctgcgcggaatgcgcttccatccggtggacattgaactcagtgtttctcgggcacaccgccgaatcgacgaaaggtaagaaatcacgtcgatcaatccccccgttgttaattgcctcattagctgtttccacggcgcttaaaattgccttcgttaagctgcgtgttcacttggacccatctgttggttgtggttgcggaaacgcatgcccccgaggcggaggcgctcgacttggtgccggcgatcacttccgccctgttggaggaccaccatttgatcgtcggcgtggtggtggtgttggacccgggcaccatcccgatcaacagccgaggggagaagcagcgtatgcatttgcgtgaactgttcctcaggaccagctggaccccatttacgtggcgtacaacatgtgactgctgctgcttccgtcttcccacagcaatcaacagccgatcgaccaaaaatgcttacaattagtcatcactttgttgacacttgccagtagcacatcccatcacattctttgcatttgcttacacttttgccacttttctgttgtgtacattgtttccttttttattattctttcacagtttccttttcgcttaccgtatcccaatagcgataattattgtgtcatgcttacgtactgtattttttctatttttgtccactgctcaccaaaagagtcactttcaaaacatttcacacacattttcccattatccaaaaatttaattgattattttttattaatataaaggcagatgtttttttttgaaaaagatgtgaaaataatatgcaaattaaacgaccgataaaataaaatcaggtgttttttatcattgtaaggcaattaattattgacgcagtgaactagcgagacgagaagcaaacaattgccatttgggaaagactattcgatgttctgtcaatgtgaaaataggcaaaaaggaataaaactcccgagaaaagagactaaattcagagaaaagggagtgaaagcgctttcaaatttttgggcctttcttaattcattttgaaagtgatcgtttctggtagaaatagagcacgtcactgatttccttccgcgcctccaaagcatcgatcggagaaagggcactgattttgcgcagagtcattgccacgaatcgacctgtgggcaattgggacaaaaaatatgggagaaaaaaagacgagaaaaacggaaaagtcgggaaaaaagaaacgattcaaaagagatgccgcataagtttttgtccgtttaaattattcgtttggtttttttaaaggatgtcattttattttctgttcagagtgtgccctctcccgagattttgcgactgttggacacgaacgaacggataaaaggattaggggataattcggcaaagcactgcaaaattaaacttgggtggtggtactttggccttgagggtttttgccccgggattccattccaattttttgttttttaccccccctccccccgggggattttccctggtgcgttctgtccattgcgactgattgactgaccaaaacaggctaattcttccgcgtcctcctcctctgtttcggccctcctctgctgctgctgcggcacaattggcgccgaattgtcacgcgcggcggaagttgaaagttgggacggaacggggaaaagtgcggagggattcaacggaatttgggaacaaatttcggcaacagcgcccctcagaagcgaaggcgacgaaaaaggaggcgaagcagcggcgggagaagaagcgaaagaggaggcggaagctgtgctgccggtgggcatttccactgaaaacgaaaaaaaaatttaaaaatttgccaaaagtaaatttccattttctaaggtccaccaattttgagtgccgtatttttcagtccccggctcccttcgcccctgtccccccttcccctccctttttgtccctcccaccgttttcccttccgccgttcgtcgcccctccacctgcggtgatgtcttcgcgctgatccgtttgtccctccgccggggtcggttctgccatttgcgcgccccctccgctgcttcgtccctccgttgtgccgtgccgttcttcgtcctgccgttcgtcctcctccacttcctcctcctcgtgcttcaccatctcttccgccacctcaatcaccatcgtctgttgctgcttctgttccacgttcgcgtggtgttcggccgttgggcactgaaaaaggccgccggggctgctgctgctcccgttgctgttctcctccaacggcgtcggcagcgacgcgtcgtccgc

SEQ ID NO: 22227 - DNA, 1802 bp, Heterodera glycines
cctaatcattgttcggtcggacgctttttcgcgaaattaattaatttctggcttaaatagaaattgtcggtgcccccggcctcattttaacggagtgaggctcaacggcacaccctaccaacggaggcaagaacttttctatttgtgtgcctggtcattttgtgaaacatttggggctcttacgccatgaatagcctcccattgctaccaattggtggctctgtgcccccaccatccactcaacccatcatttaactacttctcccccccccccacttttttacttcgttcaccgcccttcgataattacggcctttacttgaacttttctctctaacctactcactcattcactcactcgtgtgctcattttactcattttgtcacctcaacaaagcatagacatattattccgttccatcgtctccccccgcccgcccattcaatcgggtccaagctgatgacgagttaatttgccctctcgtccccggcagttgctttcccctcccccattcaatcctatccgccggctgagcattaaaagtgctgttcacactcaattgaagagataatatgtgtgcttcttatggcccttcttctcccccagctcgacaattttttcttcattcttccgaatagcaaatgcccccctctctcttcgtctgtgtaactcatcatactcaatgaaaagcatccgtagtcagtcccaacagatttccgttgaaatctcaccactttccactcatttcatcaaccaatgttttttacacatccccaaagggtcacacattcgctactcatcattgtgtttttaaaaagcacataaatcgaccgaaacaaactgacgtctttgccctatgccttcgccctatgcgtgttcccccaaaagaaaagcatctctttccggcccacaaggggcgacagaagcaaaagggaggggggggggggggagaaggagaggaagcaaagggtgcagcggcgcctgccgttgtttccgccaacccaaccgccacctaaaccaaaatgttgtacataaacttaaatggaacggcggcgctttgaactgaggggacagacgggcgaacggatggcgaggggggtggaggagttggggggctttaagcattttctttggccacagtgaataatttgtactatccggcctcactcctccgttttggcagcttccactcgcccccactgcccggctaaagcggcgcttgttgctgtttgacaatggcttagcctaacttaatttgtcgttgggccttccgttgcccattccaaagggtagcatcaacagacggcctcgtctaacggctgttttgtggttaatcaaagaacggcattcgtccgtcagcccacacttttagtgagagtggaaaaagaaaaaccgacacaattggcaaaaaatcaatggaatcacaaatctaattgaccagtgatcataatgcttcaataaatcgctttttaagtgcttgagcactgattgtcattcttacaatgactaattataaccgacaaacaaagggaaacatcgacggattattttcttcggcaccccaacaccatcaatgacgaccaaaatgacattggacgacagaataaataacgctgaaaacaacatggccctgttcacacctttcatgtcacatgccaaaaattatgacgacagtggcgacaaattcactttcggcagtcaggaaatttgcacttttgagcaatggacccaactgccggatcagccgggtcccctccgcatcaataggatgatcgccattctcgccatgttggtcattctc

SEQ ID NO: 22228 - DNA, 2217 bp, Heterodera glycines
  unsure (1)..(2217): unsure at all n locations
aggaattcgtggtgatcatgcccacaatgnaacggtgcacaaatgccggattctaaatttgccacaaaagcattgcgcaattattngagatttcacgcattaagagttttnaatgaagaacaaaacggaatggaaaagttgcatttatacaaaaagaaggtaaattaatgcatgcgggacgtgagatttgacttggaaattaaaaatagttagattataggttcttaaaaagtggtttattgtttgcgttggggtagtgcgctggtctcaattttttcggtcacaggttctaacccactgcatgcaaaaaccatttaacaatttttatttttgctttttttatgcaaagtcaattatcgaaaatatttttatgaaaccaaatttttattttttattattttaacaccataagatacgcaatgaagaatgttagacaaaatcaatttattttaacttaaaggagatttactgcttctttacctttaatgaattttttgattttaatgaaataaattaaaaataaaggttttattgataaataattttttttgataattgacgttgcataaaaaaagcaaaaataaaaattctgcaaaaataaatgctctatccacccaccaagtttcattcagaaaccccacggatacctggggaccttcctttgttagataaatcctaaaatagagaaatacttattaattttgcaactcagggggctgaaatttttggaagtcggaaatgtgagcccaaaaattctgaagttggaacttagactttatcggagtttacaaaattttattggttcttaaaatttaattttatttaaaaatttattgaaaaattgcctataagcggtatccgttttgagttatttttttaaatatatgagttttggtccactgttaagttgcatagagtgtcattctgaattggcaaaatatatatatatatatatttttttttaatttgaaaaagccgaaaatttaaaaaatttttagaccttttggagaatttggcgttgaagccatcatttctctcgagttcgaacgacaacatttcggagataaaaatcatattgttgaaagcgtacaaacattttaacattacacctgaagaggaaaaccttagtgaatttgaaaaaattacgcaaaattttgctaataaagaaaattatgaaaaagtgcagaaactggtcaaggcatttaaaatgagcagagtattggaacgtaatttgattctaaagattttttaaaattaaaaaatatatttgtccattaaatattcaattaatgaataatttattttttctatggattattaagaatgacaagtagtgtctaaaattgacataagaaagataaaatttaaccaaaaattccttcaaaacccattaaaaatttaatttacaaatttaaacaccatacgccaaactaaacggataaaaattaataaaaataaataaaaatttttgtgcatgtttttctacatttgattcattcaaaaactttcatttaggtaaatcacaaggtaatggcaccaacgcaaaaagaaccactcaaaagtaccgtaaggcgttggaacaaatcaaagctgagatggtaaaggatgcggattactgtaaggattgtgcaattcctaccgttacccaagtcttggcaacaccaattccgcttagtgaacaaaccaaagaattgatgcaaaaaggcgcaaaaaaacttggcacgtttttccaaaatttgcaatttttgccaaaaaacaaacaaaatttaagatgagaaatttaaaacatttactaagcgcgcatgattttcaaaactgtgtcaacaaatgaatgatgggatatgggaacagtgaacggatattgtgtgatgaaatattcattattatttttaatttcaagcatgatgttatattatccaacgaaaaaacatgtttttagatgatattgttaagcttccggtttttatgtcctaaaaataaacatcaatcagtcattttccgtgatcagagtgacccgaaaaacttcgaaaactaccatcgaaaaacaaatttttgacagaaaatgttaccataaaaggccccttcacaaatcaaattatgacagaaatttttctaaaaaatttattggttagacaaaaatttaaaaaatattatatataaaatattttattttattattatttggcttggataacgacgaggtgtaaacccaactcg

SEQ ID NO: 22229 - DNA, 1773 bp, Heterodera glycines
  unsure (1)..(1773): unsure at all n locations
ccccgtttttgggccccggggtcgtttgggccccaacacaaaaatagaaaaatgtgcttttttgaaaattaagattctaaaaactaagcctgagggatccctcgccacttggcataagttaggtttaattaacattcgctcattttttacaattttacttattccaaatcctattattttttaatagttattgatgtacattctgatttggacatttttcagaaatggctaacccaattgcaaccaaaaaacaaaaagtaaaattgtcttacgaaggccacctttacaccttcgctaaaatgagttctgatgggatgacaaaattttggagatgcgagttcaaaaaatcaatttcacattattttggagtttctccggggaatttctcgcagctatcgaatgaacccgtgaatttctgttaatttttacattttttattgttaaaattattgttgaatttatttttaaaatgtttattttacatttttatgctgaaatttaaaaaattgtttttactgtgatttttcatttttctgtacttggggcccaaacgaccctggggcccaaaaacgagggcccaaaaacgagggcccaaaaacgggggcccaaaaactggggcccaaacgcccccgactccagtgagtgacagtgaactatatgcgtctctgccttacgagagagcggagagagcacgcgcatttgaagagacgaaaaaatccaggaagacacaaaagttccgatctctagtttaaaaattagaaaattttgagtttttaaatgcgcgatccgcggcaatttgaatgcgcggccgcggtttttttctgtgcgcgctccagccctggtgtaaacgtagttttatatattatttgttttaattttttaatttagccccaaaaatggaaaacaatcaaattataacgaaacaaaccaacaaaaaactcgagcatgaaggatgcctctatgtcttccatatgttcaatgctgaccgtgacgtaaaattttggcgctgtgaacatcagcgtgatgaattcaagtgcaggggacgccttcacacaacgctcaatgatgtcgttctgaagacaattggcgaccacaattgcaaccacagtgcggcaaatgtcatcacacaaaaaatcgtcactggcataaagcggcgtgccgctgagacgatggaaccaccagcggcaaccagggcgcacacacttcagcaaattgccacgccagtaatggcgaacattccaacaaagaatgccacaaaaaagtgaaaatctaatcatttttttacgttcacatttttggttttaagctagtgaagcgagtccgccatgaaatcgaattgccgccgccagtgccgctaacgcttcagtcctccattgtttcgtcccgaagaatgaagtgtgcatgagcgcacaatgaacggcaccgaccgcacaaataacttcgccgaagcataccattgcacgctgcaactttcgatcggacaaggacaccccccgatctggaaattcatcaatgcgcgagcatcagaaaataatcgacgtggacttcgaacatttcctcgctggaaatgctccgccgcaaaagcaaagcgttaccgtgaagtggacagacgaattttgaggattctggagcgctacaatgaggaaaaaacgcagccgcaaatcgacgatgatcaccaatatggncaaaaccanaataaccccgaattgatttattgaaatgctcaggngaatttcagcaatacccaatgggtaaatgaanncttgttatttt

SEQ ID NO: 22230 - DNA, 1957 bp, Heterodera glycines
tttcctcacaccctcttggtagaaaaattttttgtttcatttggcaaaccatctttaataatcgaaaaaagaaatattcgattggcaaaggaatcacaaggtatgccactgacagatgtgaaaaggatcgaagagaatatgtataaaaaaactttgtgataattctgtatctaccaattcagtttttgactgttgcatagtttttacactgagttcaattgtccgtttctcatttgaggaatggtcacttcgtacggtgcgccatgcgaaagcgacgaccgaattttgaaagcactgcaaattctcgtctattttatacccgaaacgcataagcaatgtttggaatgtttgctgatccatttgaaaagagtgtcggctcattccgacaaaaacaaaatggacgagtccaacctcggcctgctcttttcttcctacgtttttccagtccaacaacaggtgaaatcaaatcaaaacggatttttagcaatatttggacacacatacttgatgaaaagggtcgactaattattgttcattgtcaatatccaccaaaatcccccgacataattacaaacgaacaatttattgggaacaaaattcctttaaactcactcacataatttcctaacttgtcatgtcaaaagcaccaattttatttgtgatttacgatcttaaaggcctcaaaaatctttcggtgttactttatttgttttggttttgttgggtattttatgcctaaacccaattcgacaaaaattacttttatttagaaatacgaatcaattgaaaaggcaaaagacgaaattgcgcagttttgtcgtttgtttcccgttttactcaaacattgcgacgcgctgtttaaactgcccgctgagctcgtgcagactttcgacgcttctctaatgaaaagggcccttgagcagcagaattgcggggacctcacatccagcagcactccctcctttccctttctctcctctgttggtcggtcattttgtgttgttttgcattgttttatttgtcatttttcaagccaactccaaatcgaaacacaaaaactccgagaagagacgaagacgacgcgggtgagaattggcagaaaatcgcaactgaaagcatagacaaatttcagaagtcgccattgtgcactcgtgctcaaagagagtggcgacgcccaaccaaaacaccaccgatttggaagtggcgaagttggcggcgaacatcgcatcgatggaggaaggctcggccaggtcgcggctgttgaacaaaatgatgactgtgcagcgccagaaaatgggcattaagaagaagaagtccattctccgggtgctttcgtctgacttttctctcattctttttgctttaagcgtgcacttccccggcggaacagttgagcattaaaccaaaacaccaattgcacttcggatgattgaatctcctcaaacttttcacttttgtattttcattcacttttttcaaaacagggaattttatcgctatttatgcataaaaagcgcatggtttgataattttgttttcgtttctccctttctttgaaattgcttatctttcccttcggaagttttcctccatcactaattttccatcggttcttaaattcacataacccaaaatgtcttttactgtcgtgccaattcttttttgcttctttttgcctgctctttcgatttataaggtgtccatcctctgattggttttgtattttgtgaatttttttagccaaattgggactcaattgactcgcgccctttgcccaattggtacgacgaagccaaatttggtattttttcgcattggggagtttattcggtgccggcatttgggtcggaatgggtaaggccgaaaacagacccatttgattgttgaagttctttgaagttttggtggtattggaagggacaacgtgacgcaaaattcgaaagatttttcaaaaaca

SEQ ID NO: 22231 - DNA, 2226 bp, Heterodera glycines
aatttttttaaaggatgtccaatatcaaaatccgatgattcctttcggatctctgcatgccaaaatcgacaatttaatttagtaaaaaaaattaataatggcgaattatgatataattaatcgaaaactatttcacatagaatctaattaataaaaaattgttacatatttaaaatatttgcatcatgcttagaaggtcaccattcttatattgttgatgagtattgttatatattgttaacagatagattcaggaataatttatttaacttttaaactcaaaacataaacaaaaagcagtggttgccgcggacgagaaaaattgtcgggacacccaaaaaaaagtttggtttggcttttgggattcgggcggggcaacatgatatgtaatcgagattccatccaccttccccgatccttaaaaaagtcatataataaaagaatagaaatttatttttaaagaattttatggtcgctgaatacgacgaatttaacattcaacccgccaattccgcttctctaaccaggatttgaatgaaaagtcgaaaaataaattttcaaaattcaaatttattctcagatacttaattttaaatgctcgaaattacagttaataggcgctgtttagcattgtcattttcaatgatgttgctataattaaaaaccaaaaaaaattatcgttgtaagatttttttaaaattgctttttgaacgatattaaataattaacgctaaatgtcttaaattttgcattagaacgaattgtacaagacaatatttatcgtgtattattatgctgatgaagatcgtgattcagagctttgttcataaaatcaaatcaattttgttcaatgaaatgtgtgaattgcgcgattttccgacaacagcagcaagagccgtgccatctcgtaaattattaaacgatttgatcaattaaataatggcgatttatttaattattatttttttctgtttgatcaggacacacaaaatttgtgtttaacgacaacaaaaataacaaagaaaaggtgaatgtttgtcatctttgaattttaataacgtgtttttttttgttattcatacttttttaattttgattgtatgtatttaactcatccggacaattatccaaaattgtcaaattattcattttaaatatttttctaaatataatttttataatattttgctttatttaaataaatattatacaacaaaagcatgaaaattgaaattactacaacacatgattataattcgagaacaaagaatgtcaattaataaagtcaacacggaaagagcggacggcggcggaggcggcgaaagaatggcggggaaagtggaaatttaaatgggcaaattaacaaattaatgagtgtaattagtaaaacaaatgaatgacattgaagcattttgtcctgagcagttcctgctgataaatggaaaagataagaaaaagctaaggcaactgataagttcactgattccttgaaattaaataaaatatttccaaaatatttaaaattatttaaaaatgcaccaaataattaatttttatttatttattctgttcttcgcacctaattttgctgaaaaacttcggtatgtacagattatttggcgccatggagacagagcgccgctggaaaagccttaccccggcgatttaaatggtcaacctaaaaaagaaaaataaaataaataaattaattaattaattttcagatgaaagcaaatgggccagaggatggggccaattaacaaatgttttattttttaaatttcgaaattcaaacagtgcaaacaaattcaggatggcatgcggcaaatggaggagcttggccagttcctccgggagcgttatgccgctgcaaattttttgccccaacattttgacagaaaagaggtaagaaagtgatcaattattgattgattagggctatcaatttgtaaatattaatctccgaaatcaaaaagtacaggcaatttttaactggaatttgatctgaacgcctaattgtagataaaagaaaaaaaattatcctattattaattcatggacattgatttatataattaatttaattattttatcaatcattgagttctttcgcatcagctcagcacggaattaattgtaaagccaaattgggaaggtgaccgaaagttttcgccactgttcgtttagtcaccgagaaataatttaaaatatttctggatttttttt

SEQ ID NO: 22232 - DNA, 1951 bp, Heterodera glycines
atcatgaaatgtccaagccacgaattgtcaagctacgaaatgtccaaaagagtaaaaaaccacgaatgtccaaaagtctaaaaaagctcataaaaacccggaaaatggtctattttagggttttaggggttgctgaatacgaatacgacctttatattgccctttgccgaatcctggacccaaatataaacataaaatagcaaaaaaaaaattcaagacttctacaaagggtgctgatcaaaattcgtagggttcccaggagatccaaattgtgccatcatttgttttaatagcgcccgccaaaattcgcgtaatgaccgcgtcctgcaggacgtgtattgtcacttgtgagtaaaatggctaccagatcgggccgcgtccacctgtctgtccataagtccgagaaagcagtggtgacagagaccattaaatgttttttcaattttacttttataaatcataaggaccataaagtcttgcgtgttattgcggtcatacaagacggtatcctcaccacgttttcacgtaacattgctggaacgacaacggtcaacgggtttggaagtcaaaaaatgtcgaatttgtcatcggaattgtgtgattgaatttatattttccgttttacgaattaactgagaaaagtttattggaaatatcattgcaaattatttggcaaaaattgcagtagggatggcgaaaaatttacctttttgattgaaatctgtaaagagtgagttcaatttttttttctgcgatgccgattggagaatttttgcctcatttgttaacagattttacgctaaatggccaccccattaaacttcataaataagtaaaattacacagtttccaatcatcatatttttaaattgacattccggctcttccctggtatcgagtttagaagttgttacgccccaaatccgaagaggaaaaaaacaatagtttgacatcggacaataaggggtcgaaaacaaatagtttatgccgttgaatcgggtgaatttgaatttcttcgacgaaaatgtcgggtgaatttgaatttcttcgacgaaaatgtgccattccccgaggccgactttgaatcggacgaagaattgtcaaacaccttgcaacctgatcagactcgtttgcaggcctttgtggaggggcttcacatccgtggaaatgaagagagtgatgaagaagctgaggataccgatacatagtgaaatataattttaatattccactacaatgtgttttctgggattttataaatatttttttcttttttaggctaagtttccttatcattatatgtaaatatagctaaatataaatcaatttagaatataatttggagaaatcgttgtcgaaatatctattttaggttagtaggcgagatattaagtggatagaaattctgaagaaccgggcctggaccttcagcctccctaatcccgactccaaatcctcccgggtcaatgaaagttatagcggcggtatgacatggcgatctgtttattccggtgcagcaaaataaactcccattcagcagtgatcgatcaactgactaactctcgattgaaagagccgattaaatagacaattattggaggggcagtgagaaggcgggcaaatgtttagggaaagggaaggaaggcataaaactttttctctgttcacgaatcgcatataacccctaaggtatacggtacccattttccaagcccctgctaattgaggggcattttttttgaagttgccactcgaccaaacccttggcctattgcaggtaactctataaagttaaatgcccaaaattccgaggaatttaaacgtattttggtctagaaagaacaggaagtttcattgcagctcgacaaacaaaattcaaatgagaaatgctgagaagtgaaaggaagggaaatggtaaataaattggataagaagcgaaaaggcgaaaaga

SEQ ID NO: 22233 - DNA, 2213 bp, Heterodera glycines
  unsure (1)..(2213): unsure at all n locations
tcccttgtacacgtatggtttggtgttgtaaatggtgtctcccatccaccaaatttcgttgcctgctgtgcagaatggcggccaacaccaaattgggcgacgccgcaatggccgtctgcacgctgaccaccttcagatggaccatgtcgttgatggtccgcgtgaacaactgcgatccgtccggaaacacgcgtttcaatcctcgattttcccatccgccggaggacaaataatcctaaagggactgaaaaagtagaggaaagtccaatgagatgctcaatcggatgcttttccctattttagctatttttcgaaagtgagggaggagggacaaaaaccgaaaacccaacgatttccaattaaaaggcactcactcaccgcctttaatcgggacaattgctgtctaaagttgtactgcaattccgtgctgaagtcaaactgtccgtttttgattggcatttccaagtcgtggcacactttccaccgtttgtcctcagcgaccaatttggccaaggcactcggcaagtacaacaaacgctcccattggtctatcattgtcatcagaagtctcttcactgcgtccagagaatccaaaacgggcgtgcaaatggtttttcgacggcttaaaaaacaacaaacgttttaaaatcttgaatttttcaaaaatgcatagtttgtttttgttttaatttttttggggggggggcagtttcgccgcaattttttcagtccgtaacttacgtcaatttactgtttctgctccgtttggtgttgtccggcgtcatcaacttgcccattttgttgtcccccggcattttgaacagcgtcggcatccaacaggtggccatgcacagcgaagtcattcgaggcgacagtcgcgtcactgtgcccagaaaacggagcaattgcgtcagcgcctcgcggtgttcggtgggcagcagcaaaacgcagtggtgcagggcaacgaagtgacgctgctcgggcaattcgctgaccattttgacgacgatttccgagatttcttcggtcatcagactgcctgacaaactggcgaagtactgcttcagcgcatccgcaacgtcgtaaggcgacgagtcggccaacagatgggccgggattggctgatcagccgagagagccgagcacgcctcgctgatctctttgatgcgcacgctggcacctgacaaaatgaggacggacagattggggagggtggcatttgatggcacgaaaaagagcgattaaatgttgacgatgttgtgagtcggacgcaccacttttgcggaagatgccatccgaagtgtgtgcccggcacttgagccattccataatatcgtagacgaaacgcggcaacggactcgcgtcggaagtgagcggcacaatggaactcagcgacatgccgtacagagaggacgatttagagggggagggacacggggaaacatcggacacgacggaggaggacggattggcggaggacagatgggctgaaggggggggggggggagagtgaaagcgaagtaaagggagagcaatcaatgggatcggattgaattcgaaaatgtaaaagtgaattaatttttaaaaatgatggaggtggcattttacatttcccaccattttaccacctttgtccttgaactggcgaatgacacttctcacccgccttgcccatcggttggagtcgttcaccgtgggggagaactgctcgcaaagttcacccaattttgaaagggacgcattgtgtagccaatcataaaaattattgaaatttgatgcaaatgaaaaaaaaaagtttattaccaaaacagcgacattcattgaatcaacgcgaagaaaacggtcatcgtttagcgattcttcagcaactgattccagggaatcggtgttcaatggaattctgaaaagaaagaaaaataaataaaaatgaggagagagagatagagaaaaaagtaggagaagggaagagaaaaaacatatggaaatgaaaaggggaaaagaaagagagggattggggagtgaaggaaggaagagatgggggagagagagaggagagaaagagagggaaagagagaggagagagagagaaaagagggaggaaaaggagagaaaccaaagagagggagggagagagggttaagtgaattaaataaattaaaagtttttcagtagtacagacatcgntggacgattcatcactgatctttgctgat

SEQ ID NO: 22234 - DNA, 2357 bp, Heterodera glycines
cacagctggatcctcattgtagagaccggcgcgggacgggatcccgcgcgggactttgcgggattccatttcacaatcctgcatttttgggaattgtcgggattgcgggattttgcaggattattccgcgggatcctgagtttcaataccgcagagcaagacccgagaattttgtaattttgtgcgggatcccgctggattcattggatttttgaaaattaacaaaatgccatatttttctagaaaaatttaattacctaattaagcaattttatttcatcctttttgtaaacatttttccgacggatcatatcggccggacacccaattcgtactaggttcaagtactccccccatccctccatcattgccatttttccctataaaatttgaagcggatctacgtgaaaattgcaactaaaattttattttgccaagagtaccaaaaccagattatacttttagaattggttgtaaaataccaaaacttattctatcaataattgaaaaaaactaaaagaacaaaatgatgctaaagcatcaaatctgacagctcttggataaatcccggaaaatcagtttcttcaatatatttagaatttcgccggtacttgttggactgtgccgtcaatatttaattctccccatatacttttcgacttttttgccctcctttgcctcatccatatgatagactttaaacgaggtattcaatttgcattttttttttcttgaataatttaaagttttggttctcccggatttgaaaatcaatccaacaattttataaaccattttgtttaaaggtggtcgtttaagaccatcaaatcagtctatttcttattgagaatgaattgagtggtagaacattcaataaaagtgcagtttgctgcccaccctcccaattttccgaaaaaactaatgggggaattttgcactttgcaattttctcagcattttgtatttttaaaattgtatgggtttaaattacttaattgttttatgtccatttaacatttttttcccttttcagaatgtaatggtcgacttggctacactcttgttgaggtaatttttatctcccccttttttcccaatttttttagcggtgaaaaaacgcatttttttcaaaatttccttggatgatggcatatttgttgtatttcctagggtgattttcccccgaattttcaggatgattcttcactgttgggtggcatcacttttcgctcaattgtgtccggtgacaaattgccgttgttgcgcgactcaccgcccgagtcgcatgttgagccggtggcgcaactgttgcgatctccacgtgaccacatggacaacatcttcaacccagcggacaacaacattgtggacaacaccaatggcttcgctttggcgccttacaccgaacagcgacgtaattttgccaaaaaactgatattccttacttgagctagacctggacctggatggattcaagctttttttttcctggacttggattttcctggattttgttctaagccatgtgaaaaataaaaccaaaatgattacttggatttaatttcagaatttattgttcagagtgcagtttttttgttttcaagttatcgaacactgattaatagatctaaacgattttattatggatattcctgagcaattagttgacttttttaaacatttgtttgttttttaaaataaatttaaaaaaaatccaggtccatgccatgacaggcctggatttttgtcaggaaacgcgggtgggcccgggcatttttcaaaatatcgcccttttcaggtgcgcccagcggagtgttggcacagcaaacgatgcaacggttcggcaatgcgtatttcatggtttgttttgttttataggtggcatgcttaaattcaaaagtcgaaaattcaaaaaaaaaaaactttttttctttgagtcactattgaatggccatttgaattggtgttgcaatgcgattgttgaaactaattttgcttatttttgaaagatttgtaaacaaaaaggcgtgaaacccgagaaatttttgaattttcgactttttttttgttcgagttcgggtctctggtttcggaatatgtgccaaaatgaaatagtcataatttattctttcttttcagggtaatagtaataatagcactaacaacaccaccacttcctccgcctattcattggcaacaattggcaccaatacgacgacgtacagtggcggggcctgcaacggcagcggcggcacattggtcacaaacgcaactggcacaacaggcggacgtcgtaaagaggtgtacagtaagttaattgaatttatgaaaaaccaatattccccataaaaaaaatt

SEQ ID NO: 22235 - DNA, 1536 bp, Heterodera glycines
caattcataaaatcaatttcagaaagaaaggactttataaatagcatttctacgttaaagttttttgatttggttaagtttttagtcagagccttccaactaaaaattttaaaaatcagcatttgaccaacaaaaaaaaaatgagcattcgggccaggccgtttttgcgcagcggttttgtgaggccgtttttgcacgagtgcctgttttagtattagaattgttcagatttatattttatgagacattggcataaatcggaatatttattttgaaaatttattaatactctatttattaagtaaggtagttaattaataatttttttttattatcattatgaacttatgaattttataacagcttaatgatggagaagaaattaatgatttctgattcttatagtttattctattttatttttttcatttacttcacattaattaaggttgtttattaatcctgaagagaattttcctaaattactatttaatttatttatttttaaaaactatgttaacatattttgggtttagcatcaatatactgtaaatgttatcattttttgttaaagattttttgtttgaaattcacattaatatcgtttcaaaaaataatctgtttagagaaactaaaatttttaaaatcttaaatatctataacaaacgcattctacagaaattctttaattcatttactttttaaaataagcaaaatttttgccaataataattatcaaataatgattttattattttttggtgaattaaattaataagttccggctaatttagtaaaattattattttctattctctttgaaaatatttttaattaattttatattagttttttttattttcgcatccttgtagaaaaattgctttggtttgaaattaattaataatatgttaattaaattttattttatttcatttaattttcgattttacgatttaatttgctttgtttaaaagaattcttgaatatataatatgatcagatttatatttttcttccatataatatatataataaaaaaacaattaaaatttatttttaaaaataaatgttttagaaaagtttaaaacagaaattttttggtaattacgaaaaattggttcgatttttcgcgtactctgatgttctatattaataaatgattttttactttttttctgaaattaattgtaataaaataaaataaattatttatttttttgctttaaatcctttttgttttgtttatcatacatttatttggttttcaccgtggccatagagtggtgattaatgcgtttttatgctaatttttttaatttttgttttaaatagttataattatttaatttttaaatacaatatttaattaaaaaaataataatttatgcttatttattttaattaatatagataaattatgattattaattctttaatttttcctaattttagtcttttaaatttttcgtttttttcttcttaatgattgacaatttatttttgcaattagttaataatttctcgtcatgctca

SEQ ID NO: 22236 - DNA, 1551 bp, Heterodera glycines
attatttaggcactccgttgggccgatgaaaaatgtcttcaaaatgccatcgaatgttccgctgagaatcgtcgtgctgcacttggcccggcacttttcaaaattcgtttccctctcatcccatcagatgcatttgtgaagcaaatcggtagaaaatcctttttttgttccttaaaggatttcatttatcgagcgagcatttcccttttcgcagttccttctggtgttctgtccaatgatgaatttgtcggcgttttccaattccattgccatccgaatttttgtgctgtgcccgggctttatccgctgaaatttccaactcaaacccgaatttctgattggaacatagccaaaggcaacagaggcactgtgactttggaaattgagaaattttctgaatttgcgcgagaaaaagagggaaatgagaggagcagtgaaatcgaagtgttgataaagggaattccgtggaaaatatcggcagaaacagcaattaatgaagaaagcaatgaaaaatggctgggattttatctttggtgcactaatccaacagcagaatgtggtcaaaatattaatttggatttaaattaatgacattaattaagatggaaaatggaattgcaaatgttcggcaacctttcgaattgtttcactaaaaagcggcacggaaaatcccattggaaaattttatgatcgcgtttttaacaatgaaagaactatttcgggatttgaaaatttcattgtatttgcagtgagtcgataattaaaattctttttcgaatttaatgaccataattaaggaattgatggacccgtgcaaaggcctttatgacaaaggcggggacaaagtgactttggccattgacaactttgtggaggaagaaaatgaggagaaattcgatttgaatccaaataaatccaacgggacaattgtgatggaaattggcaaattgtcagaatttgcgcgagaaatcattgggagtgaacgcagcagcgaaactgtttttgtaaagggaattccatgtaaaatattggcaataatagaaattgacgaaaaaagcaatgaaaaatggctgggattttatctttggtgcaccgcctcacaatcagaagaaggtgtacaataatattacatttaacaaatatttaatttatttaagatagaaattggagttgcaaatgttcggcgacctttcgaattgtctcattaaaaagtggcacggaaaattccattggaaaattttatgatcgcgtttttaacaatgaaaggactattcggggatttgaaaatttcatcgaatttgcggtaagtcggtaattaaaattcttttttctaataaatgaccataattaaggaattgatggacccgtgcaaaggcctttatgacaaaggcggggacaaagtgactttggccattgacatctttgtggaggaagaaaatgaggagaaattcgatttgaatccaaataaatccaacgggacaattgtgatggaaattggcaaattgtcggaatttgcacgagaggtctgtggaagtgaacggagcagcgaaa

SEQ ID NO: 22237 - DNA, 1483 bp, Heterodera glycines
acaaaaaaaaatgtctgacaatccaaaggaagcggagaaagaaatggaaaaagcgatgtaaataattaatctaaatttgatttccatggctaatcattctgcttttccgttttcagcttcatctctgctgattgttggctcgaagtgttcggtttgcttccgccatctcagcttggccttggcattgcgatgatcagtcaccgatttgactattacgtcgacgaacacttcaaaacgcgcaaatggacattgggcaaaatggaaattcgaagcaaaatacgacgatggagattgggctacttggaaattcgaggcaaaatcggagagaatggcgcaattgaaatggaaattgtcaattccgatggaaaagaattgccaattccgcaaaatccattgccaaaaaaagtcatcggattcgaaagcatttcgatcgagtaaaaaatgaattgaatttgtacatgattttctttccattacattcctctgattttcagcttcatcgaccaaaatgtgctcacttttatcggccattttcaccgtcttttctccgtttgttcagcaaaattgaccattcacgcaagtgttcgcatttcggagttcgttcagttcaccatttggccgatgttcaaggacagcattcgtctgttgtatttgagttcctttgttttacgtcaaatccgtcaattggccccgtcttttctctgcaattggccgtctctccaatttgtcacactcttttgcgactttttgcccgaattgccgcctgatgacagtgccaacacgtcagagggccaagcagtgaccaaatggctgttctcgcctcatcccgacaatttgccaaagctgttttatgtccaaatttgggaagatatggggcaacaatgggcggcaatagtggaacaaatcaaagcggtgatttgttcaatttactttgtttttaattttttttttttttttaggaattttccatcgcttcttctcccgtttctttcaacattactgttgcctttatgccgtttcattcgcttcctgttgttgtgccatttgaaatgaccaacgcattgactggggagaaattgaaattgaaaacatcaattggaactgaggacaatgaagatatttttgagctcatccgttgttcaattggcgaaggaagtgagcaacaaatggaaaaggcattgaatgaattgattgatggacgagagaacaacaaaattgagatttccatcaaacacggcggagtcgacgatgggtgaacaatttttaaaaatatcaatgctaattttttgtgttgtttttaaggcttctcgacgatttgccgtccgggccgagtggtgatcagaaacagcagaagaaatgaattgattggttgatttatgcgattatttgatctaaatgttgagcgttgttatttaggtaggtaaatgttgatcgttgttgtatttgatttttgctcattcacaaatcaataaatagggtctta

SEQ ID NO: 22238 - DNA, 2623 bp, Heterodera glycines
  unsure (1)..(2623): unsure at all n locations
gcatgcctngnncaggtcccagtttttaatattgcacacgatgaagtaaaaagtcccccccagcaccaaaaatgtataaaacatttttacgaatttcttgaatcaaaatttacattccatgaaaaagaaaaggaggtaaacaaaaaatgcaattgccaatcaaatgaaaaaggctcaaaatattgatctaagctttccgatagaaaatcggcggctgatcattggccgatcacctcgaagaattcgcacttttcttcgccattttctatcactttcaatgacaacaaagcgaaaattttaggctctttttctataatatttccaaagatttcgtccaccattttttcaccgaattttttcacaacaaatttttgggatatttgctcataattgccgccagtaactttcagttcatcttcggtcaaatcattctttaaaaaaaataatgaaaatttttcaaaacttttagatatggaattaaaaatcggctattttttggaatatttccaagaaattaaattgtttttcccttatatgccatgaaattttaaaaaaattcaggcaatcagccattttttaaaatttaccaaaaaattccagaaatatttgtccgattgttccatcaaatgcttgaacagttcaaccccaaaaatgttcacaatgtatttgccaattgaatgtacgttttgcactaaatccgtccactttttcttttctgctttctccaattgttgttctgtttcatcgaattgttttgaatttccgtacgaattgcaaaatgccgaaataagcgcttgtctaatggcctccgatggcacaatattttcagccgatgttttccagcgaaaggcgcaagccatgctgaaattgaaaataattttaattgttctgtgtgatctcagtccgtccttaactccaaatttagttgattttgaattagattttttgcagattttataatttttaagtccatactgttccggtaacaataagaaaagaaaacggaaatagggctaataatgaaaagattaaaatggaattctattgaaattttaatcccgaagattgaataattttcaagaattacaatatgaaaagaaaacaattttataaaagattttctttgttttttttagaaataaaaccttataaatttcgttggcaattttaaagtcagagaaattgacagaagaaaatatcaattataaggaatgtatacctaaaagcgaacatgcgttctgtatacattgaaggcggaatcggtccaaacatttcctaaataataaaaaatataattatttttcgattaaataatttacgactttacccatcttctgcccgtcttcacatatgccatcagattagcagaatccttttcctgcacagtaatgtgtcttttaagaccgtcaatatatcttttcttcctttcttcactgaatggcgtgaaaatgtccacaatgccaaagtaaaggcgcaatttttggctattcaaaagtgtcgctgagttcggatgatttctgcactgattacaggtggctttgaaaaacggaatttcgtcactgaatttaaaaaaattaacgccagcagaagaaggcgttgacaaggatattttttaattttttcaagcaatcactcacaaattttcccgccccttacatttctttccctgaaggtcgggcggggaataatcctaatataaaaacttacgagctttcggtaattttttcatgttctccattttgttcaaagtaaacaccaaatataatactccaatcatttacgttgtttttcgccaaaacctaaaatattcataaatttattaaccaaattggagcaatcttgaaaatttttcccgcaacgcttataggcacagcgggacattaaattttttgtaaactaaaccataaaattagaaattatttttcatttattaggtgccgtgccttgtttgaataacacccaaaaaatgccaccacctcaaagtcacgtttcagctgttctgcgatattatgatgtgtttttttgtccaacaaaatgccttccgggaacattggctccactattttcggcacaaggggcggttcggcaccaaaataattgtaccatttgagcacgacgtcgtttaaacgctgttcctgatcaatcttgaccaatttgggctgacgcgaaaagacgcccttcacatcaaagttcaaaagtgtcaaatccttggcattttggaatacattttccatcagcagaaagagggttgaagtgttctgagaaagacttttatgaataaaaattgttgaaaatattttttttattaaataaaaatgaggaaatgaatttcccacttttaatttttaaaactttaaaagtaaaacaatttataaagagaataaattttatttaaagatttatttgcgtgattaatccctccggatccggtcccgcaacaaatttgaatttcaatcccgcagcgagatccgcaaatttgaaatttccctgtctctaatcaaaattacaacattttatttaattttaattttttggtatatttgaacttttaattacctcaatttccactcgaaacaccataaaaattttgttaataaatgatttgtttcccattttcatcata

SEQ ID NO: 22239 - DNA, 2438 bp, Heterodera glycines
  unsure (1)..(2438): unsure at all n locations
attcaccatggatttattaaacgaaaaatgggcggaccccccacggcaccgatggagtcaaaattttccttaatatttcttaaaattacaaaaagtccataaaattgaaaagccgcgatcaaaaacccattttatgattcagaagaattccggcatgtaataagattctcattttgaatgctaattgtaaaattctaagacccaacatggagtttcactggttcaaccgaaattcgatccatttattcgggggaggcgaaagtctatgatttgaaaaaatttgtgttcaatgccgggacaaccgaattgaattatgccatccatcttaatgaggtttgtgagcagggctgggcgaagctcggcttagcactcgaagccgaagccgaaggcgaagcccaatttttattcgaagccgaagtccgaagctcgaagcccaaaaaacccgaagttttcgaagccgaagccgaagttttttcaaaaaatttttttaattccaaaatttttttcatcacaaaatttcggttaaatatcaaatttatcaattgacagaactgctagagaccaaccaacccctttcgataaataaatataatgaactttttgagcaatatattttgtaatttttataattcttagaatattcacggtttttgagtcaatttaaaaaataaagggaaatttttttaatttgagtgtaatttgttaacagattttcaacaaaaaatgaccaaattttgcgactttgagctacttttttaaataaaatagaggatttttagggtccggcggtgccgataggcgccgccggtaaaaattttgaaatttttagtgcactttgttaacagatttagtccaaaaatgaaaacattttgcgattttaattgttaaattttattgaatttactttgaaaaaaaggaatatttttgaaaaattagaagaaaaacaactaattggatgggaactgacccaaaggaaacataatgaaaagagccgagagcactccactcgaccatgcttctgaacaaacagagaaagcaaaaagtttataaatataattaattttaagtttaccaaaagccaatcactaggggtgcattttcacattgaaaactcaatctttaggggtgtatttttcccgaaacttcgggtaaaatagccgaagccgaagcacgaagttcgaagctcaaaaaacccgaagttttcgaagccgaagccgtttcgcccagccctgtgccggatccagggtcaaatctcgtaagtttttgattgaacccactcccctaaaaacataaattcaactaattagtcatacactatttcattcctttaccaatcggattcaactcatgtaaaatgtaaaaaatattagtgttttattgtaaaattaaattttaatttttaaataacaaacaattgtcaaacatactcaatatgatttaagccatttttcactgtgtcaattagcttagctaaaaaataattaaaaaattaattaattaaatgaagtgttaaacatacaatcatttaagtaatctgaacgaaatgtgtaaggaattgtcaaatttgaccaaaatgagtcgggagcaggattagcctgtctttgtgtccgtttatggccaaaatttgctaaagtttattttttgaataatccaataaaaaaattttaaatttgaatttttattttcttaccgtattccaattgatataaaatgttcttggcctgtggaactgacagcaaaatgtcgccttcaaataattggtccaacaaattgtgattcaaattcaatattgaatctttgtcactgtcttttgggcttggcctttgttttgacaatttcacaaaatgctataaaaacattttaattttaataattttccaacgtttttacctcatcagaaaattttttcaagtttttttgtgcttcaattttaattttctccagcaattgcttcacttcattgtgttcatcagtttcaaaaatgtcatttttctgaaaaaattttggacaaataataaaattaattaatatttacttttttaattgggcttccatttattaaataaacaaataatatagtttgaaatatatgaagaaataacatttttaatctaaatattttaaatgaattttatttgtaaaaattcaatttaaaatataattaaagaattaaaagttcattttggatgaatttttcattaaagaaatgcttaaaggtaaaattgaaattgcatgtaaaaataggtcaattagtcgctgattatttgcgagacatttttctcctaattaagtagtcaataacataacgttgatcgggatttgatacaaaaaagtttcattatcaaaaaaaaaattaactaattaattttataattttattttctaatanaaaactacaaattaacttttgatctgtccagtcaaatttatataaaaag

SEQ ID NO: 22240 - DNA, 258 bp, Heterodera glycines
gctttttattataagtcaattatcattatcacaaccttatttacgatataaaatttttatttttttaatccattttgacaaataaattactcataaagttttagacaaaaattaatttgtttttaaatgatatttattgcaccattatctttattgaattttttaattaaataaaattaaaataaagattttatttcattaaaaaaaaatttataattgaccttgcataaaaaaaataataaaagtctaaaatggatt

SEQ ID NO: 22241 - DNA, 1015 bp, Heterodera glycines
aaaattacgttggtatctgcgttgatggcgtaatgttagtgggtttaaattaaatatccacatttaaatttatacccgcaaaaactaataaaaaggtgatttggccattctctacatatgaccgctcagaaacggggtgggcacaaaaagtcaaattggacattaaccgatatttgcggtgcacggcgtttcgagatactcaattttcccagtgctcagattgcgtcggttcaacttcattcccttaatgttaattgcaggttatttgggtacgttttgagtaaatggactcatacacaactatcaataatgagccgtctgttacgggtcccactgaagaggaatccgtcctctccgcaactgcgacaacagcagttcagatctcgtcgccacctccgctgctcatttcccccaatgcaacttcggtgcgtttgtcgagtggactacgccttccgcaaggcggagacgatgaaggttttcagctcaacaaaacatttgtaatttttatacttttgttcatcagggccaagtcgtggaccaaaattgcgtcggctggcgtcttttggagaccaaataacttcgcagtcccaattttctggtcaagtggcgacaacagatttggctgaatttcgcagtccgtctgttgtaagtgcgtcttcggcggccacaaatgttgcagctgcccttgttcatctacaacaacatgcggtacacgctaagcaatattctcgatgactcaagttaaaattttcggtcatactttggtttgttccccctattttcgaaaaatttttttttttaaagttgtgtaaaacgcctttcctggggattttcttggtcgctatcggacatcagtttttgccaattccgaaccccggaccagaattcgaacaagaagtcgaaaattaaaatttttcaatttacttttatcttagaatctatattgaacgaccatttttgatgttacagtggtttgatacaaattttaacttgtttcaattaattttagggtaat

SEQ ID NO: 22242 - DNA, 1596 bp, Heterodera glycines
  unsure (1)..(1596): unsure at all n locations
tccgtcaattacgaaatcgttttactgttcgtgcgccgtcaatacaaatggtgccattcgaatnggtgacgaaatggcaaatggaaaagctgacattgaccaaagaaaacgaaaatgaatgggacaccatttgcataatgaaacgaagcaaaattattggggagacagcggcggttcattggaacgacggaaattgggacaacaattgtaactgtgtgttcttttggcttgatagtgacactaattgcattgggtgagcaaataaaaaaggcatttaattttgtttaattaattaaaatttcgcttaatttagtccattgtctccgccaccgaaagaagaagacgaagcaggacaaagcagcgaaaaaggggcgtcgtctgctgacaaatgagtgacggagaaaagaacaaaaacagtgatcagccgcagaagtagaaatgaattaattaagaatgatcgatcgaccgatcataattcatccgtgatcaaattattaaaagtaattatttggaacgttttcgccactatttttgccactatttagttaattattttgggatttttgccactaaaaatccaatccctacttctaacatgcatttttttgagactttttttacactttttcggatttttatgacttttttgagtttttgcgacttttgttcgtgatttttttgacttattgaggcaaagtttgagttttacagaagaaaatgccgaaaaataaaattttcggtcgataaaaaggcaatgaaacctggatgaattttttcttaattattggaagattagaagtaatcattaagcagaagctaggcgatgaatcatctcaccaaaaagctatgatttataagacttaaaaattcaagaaaatcctaattttttgtaaactataaatcaactttttggtgagatgattaatcgcttagcttctgcttaatgatagcttctaaacacgttgagctttcgttgaaacaaattttgaagaaattaaatgacgaacaaaaaaattatggccattcccatttgaaattgtacgaactgccttgacaccgaaaatcccggtcccgtggcactctacttaaaatagtgataatttactattttcgcgttttgtcaatattttttactatttccgacatttttttggaaaatttcgcaacacaaatgcaataaaagcgaaaaatacacttttaagaatcgaacaaaaattgagccaaaaatttattatttactaattgcagttgcaaatgagtaggactgggatttttaaggccaaaaatgccatgaaaatgaatttctgggaaaatttttaatttcttaggagtgtattttttttaatttttgggacgatttttaggagggtaatttttctgaaattttttaagtagattcttaggggtgtattttttgaaaaaatttttaggtcgtttcttaggggtgtattttttggttttattgcatttttgttgagaaattttccaaaaaatgtcgaaatagtaaaaaaaaaatgagtcggggtcgttttggcgccgacgttttggcgcccacgttttggcgccagggtcaggtttttaaattttgtctatgtt

SEQ ID NO: 22243 - DNA, 2393 bp, Heterodera glycines
  unsure (1)..(2393): unsure at all n locations
gctggcaattttatgtaaatacatattttttcttggattctctatgctctgaatataggaaaaacactttcttttttgtatttgcgaacaaaattggggacttttatttataatttacatattttggggtttatacatatttggtacatattttgggctttttagcatttttttctaaatttttttaagaatttacaaaaatttcttttgaaaaattaaaaaatttttttttgaaaatgtacccctaaaaatcgtttttttcaaaaaaggagataccaaaaattattttaaatatacaaaaatgtgcttctaaaattatttagctcatttttatggtattttgtgcctatttcacccgttacgaagaattttttcaaaaaataaccatttaaaaaatttttatttacatattttggtgtttttcttacatatttatgtacatattctgatcactcactttttgtacatatttttgccagccctacttattagaaataaatttgttaactgaatttttcccttgagaaataattttttattaagctatggtcttattacgactgaatttttctttcattttaaatccgatcattttgtgaccggaagttgaataattttcatgttctgttaattgctggatcaattttaattccctaataattactaaatctaaaattgctttttctctggttggaaaacattcatttcgccttacgtttcgcctattaacccaaaatcggagtttcaccgactaacctaaaatagatggtttgacaaagaatttcacctaaatttgtttatattattagctatatttataatgataatgaaatttaacctaaaagtaaactggaaaaaatatatttataaaattccagagaaattcttgtcattgttggggcttgggacacactgaactagagttgctacaacaaattttatcaatccaatgaaaaataataagtgcattcacgagctgttcttcgaaaaagcaagcaacaatttcgtatacggtcgtcgtaaaaggaatcagaagaccattttatggggatgcattcccttggcgagatgaaagcgtgagccaaggtagccgaacaagaatttcttctcgggatgtttgcggatcacttccataacctgcgagtcaacagttttctggtcctccttgcgctggtcggtcacagcgtactgcttaaattgagtgaatttatggaaagcattgcttttatacatttatcatttcaatttaggtacttccgggttatgctgcccccccctcaaaaaaattccaaaattcgtaatttggggtttccaaggtcgctgatcacgaatatgatatttattttagcatctgatgacttttaatcatagatttgaaaaatatttaaaattcaattaaatcatgaaaagagtcagacaggtggcataaaggcagcgatattgcgcaaaatctcgtcaattttaaatatttttctaaaatcatagatattttgtcaaatctatgattaaaagtcatccgatgttaaaataaatatcatattcatgatcagcgaagttggaaaccccaaattacgaattttggaatttttttgagggggggggggcgacataacccggaagtacccaattttcttagaaagaaattctagagctagactatgaaacaaaaaaaaatttttttaattgtttcggcgatattttgtccttcttcgaaaacttcaacagagagtgatattttgtggggttttttaaattaaagtttattgaatttaatttcggtatttctctgttgcccccattaattataatccacacatttggatgtgttgcggtcagaacccaatcgtacagctcgggcagcccgcaaatgccgaacagaaaccaggaaaggaaaattgggcccgaagtgatgcgcccgtgaagccgacaagcgtggagcaaagagcgcaaaattagctgaaaaatggaaaattaaaaacggcaaaaaaaatgccgaaaagtgtcgtaccatcgaaaggcaaagaaaaacagggtagagaaagtcgacagggttaattaattcccaaatgagcacgtcggcaatggccagcaggaagatgaagacggcatccgcgacgagaagccaaatgatggcctgagggcgggggggggaagcattaaatgcagaattcccgttaaataaacatgagggcttagaaaaatacggaaataattcccgaaatatggccataaaattacaaaaataaatttttcaaaattagcgtaaattcccacttccctcaaatccattaaattttaatttaattaaaaacctctaaatggcgaaatacagaattanaaatcagtttttaaattttttttttatgatttctagaataataattcatcaaaat

SEQ ID NO: 22244 - DNA, 1623 bp, Heterodera glycines
ttattcaggtactctgccaaattctcagctttacagttcattagcttggataaggctgttgtcagtgggggcatctaaatgactgacagggaagtgaatgataaggggcgtggcataggagggcatactgtggatggatttcgaaatcctcccgtctggaggtccctgcgtgctctcacttgagtgggcgtggcctattccccacgtgacacccccctctccatcacgtcacatacagtacccccacacttttcccttctcattttcatcttaacacacaaaaatattcctcgaaatggctcctcgtaagcagaatgagcagtttttggacgaaatccagagtaaattttaaaataaaacacaaaatataagcattttatagaagcgaaccacgtggaagaagcacaaaacaatcaaagaaaacataaaatgggtaaaatttttcacaaattttacaaaaattttggattttttctcatttttcagatattgatgatgacgtcatattggttgactcgcagtcatctcacgcagaggaacgtcctgcgctcaagaagaggggccgaaagtctcgctgggaaaaactgctggaggacgtgaacaacgcaaagaagtccaaccccgcagaggttgaagtcacagatgtcgacgaacgcaaagcagccaacgtcttcgactacccaacaattttctggaagctcgcacgcccaaaggtaatgtttgctctggtggcagccctacaatgttcttcttccgttgcagtatggggtgttcacctttatgtgcaacgaatgccgtaacgaaaacttcaagcgaggcgacaagcgcttcatcctcaacactggcagtggccaagagaagctggagtttacccaaacattctgccaagactgtgccattgactgcaccgacctgatttcttctaaagccgagacggctctaaaattattcgaaagcggagtcggcacgccaaattcgtcaaaagccgggttggctaaatattaaattgacacctattggtgcaatacttcaacgtttattgatttcgggtcgaaacaataatcgtctacaatgacgcaacccgccgcggttcagccaaatctgcagcaattaatcgacgtaattgctcagcaacagacgcaaatcaaccagctgataaatgttcaaagaaacaatcagccaaatccagcaatcatccaaacaataccgtcaatgccggacgttgcaattttcgaacaatgcgacgaaaagcatcgcatcaccgaatggctggagcgtttcacttttgccattgactcgtgcgcaccgaacgcggccgatgacataaaagtcaaggcactgatgaacaaactgtcggaaaccgcgttcagcgagtacagcaaatttgttctcccggccaaggtgacggatttcgactttgatgaaacaatttcgaaattggagaagctgtttgccaaaccacaatcaatatttgtggaccgatttgcatgtctgatggccaccaaagacgatggcgaagattttcacaatttgttaacaggcacaaacgacttttgaaagattttcagtttgacaaattgaatgaggaaacatttcaagggctaatgctcctaactgcgctga

SEQ ID NO: 22245 - DNA, 1885 bp, Heterodera glycines
  unsure (1)..(1885): unsure at all n locations
ctctagagtcaaaaaaaaattcatggcctctcngggacttcaaagtggactctttatgcactgacatttgtcgcacgacgcgaaattttcgcctattcaaagggggcgttttcgtcgagcgtaaggcatggaggtggggacaaaacaatcacaaatcaaagcgtccaatttactaattggcccattaacacttaaacggttttttttgccccgtttagaccgccacctttgagagcgcattttgagagatcggcggccgaatgaaatgaatggacggaacggaaaaagtgctgcggctaattctttggatatttttgttttgtttttttctgatcagtgatctgagtgcgccttttgtttaaacatcatattttttcgttttgttgagcaacaggggacgaagaattttttctgatcacacaatttcacaaatgtgccaatttttttgatggatttgtaaaattgtcctaaatctcaattttcctggtgacaccccacaaagcaaccatattttttttttgatcgtcgatctcattttttgccgcgtttttaccaacaaacaaaaaatttttctaaattccttgcctccgtcggctgaaattttagagaattctacaaattttcattaaaaaacggttttgtttttcatgaattttcagtaagttttatatcaacgagtaaatggagttgtgattaacaaataggtatatatgtatgtgagttattaatggaaaagctcatcagttcgttaggaacaattccatcatttcttcgcatctctcccccaacattttcccccatattttctccaccaatttttcgtcctcctccaaattcttctcatcattgtcccctcacgtgtttttgctgagttcggtaaagtccacttcaacatcattaccaccaccaccaccgccgtccgtccccccattacttcctccttgctgctgctcgtcctgctcctccttggtcgtcgttcgctgctgttgtcgttgtcctccaccgccgccctttggcttcagcgtgatgatcacaattttctgacagtcggccgaaatctttgagaaaaaagagggggagttaaaattttaaggaaaaaaaaaattaaaaatagaatacaaataaaaaatgcaaaaaaaaataaataaaaaatttacatgagcgattgaagcacagtcagatggctttgcgtatctgatggacgagtgtaaggtcagatgagtctggccttcgtttattcggtacccgttgggttggggctcgtgcgcgcggaaaatgccagagatgtgcgggaatttgtcgagaaattgctgcacgaaaatgtcgttgtactcaatggcgaccctgcatttctgaaatgcgttgacaattttcttgaaacttttattttaagaaaaaaaggtttaaaatttttcaattttttttcttgaaaaactagggttattgaaaatttggaaacgatttggttccgaccccttctggacgattgccaaattttgaatgcatgtgatatacaaaaaaaaaaaaaattattattatttttccattgccccccatttttcccacaaaaattgtttaattttccaattgcccccatttgttctcactcacccggttgaatcggtaatttccgaagtccccctcctgcgcattgtccggcttgtccggccgttcgtcgtccttgtacagtggcagccggtgtccgtcatgggtcgaatcactccacataatgtcgcagtacgcccactgtccagcaccattgtaaatttctccttcgtcggccggtttctgaatttccgatgttggaaatttagtaaattaaccataaatgcatttgacacactaaagtttcttccaccccctatcaccgagaaaattttaaaaa

SEQ ID NO: 22246 - DNA, 1372 bp, Heterodera glycines
  unsure (1)..(1372): unsure at all n locations
gtatagtccntgatgatgcatttgctttcatcatntggagctaaaatgagtttctgtgtgagtgtgtgtgtgccgagagtggctgcttttgcctagtgtaatgagtgggttgggatgggatgggacaaagcagcccgagccgggacaacggcacgttgccgaccgacgagcgaggaggagggcacggcactcgtcgccacccgacaattattattattattattagtattattattattttatttttgtgccgtgttggccaatgtggtggtggtgccgttgtgctttttctcatcatggccccagctttgagttgaaaaaaaatggccaatgcatttgcttggccattgccagcagcaacgcgttgagtgagggcggggggggggctttagtggacatagcacaatgacgacggacggcacttggccaatgggagagggcattttgccaataaaaatgtgcgggaaagtgaaaatgagttagcactggctgcccactcgtgccacaatggaaagttttgtgcattaatagaaagaggccatcagcagcagaccaatagccagcagcaaaaaataaattttggaattaatgtttaaatattgtttaaataagtcaatttgaaattgattttaattaaggtgtataatttttataattttttctacagtattaaagaatttgctagaaaatgttgaatttaaaaaattgaaattgttatgaatttacataaaacattcgtggttatcgaatgatgagaaaaaaatttttttcaaaattatatttttaaaaatatactagtttagacatattaagaaataatttttatcagtgaaaagaattgaaattttaatatgaataaaaagcattaaaaatgtatcactgattggacaagaaaaaaaaaccataatttgcttgaaaaatttgtgggtaatcttttaaaaaaagtcaaaattttttttgttaatggaagcccgtttttttctatgaaatttctagaaaattttgcttcaagaatgcatttcttcgtgttcttccttcacttcattctttcaataattcggtttaccaatataaaacggcttccatctgtaatttttgggacatcaaaaaatctttgatttcattttgagcctgaaaattaaaattttaaaaattctttaaaaatttaatttaaatgactttttctttttgttttttagtgatgttgtcctcagcaaacacaattttatttgcttctgttttgattacaaatggctcattctttcccatcattttcatcactaaattaattattaactaattaattattaattatgctttgaatatttgaatgaatatgaataaattttccattcttatacacacttttttt

SEQ ID NO: 22247 - DNA, 1557 bp, Heterodera glycines
aaaaaatggattagattttgcccatttttgaggtcacagatcagaaaagtaaaataaaatttgggttcgatggtgcgataggcgccaccaggaaaattttttttgaatgtatttcgtggcattttttgtcaaattatcggtagaattcgacccacacatctacaacaagtcttggctttaataagttacttgtacagtttcaaactgtcggcctccgccaccgttgtggcccactccaaggacatcaacagtgtggacataagtgccaacgacagactgtgcgtgaccgcgtcaatggacaaaacggcaaagctttggcacatcgaccggaagacgggccaactgagcgcgggtgggacactcggaggacatattagaaaaaattttcggaaataatttgctttttcttgtccttttatactcatcagccgttcattgccgtccttgaattttcgtatgttttttagttagtcgccacttgcagcggcgacctcaccataaaactgttctcacttctcgacaagacgtgcactcggacgcttgagggacaccaatttgctgtgctttcggttctcttttaattttccattttgaattttatataattcatttcacaataatgcccaacagattttgttcattgacaacggctcaaaactggtctctgtggacggcgggggactgatcaaactttgggacgtcaaaaagggcatttgcgtgcgaacggaggaggcgcacagcgacaaaatttggtcactgcgcgaattgccaccggcggaggaagagaaaaataagtgtaagaatttgacaaattttgaatttgaattttaaccaaatgctaatttttgtaaaacgattgccttttcagccattggtctccccaaaatgcgttttatgaccggcgcaacggacggacaattcgcaatttggacggacatttcggaggaggtcaaagcggagaaacgcgcggagcaaacaaagcggacggaagacgagcaacggttgtccaaccttttggaccaggacagactcggcgatgcactgctgctcacgctcgacttaggccaaccgtttcagtgcgttttttacccttgaaataaatcatttttattaaccagattttctattctcaattggccccttcggtcacctttcaaaacccaattaaacaagaaaaatttaaggcatttaagtgccaaatcttaaaacatttttcattaaatcacaattggcattttaaggtgtttgaccgtgttgaacaagttggccatggatgggccacagtcggaggaatccgatgccaaacttttggcactgtttcgccgtctgagtgccgctcagctgtccattctgttggactacgccgcccaatggaacaccaacacgcgaacatatgcagtgagtgggacgaggggaaattgggcgccaattgctccgattcgctcataattacccctaacctagtccaatttgtaaagtttcaatttcccgtggctattaaatcttcattcacttttcaggtagcccaattggtgttgaactgtgtgctgaaatgtg

SEQ ID NO: 22248 - DNA, 1592 bp, Heterodera glycines
  unsure (1)..(1592): unsure at all n locations
aattctttctcttctcctctaatcctccactcatnttcttccattattaaccccacaaaatgtgtgctgagtctcctcaattgggactttgctggaatgggtgttaatctcagcaaaaaatgtattggtttgacctaaaaaaagacattttctgaagggacgccattcaaacaaaaaatagatgccaaagaatttggaactggcaaatacaataacatatatatatatattatatatatgcatggacactgatgagagtaaattaatttgaaaattattttttgcgattttcgtttgttgttcaaaatgccaaaaaaatttttgtttgttttcccgtctctccgtttttcgccattcattaaaacttgcgaatacatattctctggaaatggcattgattaaattatatctaaaaaataaaaaaagttggactatattatttttgcgttcatttgagccaaaaatgcacggggcccaaatgcctctgactcgattgaggtcaaaccaataattttgctaactaaccaacgcccattccaagcacaaacagagtgaggggtcagcagagcacattttataagagttaataatggacggaaaaatgagttggaagaggaggaggagagaaggaaattatgtcacgaagtcggcagtaggctttaatttaaattggtaaaaaatccgaagtcggcagtaggctttaatttaaattggtaaaaaatccgaagtcggcagtaggctttaatttaaattggtaaaaaatccgaagtcggcagtaggctttaatttaaattggtaaaaaatccgaaaaaaatatttttttaaatcgtctgggcttgttagaactcaaccaaaatattcgatagtattttttcgattaccatgagaaattgcataaaatatggcctaatacgcacgaaaatcgagtttttaacttggtttgactcttctagcttgtcctttggcacatttggcatttgtgagaaaagtcggaaaatattgatcataggccccaaactcaaaaatgcttaaaaacggtcagaattgatgtaaaaaggtttgaaatgggttggaaaatagaattaggggcgcgcttgccctttttcaggctgaaaaagtgccggaattggagtgccaaacttagctgggactcaagttaccgcactataaaaagcactcaaaatacattttgaataatttttctatggtaatttttggcgctgatcacgaatatgacctttattttgcaaaattccgaaccccgaacccaaattcgaacaaaaactcaaaatttttaaattaaacgaaaacatattatagggggttttgaggttgctgaacacggttatgacatccattttgatcaaatccgaaccctgaaccctaattatgaagcatgttggtcctcaaaatcgttaaaactatttttaaaccagcaatcagaaaatgctaaaagaacgtcaaatataaaagattgaatttagcttattgcgctaaaaaaccgccgcacactcgactacggcggccagtaggtggggcgagactacggaagaagtccgcgcgtgatccgcaggcggttgactgattggcgg

SEQ ID NO: 22249 - DNA, 773 bp, Heterodera glycines
gggggaaaggagaaattaaaggggggagagaaagaggggggatgaagcgggagggggggggggaaaggagaaattaaaggggggagagaaagaggggggatgaagcgggtaacatctgtaaacctaggggtcggagcaatcatgtcccaaattgacacataataagagacatgcgaatagcgcgaaatgacagaaaaagccaaatgcgagaagtcaatatatgcaaaagtgctaaaatcgaagtgctattagcgaaattttttctacaacttgttaatagctaaaatcatacagccaaaatcattttttaaaattttattccaaatgtaagaatcactaatacgcttttttgaggctcgctttttccaaaaaaactttttggtaaaagggggtaggctccgccggaaaaatttttgaaaatttgattaaaatttgttgacagattttcactaaacaatgatcaaattttgcgatttttatataatttttctaaggagaaataagagctgtggcgcgccgttgagaacagcttttcatcaaattaccaaattttgcgattttgggccattttctaagaaaaaatacgagttttgggggcgcggcggtgccgataggcgccgccgcctaaagaaatcgcaaattctgatcatgtatatacaggttttcactgaaaattatccaatttataggtaaaattttgaaaaattttatgcgaattttatccaattcttatgggtgtaaaagtcgcttctcgcgccaaaaagcgaaatgcg

SEQ ID NO: 22250 - DNA, 1133 bp, Heterodera glycines
acctaacaaattttacgtggcgaaatcatgaaaaccaaaataattaaacttatattaattcgtcgaaaaatgtcttaaatatatttttttgatttgatgttttaaataattttttctgaaattttcaaaaacatttttttcattcatttgagctgcgagttggcgggcgcgtgcgcagacagtccctgccgcaatggtggcgagtgtgtacagctcgcagacgacggcaacaagaccaacaacaataagtacacttgccgctgcaagcgcaactttcgcggcacacgctgtgaacagcgcgtggacgtgtgcagcgagcaggaaccgtgccagaatggcggcacatgcatgccgctgcagtcggcagaaagcgacggcgacggcgacgacggctttcgctgcacgtgcattcccggcttcacaggtacagtttttttgctgttacaatatctgtgtaaagtataaaatacggtatttttctaaatttttttttgatttaggtattactttttgtatattgatcaattacccgcaaaatataggcaaaaagtgtgaagtggacattgatgaatgcgcgccaaagccatgtctgcacggcggacattgtacagaccgtgtgaacagtttcgagtgttactgtaacagcactggatatacggtgggtaaattttgaaacaattaaattaaaaagtaccaatttttccaccttaaaattaagtgaaggggggggggggggttgttgtctaggaagggggcgggggggtgccaacaccgaaaacccaaaatttcaaacaaaatttcaaatttttttttccttaaaatttgggggagcggcgcccgaaaataatgcccccgctaatcaaaaataaattaaaaaaattatttaaagaaaataaatttaaaaaaataaattttggcacggcacagggcctccgctgtgagaaggacattgacgaatgcgctgctggtgaccatcgacgacatgaccaaaataacatttgcttgaacggcggccggtgcaccaatttggacggtgattaccaatgcgagtacaggacaggtgaaaaacaaaaaacgcgagaggggggcgggaagggttggaaatttttaaattatcacatttttgtgaaaat

SEQ ID NO: 22251 - DNA, 1688 bp, Heterodera glycines
gggggggggggaatgcgaatagttcaattaatttccgggctaaatttgcaatgtttcaaatgaaagaacagttaagtctttaagtataggagcaaaaaaaaattggataaaaaacgcatctcaattgtccatcaaatttgttcttttagcttccatcatttgacccgttccacttttctatttcggttttcccttgccgcctttctttttcgttccaaacaactgaggcagagagaagcgagaagtactgctttcggtggtcttaaacttcaatttatatttgcaaattaaaattttttgttgtttacgacggaagatttcttcgagacagtgtgagtgcggctggtatcgccgggagaagaacgacgtgcggcgggcttaaactccagtttaatatgcaaattaagcattttattttttacgccggcagatgtcttcgagacagtgtgagtgcggctggtttcgctgccgccctgtgtgtgagtgagaccggtgccgacgcgttccttaaattagagttaatagttaactacattacaaattattttgttacttacgctgcgttcctcaactatgtaagtggcaggacgtccggtgccctgaaaatcgattcaatatttgttcattattgcgtaattcattgtttaccaaagcatcctcaagtgcagccaaaaactgatcaagacaagggtcacgagctccacgagcactagaagccgcggtcttcacagcttcccagaaagtgcttcggcgcgcatttgcatatgaagttttgagcttttcaacagcctaaaatggatggaatgtgttggtcaaattatgattctgaagacaaatcccctccaaagacatactgagtgataaaatttagccacccgcagagacacaaatttatgtaatatacgggaggaggaatagatacaagacaaatcatttcgggaattgataaaaagtgaaatttcatacaaaagttcggggggtaatcgctttgggaccagttttttagttggggacattgtgttagaaaggcatggtaaatgagtttaaaaaagcagaaacggtcaaagaaatagctcaaagtggagaattgattaaaaacaacgaaaggcaagaaagagagatggacaaatgacgaaatagtggacggaatgggccagagatggcgacgagaaagtgttgttctctgtccctttcgtcgtaccacacacaaataattctcccctctcattataacacccattttaaaccaaagcctaaaactgaataagcattctgattgtcccgggttctggcacttttttaacttatcctacaccttcggccattaaaaattgtttatagaattaaaacacctcctcacgccacaaatcggacaggttgatgtgcatttgctccgcctgtgtcttcagcgcttccaatccgcgtttgtcatcgtcgctgagttcgcccctttccaagcgactgaaaaccaacgaaaacattaaatattattaatcattttaagtcataaaaacactatcataaggtttcactgatcttgataatgagagtcatttcgaccaatcataaaacccggacccgaattcgaagaaaagttcaaatttcgcttttttgttgtctccgttttttccgtgtatttaagccgattttatacgaaaatgtgaactttcagtttttttattcaaatc

SEQ ID NO: 22252 - DNA, 1712 bp, Heterodera glycines
ttcccctatatgcaaaaaaaaaaatttttttttgctttttattccaagtatatataaaaaattgtttataaacaaaactttattttaattttttaattcatttttatacacaaaatacacaataaaaatattagacaaaatatgttttttttcaaatcgacatgatatttagtgcatcattcatctatatggttaaggcaatcttttaatttttatggattaaaattaaaataaagattttgtttcatattttgataattaactttgtataaaaagcaaaaaaaaaattttttgcataggggattcgaacctgagaccgaaaaaaacttgattaacacactacctctacgccactggttactgttaggaggactaaataattattccttttctttaatactaaaaaaactaaaagtttggcacgtgcattactcagaactgtgcaaagtaagaaaagggctttaaaacccatttaattgaactttcattatggacatttttatcaaatatttgaattttctcaaaattctgacgtcacttccctgatcagaatccaaagtgatcagttcatcactgcagtccctcaactccaattctccttccaaagtataaatcaccgtttttaccattgttatgcccaattcggcctttcttcaatccaatgggccattcgatgaaaatgacctaatttcgcaaaaattgaaatagaacaattgaccagtgccgatcatttttgacgagagcactttcgaaagtaacaaactcataaacagccagacgatggaattgctgaactaattaatataattattaatttaaaaattacaattttaatttttgtaattttttattctgaaacaaaaaaagaaattgcgaaataaaagcggaataaaccaaagtcgtcggcgaactggacaaaacattaataaaagacaagtaaaagacacttcagcaaggggaaaggaattcacccgactcaacggcataaaccatttgttttcggcaccttattgtccgatgtcaaacggacaagccgaacggttcgtagacacatttaaacggacgtgtcgcaaattaaagaaagagggaatcaccgaaatgttggacacctttctggccacgtaccgtgtcacgccgaatgagtctttgcctgaatgcaaaagcccaggggaattgtttctttaaaggaaactccgatcgacattggaccttttgaaaccaaaaaaccgtccaatcgtcatccgcgacgaagcaatggaacgaaagttcaatcggcgccatggcgcgaggccgagaccgttcaatttggacgataaggtctacgcacgacatcgagtgtcacaggattggcgacccgggcgcatcactcagaaaaaaggtgtgatgtacgacgtcactttccaggacggatcaacaggacgcttccacgcgaaccaacttttggttcgccattcagatgataatgtggaagacgctctggacgtcttgaatgacgccttcagacttccattggcaccagccaatcaacatcttggcgatgttgtggcacaaccagtgaagaaatggttgaaatcgcgccaccatctacgcgtcccggtctgccacaacagccagacgaagtcatcgaagaaagcgccggtcagccgattgttcagcacgaaagacccaagcgaaatcggcgtccgcctgaccgatatacgcccggatgataa

SEQ ID NO: 22253 - DNA, 2325 bp, Heterodera glycines
  unsure (1)..(2325): unsure at all n locations
aaaattaagccaatccgaagctgatcgactcagtgcagaacagttgctcaacgagcacaaacgtgactttgatcgtcaatatgaggagaacaaggcgcgcttagagcacatcagcaacacggtgcgcatatggcgacgggacaaaatatcgccgcagaaattaaaaaaaaattattctgaaaaagtttcagttttttttaaattttcttataagaaatttatagctttttgtttctaagtttaaaaatttttcttttaaatttctacggcgatattgtctcggcgatattttggggtgcacccgcgcatattccccgcgctttaattacctatttcaattggtgctaatcgtttcgttaaaatccggcattttagcgaatttttcgacaaaacttggcataactttacttaagggcaatcaaattttacattcttggcaccattcgatagccagctgtttcactattatcctataaaagaaaaaaaaattttggtcaattttagaaaaagttatatatgttttccattctaatagagaaaaagctgggctatcgagtggtaccaagaatgtaaaatttggttgcttttaagcaaagttatgccatgttctgtcaaaaaatagctaaaatggcggatttaagaaacgacccagcacgtttcaattcaaatttattaacttttttaatttgccagatttcttccatcgatagtgccctgcccgcattgaatctggaagtttgcggtgccgactctgctccatgcgatgccgtgtgtggtggacctggtccaacctgttcacgttgtggcggttcatcgtgtccaggcacattaaatttgaaaaatattaaatattaacgcaacaattaaaaattaattttaatttcccattatttaaattgtattttacattattatattaggctccgtatataaagctgaacaagccaaacattttgcacacgaagctctcgaaaaggtggagacaaagcaaaaagaagctgaagaggtgaattatttttatttatttaaatttttgtttttcattaaatatttaaaatgcgtttattaattaatctaataataattgtttatataaagcttctgaaaaaagtgcgagatgttctgcccaaaacgcaggaggcacgcaaatcaacagaaaaagcattggaaaactccaaaagagaggcaaaattataacaaaaaaaaagacgggaaaatgacaaattttaaaatttagtccgaacgtatcaacaaaacgcatgatgcattggtggcacaaattgagcaaatcaaaaatttccttgaatccgaaaggcataggtcaaatttacaataaacaatttaaaaataatttatttaagcgaattgtttaattttagacctgaagacatcagggccaaggttgaacacattctgaacatcacaattccattcaatgaggaacaaattcgacaactttctgaaaacgtaaaaaatgattgcacctttatttttctaggaaaacccaaaaaaatttatgaaaaattcgccccaattttttttttatttttaaaaatcattttttaattagaacccccccccccccccctctccctcccctgaaataaaggaagcccttttcaagaggtgttgaaaaatagaccatagatgggctctaatccagtaatacggcatttcccccaattttcgtttttccagattcgccaaaaagtttacgaggcaaaagagcccgagaaaattttgactgaaacgcatgccaacaaaacagctgcttcggagttgcaggcaaaggccgagaaagccagccaaagggcagcgtcaatccacagtaaaatgatgaacattgataaaaattgaaaataaaacactgaaattatcaccaagatgtcacggtcggcatcaaggagtcgctggacaaggcggaggaggctcagaaacaagcgcagatgacactggacgaagccaatgccagcattgaaaagacaaagtcaccatttacgggagcagctcgcccccccccccccactgccgttaccgttttaaatttaaaaaattttttaaggaaaaaaatcagaatttttttttctaagaaaatttcaagaaaaaggaatatacactgggactanaaatcttttttttccgtgcccctttggcaaagtccaggcggggccctgatcccattcggtctacaattgtgtatatgtaaattgaaaaaatttatgtttcttcaggtccaccctttctttgacagaagatgangtcaaatcatntggagttacgtgttgacgaagcacccgatcgaactcggaaactggtcaacatgac

SEQ ID NO: 22254 - DNA, 1639 bp, Heterodera glycines
tgcaggtcccaaaaaaaaaaccccaaaatcaaaatcaaattacagccaaagagccaccaaaacgaacggaggccaatgccaacgatggagagagcgagagagaatctgccattttgcaacaaaattaacacaccaccagcaaaaatcaaatggcacccaaaatatgtttgccgaaaaatccaaaattggccatttggcatacccaaaaggcagccaacacaaattctcattttcattaagtgccgcaccctgtttttgttggccgccccaatttggcaaatttaaaaattctttggcctgcggcccatttattttcagtctggccaaagatttgaagaaattttgcataaataaaataaattttattatcttttttatttgagtttcacattaaatgggcatgcatttttaaatataccaaattttgctggctaatccaaaaaataaacacaatatttcacaattttatcagtttttggggttccattatgagtcagcgcatgactattttagcaccaaaaaaagccaaagatcattttgattcatttaaatattattttattttatattttaacaatacattatttttatttatttaaaaactatatatttaaaaataatattttttatttaattaataaactttacaaaaaaattaattaaatatttttccatattctcaaaaacaaacatttgcattcaaatgccgagaaaaaatggtgtttgcgtgccactaaagcttcacataattttttaaattctttttttatcaaaaaaaaggattaaaatttaaaaatgaataaattaaattgtgtttaccgcttctttccccccacataatctcaattttattgattcaattgatatatgtacttaggtaggtgtagtttcttcttcaaattacgcgttcatcagggctacatgacatttcgcctactcgacatttcgcctactaagccaaaaacattcatttcgcctactaacccaaaatcggtcatttcgcctactgtcatttcgcctactattcatttcgcctactgacatttcgcctactttcatttcgcctaccaagccaaaaacattcatttcgcctactaattagtaggcaaaatgaatgtttttggcttagtaggcgaaatgaatgttttttgcttagtaggcgaaatgaatgtctttggcttagtaggcgaaatgaatgtttttgggttagtaggcgaaatgtcagtaggcaagatgtcggtaggcgagatgtcgagtaggcgaaatgtccgtacacccatattttctctgttttcattcctttttttggtttccgtttttagtctgctctgaaggtcctccaaacaaaaacgtccgggggagaaattgagcaaagtgcgacggcgggagctcactgtacaaacaatacgtgcaaaaaagtagaatcaaattagataattaaaaaaattctaattgtttttccatttcatgtgttcaccggtcccgagagcgatgccgaagaatgcgttttccacccgggcaatgccgtttttcacgaagggctcaaatactggtcgtgttgtgggcgcaaaaccaccgattttaccacatttttggaccaattgggttgcactcggggcaaacactgctggaaaaaggt

SEQ ID NO: 22255 - DNA, 1278 bp, Heterodera glycines
cctttttgtctccccctgaattttttttaccttgttccccccattttcgaaaaaaatgaaaattttaaaaagtcgttaaacccagggctcggatcgacaatttttcaaaatcagaacagattttgttttgcgaaactgcctccaaattagttatttttaaaattattcgatcaataatgtattattttttcgcctccgattgtcgaatttaacgatttttggggaggaaataagcaaatcgtaaatttcagtgcattcgggatcaaacaataagatttttaacaatttttgcgggtgcagtttttccataaaacttctggtgaacgggcgaggggagggggtccggcggaaaactgatttgttaacagaccaaaaaaggccaatttttccaataaaaggcaagcaatgactttttcaaaggaaagatttgattgtccggcttgttatttgtgattttttgaacgagttctgtccttatttgtgaatttcgtcatttttgtaccagtgttacctatctcaggaattgaaacagaaggaagggcacactctgaatttcagtttatctccaaatttgggcggctaacattcgaattccaaacgaaatgtgtgactggtagacttataggaaggaccacttttgtctaaaactcattttgacctgaatttacaaggagtgagcagaccgagttctacgcgagctaaccctccgaccaaacagacgccaaattttaccaccccgccccccttcctacaaaagcattgaattgaagcacatatgagcatttattaagcacaacaacaatacaattacataggcaacaattaaatatacattcatttgaagtgatgatcacagaaatttacatacagatacaacaatttacatgatgggggacaaaatgacaattttgggacggtgggatgggtgggatcctatcatgtccatgttgaggtgacgaagcatccttccatcagacgttgtactcgatcggcaagttcttgcggcgcaccatcccgtctccctggaaccactcgagcttgaacgcggtggcggctgggtccggcgtgttggtccactccacggtcacacggtcgcccttggtgtcctcgctgccggggtcgaaggcgtcgcaggagacggccacgttgacggactcctttgggccgagcactccgttcggcgggttcatgttgatgcgcttccggttggtggacttgaaggcgtaaccgatgcgcttcctcccagggttgatcccctgaaggggggggggggggggg

SEQ ID NO: 22256 - DNA, 1922 bp, Heterodera glycines
tttttttgggaaaaaaatttgatttttttccgggaaatagaaaaatttttggctggagcgggacatttgagtcccgggcccatactcgttaggggttggttttatcgaaaaaactccttcgggcaaaattgtagactttttaagctctatcgaatggtgtgccatatggccggaaattttcaaaaattttcgagctaggccccctagaaattttcaaaaattttttttgggttgaaaaagagggtgaaaaatatttttctggggtaaattagggtcctgagcacaaatatgatgtttattttaagtttcagattttttggaattttttaaaaattcgaaaatatttttaatttttttggtccttggaaatttgggttaaaatttgaaaattcataactcaatgaaggactgctcaatttaagtgaattaaagctttaaaaatagcaaaaaatcgggagaattttatgaggtttatttggttttataatgttcaaaagaaaaaaagttattccagaatttctggaaattttcgatttttcagaaaaaaattcataactcggttctgaaaggtcatactgtaaaagtaaaatactacaaaaatccgcaattttttcctctataatataaattttattttacatttttatatcttttttgcgaattgttataaaaataaaagtgatttttggtttcgggaccataggggggtgaccaggatttttgggtggaaaaattttttcaccgaaaatattccaaaaacatgtctttaggggtattttatgacgctgatcacgaatacgtgatcagattttacttttgacatcgttcagacctcagaatccctgtgtgattggggattctgaggcatcattttgaggggggggggggaagttcgaatccgggcggtgtacattatttttgctatgcatttttggttagttatttttaatgtttttaattcatttaaaagagtgtttgtttttttaattactttttaatttaaattaaattatttttttgtgaaaaattttttaaaattaattttttgtttgattaaagaatttcatataggcgaagttcggacccgggcggtgtacattatttttctttgtatttttgggttatttttaatgttttaattaatttcaagatttttataaattatttaattaatttatttaatttcattatttattttttgaatttataaaaaatgaatttcatttcaaaataaatattcaattattaattttcaaaattatatttaatgaataaaaagagtattttattataaaaaaattttaaattaaaatgcaatcgatttttataaaaacttttcattatttatttaattttaaaccatgttgtacctcttctaatcacttttgtacctcttctaatcacttttgtacctcttttatcacttttgtacctcttctcatcactgttgtgcctcttctaatcaatccctgttgtacctcttctaatcaccgttgtacctcttctaatcacttttgtacctcttttatcaaatttgtacctcttctaatcaccgttgtacctcttctaatcacttttgtacctcttttatcaaatttgtacctcttctaatcactgttgtacctcttttatcaaatttgtacctcttctaatcaccgttgtacctcttctaatcacttttgtacctcttttatcacttttgtacctcttctcatcactgttgtgcctcttctaatcaatccctgttgtacctcttctaatcaccgttgtacctcttctaatcacttttgtacctcttttatcaaatttgtacctcttctaatcaccgttgtacctcttctaatcacttttgtacctcttttatcaaatttgtacctcttctcatcaccgttgtacctcttctaatcacttttgtacctctt

SEQ ID NO: 22257 - DNA, 2664 bp, Heterodera glycines
acttgtttatacttttaaagacttttttattaatacagaattttttgaaatttcctaaaatccgcaatcttgcgcaggatcctgcagattttaaattcaggatttgcaggattgtaggatttgcaggattaatcctgccgtatcctgtcctgtaaaaaattttgaattccaatcctgcaataggatccgcaaatttgaaatttccggtctttagtagagaccggaggggatcgggatcccgcgggatttcttcgggatcccgcgggattaaattcgggatcccgacctcgggatccgtcccgaaggattttttaaattcatcgggattgatcgggatcgggatttcatcgggatcccgaaccgggatcccttccgaccattttaccaatcacgcgggatcccgcgggattgaagtcatgataatttttccaaaaatctccattttttaattaatatcttgaattttaaattaaaaaatattgtcatttgctaatttttcttaaaaaatccgtaaaaatcccaaaaatttccacagatctccaaaattccaattaaattttcaaagtttaacgtaaaagttggtcattttgtgacttttatttttttcaaaaaagaattatcaaaaatttttttaattcctaaaatattattttaaaacttttaggtaatattatgacacaacaatttctaagaattttgtgaaaaaattagattagaaattgttgtctacgtatttttccttcggtgcatatctgcagcgccggactctaaaatccttattttactgaaaattttgctcaaaatcgcttaaaaattttggtttttttggacaaaatctgttaaaaatcgcatccaaaattacaaaaatttttcccggcggcgcctatcggcgccgtcggcctccacctggttccctaaagtttttgaaaaaatctcagcaaaaaaatcataaaaatctgatttttggctccgatgcacttaacgatttgctaattttcctcaaattgttaaaactgatcataggaggcgaaaatataaaaatttatattaattaaattgtaaaaaacaatttaaagctatgttgttaaatgttctaatcctaaaatctgattttttaggcatgatattcgaattttgaaaattttctaaaaacctgatataattcccattcctatttttcttcaatgggattgatcaattataaatattagagaagcattataacaaaacttgacacaaaacgtaaaaaaaattgagcttttgcaaatcccgataatcccgcgggatcccgaaaaaaaaatcttcgggattgatcgggatcgggattcggtcgggatccgtcccgatcgtttttacgaaatgttcgggattgatcgggatcgggattcagtcgggatcccgactcgggatccctccgaccccagttgtccggtctctagtgttcatgcggtggaagttgcgaaaaagggcgagagaatgagtgcacgtggtataccgaaaagaagccagagcatttggcaatagtgtgctgcaaaaacaaatgaaactttctcgctgatctgtcccccattactccctctttttgttggcatccaaatccaacaatcatcgcttacttttttcttttatttgtttcaaacggtacggaacagacgataaaaaaatgtttgtaaaaataatttacaaatttttttgaattaattttattttaactaacgatatacaaggaaatctgccattacttcacttgattctaattagttgaactgatccaacaatttaattttagtccctttattattgtgccgatttttgggccaatgtgccaaagaaaacccatttttcggtcgtttttttggtaatgtttccaattgctgaaaaagggaggaggcctagctttttttattttgttgttattcaccaaaatgccattttcttttccacgcattgagaacagaaacggcgccgcgattttcttatcgcactttgaacaaagaaaataaaagtaattattattttaattaactacaaattatcaacaacaaaacaaaatttgatttttgagtcgcccttttcattattctcaattaatgaatgccattgcactaattttaattgccctttggtcatctgttccgtgccgttcccttctaatggcgtcgttttgaatgcactttgatcactggtcactaattggcctaattgcgccatttatccttccccaattacacgcccatcctcactaatgaccagtcgccgcccattagtcactctcattccatcgtttttcctccaacatttctgcttttttcatttgtttaatgggtgtaattgaattgcttattaatgattcgctcgctgccattagtactccccgttaatcagtggtcacccaattggccgtaattgtgaaaaatcggctaaatttgctatttaaatgacccattctctgtcaattagtgtccctatttccatttattttaatccatttcttaattaattaatataattaaaagattattccaatattggaatttccatattttccattcttagtataaatgccatttttcccattttttaatccgttggatggacaattttcccaaagcaaaaaattaaacgagaaaaatgaatttaaaatgggggaaaaattgtacaaaa

SEQ ID NO: 22258 - DNA, 1741 bp, Heterodera glycines
aaatatatattttttactttcaaaaaataatctataaattaatttgataatctacattaagttttctattatttattatatatatttttattttatttcaatgtaatgcgtttttttgcacaatttaaaaataaaattgagttgcctttctcaatgtgtactttaaaaatattatattttttcaaaacttgatgaattgggagtcttgtgatgtgtttaaaaattttaatttgttattgaaatttttttttgaaaaattttaaaaggagggttttatttttcttttgactagaatttagtttttattcaaaaagataatttaatataattttaattttttgattttgttttgataattaatactgttgtttttgaatttaatttaaattccttacgtttaaatatttgagtttttaatatattttttaaatatgttcattcgtgtgctataaaaaatgaatttgcttttaataatttattcaaaaattgttctttttaagaataaatcaattttattttttaaatattttcttgtcatagttttgcgcgtcgaaatgattcaaagtgagtaattttataaaatgactcaatttgaatattaaattctaatttttcgcttaaatttccaatttatgggttgatttttcatttttctattctttcctcgaaattgtttttttaatttgttttaataatgcgccttcattaaattatgtttcggaaaattcatcaacttatgaaagaataaaactaaaacgtaaatttaaatataatatgatattattaaagtaccattgagttaatcaaatcttattagaagaaaattccaatatttctatctaattatttaatttttctacgacttgtttaaaaactaaaagaaaggataattcttctatttaaaaattacaaatattatatgagtcaaaaaaactcaaaatatataaaaatatttcaaaaataaacaaatctaatttttgtaacaataaatagaagaatattactcttactaattaaaataatttagttaaataaaaagcttcataaaaattagtattatacttttaaaatttaaaagatcaatttttgtctatttatttcttttttaaataagcaattattatatagcatttttaaatttataattgatcgaaaaacagccgatataattaagatattactttattttttaaaactttttgatgaatttcctttataattattttctatgctaatattactattttcaaatttctttaagtgtttattattacaatagaatttttatttaaaatcttcataacttttatctctcgcgctcgtttctttcttcaattggatgattttgttgggaaaagggatatgtttaatctttgaatgataatttatttttttaatcttatataattctgatcaggtttattaaattgggcgtgatttgaatataataatttttatattatgtgtttaatatcttatttcacataaaattggcagccctatttataagtaatttcgtaacaaattggactcaacttttcaaaaaatttccactatttttacatgttttttggaacaaccaaaattgggtcatttttttgtgaaaaaacataaaaaatgccgttttatccagcagcgacaaaaaacaatatttactgttttttcggcgccgaaaaagccattttatataggcgccgaagtggccgcgccgaagtggcccctcagaaaaaacccgcgccga

SEQ ID NO: 22259 - DNA, 1573 bp, Heterodera glycines
attgtttgttgctacggttggggttgtgtttgttgcaaaagttatactgtgtgtttgtagttgtgtttattactaggttggagttgcgtttgtaattttgttgctacggttggagttgcgtttgttgcaaaagttatactgtgtgtttgtagttgtgtttgttgctatggtttgatttgtgtttggggttgaatatgttactacggttggagttgcgtttgtagttgtttattgctacggttggtgttgtgtttgttgcaaaagttatactgtgtgtttgtaattgtgtttattactaggttggagttgcgtttgtaattgtttgttgctacggttggggttgagtttgtagttttgtttgttattaggttggagttgcgtttgtaattgtttgttgctacgagctgcatttgttgcaaaagtcatagtgtgtgtttgtagttgtgttgttgcaaaagttagagttgtgtttgttgttacggttgggcacctaatttttgtaagaatttcgaatctgaaaattatctttcaaatttaatgcttcaaaattttacatattatctaaatatttatatatatttccaagaattaaaaaatgagagtgtcttcattatcaacacctattaattagttaagcggcggaagagccgcttcagcagtccgctctgttttttgcaccaataacgggttgctgaaaattgggaagttttgcgggtaattaaatgaaggaacgaagaagcgacacaatgcttttggtttctgtttcatgaaaaccacaacagctattttattgacacccctcagcatttgtaatgatcttcaaagagtgactgacttaattaaacacacaaaaaacagctgcaattggttacattttatgggccataactactgaaaacaacaaacaaaatctgtcacacgacgacacaataccggtgggtgattgatattaatatttatatccccatattttttcctggactgggagacctgatattaacgaaaaacatatttattagctttatttgaagcatttaggatagaattctttattcgaatttccatatttctccatatttgggtatttaaaaaatcctctatttctacttagggtggaacataatttttgatacccaaattttttccaatttttaaaaattcataactccgttatttctgcgcctatttaaatgattctttttttattttgttcttcatggtgtcctctttttatattactatcgtttcactttttatttgattgatagatttttctgccttttttcccgaccatgccaaaattgaaaattggcccactaattttcgaaatttttatggtcaaaaaccaaagctgatataacaaaatcttggtttttctatacaatttagaccagtagattccgaatatgaccttaaatggaacctatcttttcaacctgagcttgtactgctccaactccatgcgtgaagttcgagctgtacaggtttgttgcgatcccagagaccaaatataagaccatattcgaactcaaaatacccgatttaccttgtttaattaaattcagaatttcca

SEQ ID NO: 22260 - DNA, 2004 bp, Heterodera glycines
  unsure (1)..(2004): unsure at all n locations
ttagcgattttatggggaaataattgatcgaaatttttgatttccaaaaaccgaaaggcctcatttgtcaagcccagagacattttaaaatttcgatttgcaaatttttcaatgtgtaaaaactgaaatgaaatgaactttgacttttaaatttaaccgacatttatttttgtatactcatttccataaacttttttttcagttccaaaaaatataaaaagtgccatcctcgagacggattttgttgtcaccgaatttaacaatgactctatttcggaactgatgaattgtctagaaaaaagaggagcttcaaaattgctcgataatgatgacttgaaacaccgaattgaaagaggtgaatgcataatttaatattaattaaattaatgcccaatttataatcaatgcgaagttaagctcgataaaaccaccgactccgcttaaaaatttgttaagaaaaaaggattaaaacaaaaaaatatgaaaaatttcgtaagaataaaaaataaatttagctttttcttgacgattactgaatttaaaataatttataattttaataattttttttaaaagtgatttcatgaaaaattgttgttcggttggcaaaaatgaaataaaatatatagtaaaaaaaatttttataaaaaaattacggaccggatcccgcaaaatctcacgcggattccattgcgaagagaccaaactttagataggtcgatcacaaaacattttaaaataaaattattatttgaatttaactgtttttataattttaagattttccaaaaagtctgctgaagttgccgccggattggctgcttttatcacttggccaaattcgctcacaacggcaattaaaagcttttgattattctgcgagaaatttctttgcaacatttgataaaaaagtcataaaattgggaaaatcaacgaaaaagaaatgcgttacttggaggaagaagaggatttatgcagcttatgccaaatgttaatggagaccaagtataatattccaaggaacaggaattaaatgctttcatcccccaaaattaaaattttttaaatttaattttaattaaaaaaatataataaaaataaataattttaaatcattaagattttgcttctcattgaaaaaactttggacattgcaaaaacggagaataaaaaggcggcaaaaatgtgctcaaacaaatggtcgaatggtacaaaaaaggagaatttactgaggaaaagcttataaattatgattatggactaaaatacagcagagaaaaacaaaattctttggatgaagtgagtgagtgcttaatcatttatcaaaaaaaaaaaattaatcaaattaaaaaaaatttgccactgatctaaaaatccgacaatttcaaaattcttctctctaattttaatataattgataaaacagttttttcgaagttaaacatttttacaaaggctaacaaacagttgatttcggacttgggacatgttcgaaacttaaggtggatcaaaaaaatgcacaattggatggttgaagaaaattcaaatggccaaaaatccttctttttcgctgttggaattcgcaattatctattaatacattttaatttcttaatcaaattcctttttcaatgcatattatttctgtggaagacaacttgcaacaacttctcacagaaatgggttatacggtcgaagaagttccacaaaatacggtagtgatcagcaatggaattaaatttaataaggacaaattgccaaaacagtatcataattgaccatgttacatagatgaaaatcctttctttattgggatttgaatagatgattagtctcttggttaattaattatttcaaccgtaattatacagtctgtttttcatttagtaatttttaaaaaattttttgtgggtggctcaattcattttaaaattaattagaatgcattttgtaaagttttcaattttttttttcttcanaaattagtttttggtgactctagag

SEQ ID NO: 22261 - DNA, 2058 bp, Heterodera glycines
  unsure (1)..(2058): unsure at all n locations
tttgtattgtttatgttgattatgagaatgaaatgcaacgaaattcaacatcaaaatggtaattattattttaaatttaaaatccaattttaatttaaatttttagatataattgaaacgggaaataacgatctggttaacaatcttccaaatgacctttttgctgctgataatcaatcttttgatcagcaaaaatttatcaatgaatttttatgccgtagggaaaatgaaatcggaaaaactatttcaaaattggcaaaaaatattttatatgaaaaagcagaaaaaatgcgaaaagatttttgtgaggaattgagaaaaggaaaaagcattgaaaaagcaacacaaaaagtgggaaaagcggcaataaaattggcaaaagaattggaaaatgatgaaaatattaaagaaaatattcaaaaagcattgaaaaataaaaacgaaaaaataaaattggataatgcaaatttaaatgagttgaaagaagaattagccaaaaattattcagaagaaaatatgaataagctcaagagccttttttactcgaaacttcatgaattttttgcatcaattaaaggtaattaataattaattatccattgattaatggaaatagattttttgaatttactgtactttattcaatttaatactgtatgagtctttaagttttatccttttttcaggttcaaaaattgaattctttgaaccccataaaatcaatccgtcgcattttaatggccgaagacaaaagcgtgccaatgtccgtgaattattccaaggcgcattccaacgaatccgtcggcatggcactctaatcgcatgcgttttttatgtttttgtcgcatcgatttcactttttatagtgatttttctgattgcccgtttggttttagtaaatccggcagattatttggcatggcttctgatgctctggcttttttatgtctttttgcactacagcaatgaattcatcaaagaatgcgccgactgccttcgcaacaataataaccaaattcactcaatcgaattggcggagaatggtcccgctgctggtggtgctaatggacaataatgaattgatgtttaattaaggacatgaaactgacgaatgtgtgtgtgatactgtattccttaaatcgtagttgtatgaaactataaatatattgtatcatgtaggtaaacattgtcacatgtatttttagatgatgtatgtgtgtgtgtgtgtgtgtaaaaaatgtaatttttgaaattttaacttatgacacttgaacatcgagatcacgcacttaaacaaatttactcgagaaaaaaagtcatgaaaatacatttcatctataaatattgggtattcaaaaaatgataacataattgaataaagttaaagcaattactaatacctaaatagcaaaataaacaaaaagtgaatcgatccatccatcatcatcatattctataacccagcaaaataaaattatacgcaaaactgataaagtatgtttgatgctgtgtcactgtcgacgcccaccctataattaaaaaaaccaataaataaatggaaaacattaaaattttgtttttaggtgggtttttaaatagttaaaaaatgttaaaatcatttttcagcgaataataaaaataataagtaaaattctactgaatgtaatttcaaaagttcatatttttttttctataaactgcaaaaaaactttataagactaaaaaggcaatttttaattttttttttatttactatttttaaaaaatttttgttaaaaaaatttgataaattcggtcgtgattatagtatatttcttaaaaaaaaattaaaaattccttcttgaaggctgtgtattttttttgtttaagaattttttttaaatgcatgctggtaaaaatacaaaaattacatattttaattacataaagtacaaaatgggatttttgggagacgaattccgcgttagttaaaatggcttttgacatttttatttttattattttatggcattannattttgtttttttttcatatgctgctgaccgtgctcctccacg

SEQ ID NO: 22262 - DNA, 1955 bp, Heterodera glycines
attgtttgaaataattaaagaaatttgtttgaaaattttcattaatttaagtttgctttaacttttggattttattaaataaaaaatttaattttgtattattttcacttaaaataaattaaaatttgaatttttttaaaaaattttgaatttttttgaatttttaaaaattcccggttggtcccggttccggacgaaaatcgaggtcccggtaagtcccggtcccggttttgcctaaaattcccggtcccgaccgacgcactctatatagaacacttagggctctcgaatgatatcaatagggttgaatttggttgataattaaaaagttatagccaaaaacatgctacgaaaacgaccccggctccaatttacctattttgatttgtagtaaattggtttggctgttagtgaatcacacaagttttgtctttaaaatcagctctttttgggccaaaaatgcgctgatcacgaatctgagctaacaaatcagatttaaaatcatttatctaagatttttgtcaaccacttgatttttcctattttttaaattattaaaaagtttttaatggagatcttgccgccggaataacaacgcgaatttttctgtctccgtcccttgaaaatattttgctttttgtataataatttattaaacatcgtcttttgcatattggtaaaaaacataaagaactgaaatttccaaaacaacaaaatacgccgtttcattgtcaattttaaactcaacaaaaaaaaagtgccgtccaatgacaaatttctcgaaaaccaacaaattcctgccaacgttgtccgtccgcctttccaattattgtgtttcgccttttcctttcttcgcagtttttttgggacggttcagcagtgcttcctcgttctgagaacaaaaaatgtaatcattgaaattctcaatgcttttgccaacttcgtccgagctgtgccggcggaacacctgaaacatcggacaattcattctgctgctgttcaacaacggacgaattcgatgaggactgaccaccggatgagcctggtgctcatgaacggactgtgcaaacgaagcaaggtatcgaagaaatgccgggagtttttttgatgaaccactgactctgaccaagcaacgaacagacaaacgtgtccaaaacttaattttgattaagtaaatactgttagcatatatgttatataataaaatgtccatttatgtagcatttacaatttccgaatgaatcggccttttcttcggaggcgcaatgttcagcgatcaattgggccaccgattccttgaacaccgaagggggcagaagcgcaccactttcgagcccatccgaacgcgtcgctgatacacttttgcccaaactttttgcgagagctgtacatttaaaaaaaacattgaatcaaataataatttttggatttggtatcaaaattcaagcaaagttacgcactgtcaatgtggaatagtagagcatcgttggtgcgacaggtgtccacgaaggcgaacaatcttttctcagcactgcttaactttccatagtgcaccttatggagacccacaattattttccttgcctgaggccctctttgttcgtacagagagacttagttgcagcaatttgggcatttaatgaggcaacgtaataattcagaaaatgttaaaaatgcaaaaataaaacccaatcatgaagcactcacacaatccaaaatgttccttcaattgagaagacagtttgggcaacagcgcgtcgaatgagtttttgaatgttcgaacggtgaacggatcagcaaccgactgaagcccagcgacgccatggaccatcaggaaatgttggagcgctaatcatttgtttaaatgaataaatttgaccgcgcatgacgggtgcattccacttccccgccctcagataaaatttttaaatttcaaaatgtttgcaaatttttaa

SEQ ID NO: 22263 - DNA, 2162 bp, Heterodera glycines
ttttgagcgttcatgcctgccaattttggaaataatactgccgcttccgatcatatggtatcactacctgaagccaattgagcaccagccgattgctttgcgcaatatttgccggaagtggcgcgcccgccgtcgcggaagcggtcgccagcggcgccgtccggtcgcagtcgccttccgcgccgtcctcctcctccccaattgccgcaccaccgaccgaaacaggccctttggacagctccaaaagggcggcaactgaactggccgcatccggcgtgtgtttaagtgaagcggcttaaaactcgaaggtaactgcgcaaaaacggcacaacgaacatctccgaaaattggaaatgccattgctaacggcgcctttttcttcgtgcggcgaaagagcaccgccccttttttcgtgtgattggaagccgccattctgcacaacgcatttgcgcatctgaaaatgttcctgtcatgtcaaaacactaaaatttagaaatggtatttgctcctctcctagtgatttttttctctctctctcacacactatttcccccctctccccaatgttttttctctctctccgctctctctctcaaatgcttttcctcacatgtttttccaatgtcgaatggacagagaatggcatttggcaaatgttgcagttgtacacctccttgccctgctgtccgtgggtgcgcatgtgccgtgtcaatttgctgctctgcgcgcaagcgtagggacaaagttggcacctgtggagaggataaataattcagtcttttgccaatctccttctcccccccccccctcctcacttgtacggcttttcgccggtgtgcgagcgcaagtgaacgatgagattggaacggttggtgaacactttttggcaaaacgtacacctaaaaaaaagtttgtttgtgatgccttttgtctgcctttttcgatcagttcgaaatgccccttccgatcactccattccgtcagttttaggtccgatcacctgccctgccctcctctccccttccgctccgttccccccgctttgctcaccggtccttccgcgctttcgggtctcgcttcgccgccggttcgcacggcggctcttcgtccccgtcgacgacgatcaaccgatcgctcagctcgtctccgtccccctcgccttccactgtctgttgtccttcctcctcctcctgttcgtccaatctctgtgcctcctcatcttcaggtggtgtgcccggtgtgtcagcatcgtctgcaaatagcaaagtcaattaattttaataaaatgctttttctcacccggaaaaacggcgcccgcggcggcggcgccaagcgaagagcgcggagtcaaagcggaggccgagacgccgtgcaaaacattcgcggccgaacgacttcgaccggacggagtcagaagacgcgagcaaactccgccggggacgggcgacacaaaggcggaggaggaaagagtgttgggcgaagtctgaacggacaacacaaaatggcatggtaatgccaacgaataacactggactgaccattgaactgctcgccgccgtcgtgtggtgcagcagcggcgaccgtcgcctcaacgccccggggctgggcgttaccgcggagccaccggcgactacgcgcaccattgacgaagcggtggtcggtgtcgcgcgttggtgcgacggaatgggcgtcagcgaaaggggcggcgggggcgagccgagcagcgatttagaagagggcaactcggcggaaacaacatcctgtttattgcgaatagatgacgacaataagaatttcaaatttgtttttctcaccccttttggcgttccgttgcgtttggccaccgcggcagccatcaaattggacagaaaggcggtggaagcggcagcggccgcggacgttgttgatgacgcgggcggaaggaacggaattggcgtcgcgtttccgctggaggaggcggcgccggcacttttcgttgtcaccgcttgcaaaagggcgccgacggcagccgcctgaaaatgccaaaaatggtgaaaaagatggcacggagtattgaactaacattttcacgttgaatgttctgctgtgtgtgctgctggatgtaatattgttggatggcagccaaaatttggggttggaacaaatcgctgacagtctaaaca

SEQ ID NO: 22264 - DNA, 1717 bp, Heterodera glycines
  unsure (1)..(1717): unsure at all n locations
attattggtgataaatccatgttctgaatggtgtagaacctatccataagttgttttagaatgggctttaaaggtaatgagtagggccgcaacttttagtgatttaactatttttttgctcaattgttttgaagaaaggagctcaaaaaacgcatttctgcgttgaaattttccgattcggatctaactatcggtcactggaaatcactattttggagcttcgtcactaaaatagtgaaaattcactattttggcgttttgtcactattttttcactatttcggaattttttggaaaattccttaacaaaaatgcaataaaaccaaaaaaatacacccctaagaatcgacctaaaaatttttcaaaaaattccactaagaatcggaaaaatttcataaaaatttttcccccaaatttctttttttgacaaaatttttggtttaaaaatttcaatatttgctaaaaaatgtaagaaaggaaatgtacctcatttgcaatgcaatcagtgaataaatattacttttgctcaatttttggctgaaaattatgtcactatttctcactattttggcactttttgtcactatttcttcactattttggcactttttcctcactattttagttaactatttcgggattttccgtcactaaaggttgcggccctacttagcatccatttccttttcatttcttccgttttcagcagaacatcttccgattccatggcccctttttcctcctccgcttcccaccaaactctccaagttcatcatcattatcacatcaccatgaactcttcctcatctctcaccattaatcgcatcatcccctcttctcttccgttcttttttcttccattttctccctgaatttgctctttcacttttcgttcactttgtatggaccaaaacacccgatttacaaatgttgttcatccgagtggaataaagcgcctcacaaccaatagaagtgatcagcggaaggggaggacggggaattaatgccccccgaggaggaggggaaggaggaaaaggcaagggataatcaatcccacgaaaccggcgctggtgtttaaaatcattttattcacctgaatccgtgaaattattgcatccatttatgactaacacgtaaaaattgttagattttgcttttttacagtttctctcccttctttttccttctctctctctctctgtctctatctttctctctctctctctctctttcccctattccctcactctctttccccctcctcttcctcctttctctatcccccttttaaaattcctccggtgataatgcgttgctccgatcgatctgccggctgatcccgccccgtccactggccactcttcctctccctccctttcctttgtcccttcccttctctcattatgaatgacttcctcttccttctcacattttgagtgcccattatgtccatcaaatcaattggctgaacgaatgaagcaaattttgacaatatttatggaggacagagacaaatgcgcaactaactcattagaactgattagccgataaacagaggcttctaattgcttgattatgctaatccacaatctgtggncaacagtccatgattattatttaaagacagaattaaatatgagtttctcttacacctcaaaatatggtataaatgccttatgcgttcccgcccgtccccattccatgccaattaattaat

SEQ ID NO: 22265 - DNA, 1822 bp, Heterodera glycines
gccatgatgtgcacgttagggcacttccggtttccctttcattatgcgatgtgtcaactccaattattggaggaaaccaagtgcatgtcggctgacgcaaagaccctaacagactaaaacgcgcctaggtagcgaagctcaagaagcgcgcagcgctttcccaagcaccaccctcgcatgcacacacccgctagttatatatatgttatataggttttgagtttcgtttcaaaaaacaaaatctcccggccgaaggccgggagcgccctgaaagtggtggaagggtcttacaactttttgaggtgcatccgggaaaactataggttttttgatccgacggccaactgagtcccagggagcgatttgtcacttttgcttgcagtttaggacccgtaactttttttctaaaaccctaatcaaaaagtacccgctttgagggcacccccccaaagggtcctctacatgcttgtattttttatttttttattagagccaccccttggtctgcagttgtgagcaactgaagcgtgctcaaaaagtacacttcagtaccaggtgaataacacgccgagcttttatctgagggaaatgtgcccagaagacttattgtagagcttggaaagctcgattttttgaaatttcaaaatttcgaaaattttcaaaatttttcgagttaggcctaaaagtaggttttggggtttttgaattttaggattttttaacgatttttcccgggaaaacggaggccacttccaacacatagtttttcgagctctatcgaatggtatttttttcggaaaaatttcagttttttcccggaaatagaaaaattttttggcctgagcgggacatttgagtcccgggcccataactcgttaggggttgatttaagcgaaaaaatgccttagagctaaattgtagagcttttaaaatgctatcgaatggtgtgatatatggtcggaaattttcaaaaatttccgagctaggccccctagaaattttcggaatttttttttgtgttgaaaattggggtgaaaaatatttttcaggggttaattaaggtgctgagcacgaatatgacctttgttttccgtttcaaaatttttggaattttttaaaaattcgaaaatattttccaattttttggccaaggaaatttgggctaatatttgaaaattcataacatatgattgagttggtcaatttaaatgaaataaagctttaaaaatagagaaaaataaggagaattttatgggatttatttgggttttctacatgaattagaaaaaaattattccagaaaaactggaaattttcgaattttcagaaaaaaattcagctctcggttctgaaaggtcactctggaaaagtaaaatactacaaaaatccgcaatttttagccctattttataaattttatttcacatttttatcacattttaaaaaaaagatacaaaaataaaactgattttgggattcgggacccaagggggtggacaggatttttgagtgaagaaattttttcgccaaaatcttccgaaaacatgtctttaagggtaatttggaccgctgatcacgaatacgtgatctgattttacttttgacatcgttaaaacctctgaatccccgtgtggattggggattctgggggcatcatttttgagggggtgggggcaaggttccaaatcccgacggaaaacccattattttttttatgaatttttttcgttattttccccggtttttaattaaatttgaaaattttctttttaattattttaatttatttttttttaattaaaaaaattttttaattcttttt

SEQ ID NO: 22266 - DNA, 446 bp, Heterodera glycines
ccgaaggcccccgtacgaggccgcgaagcggccgagccctccccaactgttcaacatcccaaggcacacaaaaagttaaaaatgctaaagaaatttgctgaggttgagtcccagtgtttgtaatgccggagatttgagtcccagagattgaaatgctggtgggtttagtttcagtgattggaatgtcattgaaagttggtgggttgagtcccaatgtttagaacgccgcagatttgagtcccagagattggaatgccggagatttgagtcccagtgtttggaatgccggagaattgagtcccagagattgaattgctggtgggttgagtcccagagattggagaaaagccaagaaaatgatgcgagggcgcgaagcggccgagccagtcgattttatcattcataattctataacacaatcgtactgcctagcgggggatgcgccg

SEQ ID NO: 22267 - DNA, 1469 bp, Heterodera glycines
cttttaagagcctaaaaatacatccataataatgaacccctccatatcctgttaattgtttgcgttattccttcgtctgcctacttttgtcccatttcctcgtcctgactcatcaatgtgtgtgttttttccccattgattggtggggggggggggggggggcgggggacacttcgcattcccattttattcactcgcccaccgcgggggaacacaatcggagcctacataaatcagaaaaaataccaatgtatattatgattgttctatcttttttttcatttacatattcattggtgatcaactgctgatcaaaggagatcgaattttgaggtatatgcctttttttttgctatttttatggcctaatacggacgaaaaacactttacaaaaaaacaccgctaaaaatccaacataaaattttaataaaataaatccctaaaaattgacctaatttttgaaaaaaacactccctaaaaatgggaatttttcacaaaatgttggttggactgaaaatggcgtgttctgacaagttgcaattttttaatactacataccagggatggcattccgaggccccaaaaattttcagaaatcggaattccgtgccatccctgctacatacatacatagtttcctttttttcggtgctgttggtcgtaactcaaaaacatgggcgtggtgtactcaaaaaatcacaaatcagaatattttttgatataactttgctcgaaagcaaccaaatttttagttcttttgcatggatagccccaagtgtcttcgacggcattccgtcctgcaaaaattttgaatttcaatcccgctgcgggattgcacatgtgaaatttccgtactctaatattaaccagttaattactccttttatttatgtgttttcccaaaaggaattatcccccccccctccctccacctctacacatcatttaatttctacaaatatttgtcttttctatgataacacaacaatccccttttacattctaccaattaaattagattattaatatttattgtttaattgttattttaatatttatcaaaacatgtcactttcaaatgttcacacaaatttggtacaaaatggaaaaggtagaaaattaaagaaaattttttcactttttttatatttcagaaactaatgacccattcgctttttcggctgctgaccacccacaaaatgttggcaacaacgaatcatcgtcatccattgagcagaaaagggtcagcaaaattgtggaaaaataaattaaatttgaatattttcatgttttgctttattcgacacttgggtatatatatcaatttaaaatgcaaccaatgctatgcctaatttataagcttaacagtcccttatttgttaggggggggggtacgaagagacggactcgctcagttgggcgccggcacgtttctgactataacttttttctttgtcaaccaaatcgaa

SEQ ID NO: 22268 - DNA, 2198 bp, Heterodera glycines
  unsure (1)..(2198): unsure at all n locations
tttattatacagtaattttgtaccgttcccaaaaccactaaaaagctagancaaagnacgnaaaaccaaggggacctcttgaaaagggnaananganaagaanngcaaananatnnncactncnnnnaaaggaaggnggncgannnnttcctcaaaaacaacaanncgcgcattgaacggagtcgaaaaaatacagcggacgaaggcggacgacgacttggtttggatgatgatgataatgattggtgggcacgttcactgagcatatgaacggaaggagggaaggaattggcaccacagaaaagggagtcaattactcactcactcatcggcaaaacatcaaaagaccgccctaattgccgccattcattttaagacgcattttgaataaaaagcagaaaatcggagagcgataaaatgagacttttccaaaaagttataaacatttaacaaattgataaaaaatttgagtcacaaatctggccaaatcattttggcctaaagggtcgctttggccaaatactttaatctgactatttgtattttcaaccaattttttaccaaattttatgaacttttaatttaacgcatcttataagttgaaaaaatattatctggtgcaatttgttaaaaattagtaaaaaaaaaaaatatttttaaattgttttaattaaaattaaatatggacaaatattttcaataaatattttatcattttcaaagaaaaaaattaactattttaattattaacacatgagttagcataaaccacagctttgtgggcaatattctcgcttcatcctcaacggataaacttcggagatgcaaaagcctcggggcacaatttgttcacaactaaatgccaattaatttcacttaaaatgcccttctcattttagcaaactttacaacattagaagcctaccgagaattttccatttggtcagcactaataagcaacaaactttggcactcactatgggtaataatcacggcatttgggccccacaatgttgttgccgccgccaattgcatttttgcgcaacattacgtacgagccacgggatgatgacgacgacgacacccgcgcgggctgctgcaccaacggcgcgcgaggcattcccccggcgggtgccgcggcatcgacgacaacctaaagaaataaaaagatcgcattgggcggtcgcgcagaatcaaaatcaccaaattctgctgtggttgttgttgtgggttgggcaacaaaaattgttgttgctgttgagattgttgggccggacgttgcacaacaatttgtggttgctgctgtggtggtggtagtggtgcgggtactgcttgcagttgttgttgggcgggctgttgctgaacatacaccgtttgtggctgttgtggctgtacctgttgctgctgttgttgtggaaactgtaccaatttataagcaagttgctattaataatttccttcttcacctgttgcgtttgttgttgttgttggacttgttgcggaagctgtacataaactggttgctgccaaaccactgcttgctttgctgtttgctaatgaggttgaaaatttagatgcattttgaaaaagggaacttcatttctttaccattggcacttgttgcggttgttctgctagtactgcctgtccttcacgttgttgttgctgttgttgttgtgggagtggcagtgaataaacgggcgatggtcccccatttgcctccgtcggctgtggtaaaaagttgcccagctgaccattggcataaacttggccagaggctgtcggcatttggttgccttcaaaattaaatgcttgggataattaagcttaaattcagccattttctgtgtaccggccgggccaatgattggaacgagtcgatagccatccggagttggcccaccagcagacggcagccgaacacgtcgcggtaggacgaatgttttcgctggtccgcgacttggcactgacgacacggcacgcgttggcccggttaaaatgcgtcgccggcggttgttagcacgcgtggacgacagctgaggcttcggcttctttttctgtgagatttaatatgtgaaatgctttacctattttggttttgatttcgaatttaatttatttttaatttcatttttattttggaattccccaccgcttttcccccattgtcttctgcttcttctgctgattgctctttc

SEQ ID NO: 22269 - DNA, 2182 bp, Heterodera glycines
tatttaaaaaaataaaaaattaatattaaattaaattcttctaaggttttattattaattaatgggtttaattacgagttttttttcaagagtactaaaaaatttattttttcattaactgtgatcagagaggctcctaaaaaagcccaaattttcatgagtgatcttattttacaaaaaattttgcaaaccaaaagggtccctccccctttggcttttaaaattcaaaatgggcaactttagtaataataaagccgaattttattacaatttataaaattaatttatgaagcattaatgttattttacctttattttagcataaaattgtatttgtttttatttatttttattcattattgtaaaaaaacactaaattttgcactgagtaaatttttttgaattaaaatattttttaattcttaaaaatatatattttttttatttgcaaaccaatagggtcccctctttgttttttaaaattcaaaattggtaactttagtaaaagcgccaaaaattcaaataataaaaataaaattaagaaataaacattttagaactcttgaacaaaaagtcccttaattaaatcaattaattaaaataataagaattaattttaatttaatataaatattacttttttaaatatcaaattgctttttaaatttattaattactttctatagtgaactttaatttttttttaaaagactttttaagtttggagggctcataaacacagaactcgttgatttgatcgaccccgaaaaattcagctaccattccgtagggagggtcccgctgctgctttgcgtgcagtttgcagtcgctgtcctgaccctccggctgacctgcgcgccgtttgcggtcgcggtgctgcacctcctgctgacctgcgcgcagtttgcagtcgctgtcctgaccctccggctgacctgcgcgcagtttgcaatcgcggtgcagcccctcctgctgacctgcgcgcagtgcccagaatcggttcccctcctcctgctgctggcaagcgtgcagtttgcagtcgctgccctgaccctcctgctgacttgcgcgcagtttgctttcttggcggcattcccccggtgcttttgcgtgcggtttgcacagttctcattttgaggtcgttttttcggctaatactggagaatttgtgtagcggcggaaaataaattaacagcaaattattttttctattttttatggattacaaaatatgcttgattaaaatgggaatggcatttttaggcaaaaaaacaaattttttttttagactttttaggtataaaaaactacaactttatttttgggtgatatttaaattggaaacgaaattaatttaaacatttcgtgtatttctgagaaaacgtgatttttagtacacaaaccatcagtcggatttgtgtatactctcttaaatattgtcagaatgactaaaaaaaattccagccatcttgtgaattctttttaatctgctaaatcccagccctgctcaagagtctcgagtcgagcagacacgaaaaatctacagggttcaattttacaaagaaaaacgatggatatgcgttatgggggataacgattggataaaagaattgttgggagagactaaactttgaggaagggaggcaaatgcaaaaagggcagcacatagataaaccagatgatatacctataatgagatgcgagtacttttttaggaggagacatgaacacagcagagaaagagagaggagagacaaagaaaaagaaagagagagagagaaaacgagagagggtgggagctgggagagagaaaacaaaataaagagaggaagagagagagaaaataagagaggatgggagctgggagagagagggggggggagagatatagagacaggaaaagaaagagagagagagagagaaaacgagagagggtgggagctgggagagagaaagagagagagaaagaaaaataaagagaggaagagagagagaaaataagagaggatgggagctgggagagagaggggggggggagagatatagagacaggaaaagaaagagagagagagagagaaaacgagagagggtgggagctgggagagagaaagagagagagaaagaaaaataaagagaggaagagagagagaaaataagagaggatgggagctgggagagagag

SEQ ID NO: 22270 - DNA, 1811 bp, Heterodera glycines
aggaaaaagggattaaaattttcaattttggcaaacaaaaatagacaatttataaaattatttgcgaattctttttattcttataattcgatttttaataaaattcaaaaataccgtatttgctctttttatatgccatggtatattatttttcaacctcctcagaagggggtagataattggagattggtagactaatggagactgggagattatttttcgatgatttatttagtggaaaatttttgaaatttctgaacatgtcgccaaaaaatgtcatcgcgtcaaaaaaaaatcattttattgtatttctgttaaacaaaatttttttttgcttcaaagataaaaattgaccatttttgatgcaaaatcggttcaaaatttctcattttttgggaattcaaaaatttgctattttatgcatattactcatggcattttgtcgtcggcactttcatacagccatcgaaatgccgatgctcatagctgggaggaggatccttttcaaacatttccattggttttgcgtatttgtggcaagcaatttcatagggtgttgcccaaatgtggagcacgaatttggaaactttggccacaggaaaggcaattttcataaattctgtgccaaactgttcctcggtccatgccgttgggtcaaaaatgcacttaaatcattttcattattttaaatttcatttaaaattccatgccttagtttggcacaacatcgtgccattttgtgagcaggcatcaaaaatttttccagcaaaaaatagctgtgccatccaatcgtaatcggccaaaaaggcaccaaaattggacgcattttgaaattcattcaaattggatgaaaacactaaagaataaataaatgcatagaatgaaatatgtaaaattgcatttttttcaccgtttttgagcaggatttctgtgtgattttccatttcattgatcagttcaatgtccaaaagttgatcaatgccattgcttaaaatgccaaaagattttttaaaaattatttatttaatcaaaaataaatggaaaataacatctcaatcatgacatctgaatttaaaaaataagcaaattaacaatattttttgcaatcataaaaattatcaaattaattaaattaattttggttattgatcactttaatataaaaaattaaacaaaatttttcaaataatttcgcagattttctcatgaaaagtctcatttcctgaattttctggtatgacatgcggtaacagttgggtagaaagagatgaattatcgggacatgattatatatataataagaattcatatagacatggttatatctcgtgaaaatcattccgaatgcgtagtagttgtgggtgtcaaagatctatgagaaataaactggagataacatctttttgtcgccagatgagaaatatggttggctttctcctgtttgaaattttacatgaagtgaattgctatttgagtataatgtagacaaacaaataagttatcagtgatgaaaatgtaattttacagagaaatgaaagatataaataatatggagcatttaaacaatagtcttccatgttaagataattcatcaaatacataataaatgtttacaggatatataggcatccaatggccgaactagagctagatgtctaatatttagcagtcaattggataacaatgtacaatagtgtcgtaccacatgttgaagatggaatgatagccagaatcgcacaatacagatagggcgaagaaatatgagtgagtgtttcacaaatatatttagtgtcgtcatgtgatcacctgag

SEQ ID NO: 22271 - DNA, 1941 bp, Heterodera glycines
attcaataaattttaattagagcttaattagactatactgtacagaatcttaattgtccttaataccgttttaaccgactttcaaggatcttaattactattttttaaatagaaagtttcttttttcgaagaaaatttgaaggaaattttttttttaaaattcgcaacacttaagcaattaactcgccttcaatggcacgaatctttcgccgcacatcagcgcacggcagtgggcccagcgtgacaatggtggacgtgtgctgccgtcgtggatggcgtcgtggcatttccggtgccgcgtcccaatcatccgccggcggatgctgttgttgttgtagtcgttgatagtgatcatgatcataatcatcatcttccgaatgtacatcatgacgacgctgcattacggcgcctcgcgcggtgctcggcgcggcagaagcgtgccgcacgcgtgcggaatcggacgcggcagcgtgtcgccgccgccttggcgtgaccgtgtccgtttcgtaatggatcattgctgcctcatccgcatgtggcgcacgcgttcgtgcgcgtcgtacaacattgggcgcgtgtgggacaaaaccgcccgcgggcggcttccgggcgccgtcaaattcagtacgtggacgatgcgaaccgtcaggcgatggcataatgacaccggtagtttgtcgtcgcgccacatcctcaagggggccagtgcctggaaaatctcaaatcccagccttacagtatgacagagccgagagtccggcaaattacggtaccgtgccccttgatttgctgctcgggttcgtctggcacaaaatcgcgcatttccgccttgtatggcggttgtcggaccacgggcacccagtggtgttcatctgcagcacccccatttatttggacggacaacggaccgtaatgctccaccgattcggataccgtagttggtgttggccatctgtgtgttttttgtgtactgtatgtcagccgttgttaattactgtagtacaaacaacctggtttctacgatcatttcccacagttccgtatgcatactaaacgatatgtttcccacagtaccttacgcatattgtactggtatatttgccagtgttccctatgagtacagtaccggtacgggtttttgaaccacgataattactgtagtacaaattaattggtctacgatcatttcccagatagtagttccctatgcatactgtacctgtacggtttttcgggcggcggttgccatcgtttgccagtccgtcggatctccaccggctgttccggcttctcaatgaactgttcacggcgccgcaacatgtcaatgttgaagcggtcgcgcgccagtcgttcgtcgctggtcaggatttcgttgcgctcgtccacatgctcgctgtccaccacgtatgtgcgacgccatgtgacgctgctgcagctggtgccagcgagcggcgactgtagggcgccgttttggtaagcgactgtgccaccaccgtcaccgccggcgttcactgcgacagcggtcgcgtaccgcgggtcgaacgccgccggcgtgttcgccccctcggcggcggtcgctgcgctcatcggtcgcgtctcgaaaacgcgtaccgctgcgacagcgggcgacaacagttgcgtctgcgagtgggacgtgctgggccgctcagacgcgccgatgcccgtgtcggcgggcgatgattgttgatgatattgttgtggtgatgtcagccgtgaaagttgctcttgttgcagtttgacggcttgaagctaaaaataaattttaaaattgaaatcccaaaattttgccattttcagcggaatttggaccattgagcaactcaaaaaaaaaaagattgtattgggctgatcagaacaaattacttaggaatataggtaaatctgtcctccacttgatcaaatcccagtgagacgaacaga

SEQ ID NO: 22272 - DNA, 2385 bp, Heterodera glycines
tcttttgggcaccagccgcactgttctcgcgttttttagtccataattttcggccttagacccatttcgaaccccggacccgaattcgaaacaaaaaagcccaaaactcaaaaatttcaaaatacatttaaattatttctaaggtattgcttcgcgattagacaattatgttggatttggtcggcaaagaaaaaagttatagaattataaatgtaaaagttggaaattaatagaaagttcttacagctggaaatgggcccttatgcctaaatttcaatttttgaggcccaaaacttttttatttttagagctttggttcgaatccgggttcgtggtgcgaaataggtgtcagaatctgattctccgctctttaaaaccctaaaacaaaattcgtattttttatttttgacttggcgctgaaacgacctggcgccgaaacgtcggcgccgaaacgatacggacccactgaaacccctcggagaaaatttaatgtcacccccttgaattttttttaaataattttgctagggtaattttatgcgctgacaagaatctaaaattaattttggccgattccgaaccccggacctgaattcgaacaaagaaggcgaaattcaaattttaaaaatttactttttgttagaatctgtacagaaataaccatttttggtgtttcaataatttgtagggatgcgatttttagttaaatacctaaaatttttgcgcacttgtaacgttgagataagcataaaaaacgagtttttagcttcgtttggagcttctacacccacttttctaatacctatttttatacctatttcggcattttggttacctattttaaggattttcaaaaaattcttaacaaaaatgcaataaaatcaaaaaatatacccataagaatcgaccaaaaaaaatttcaaaaatgcaccctaagaattggaaaaatttctcaaaaatttatcccaaaatttatttattttttctattgacaaaatttttaatttaaaatgtcaatattatctaagaaaatattaatatatttaaattttcgtttacaaagagatatgtagaaccaaaattttccctctttgtttgcttttttccactaaaaaatcgttaataaaaatttttatttacctattttggtacctattttggaatttttgtacctatttaatacctattttgagatttttttttaactttttaagtacctattctgcgattttttttacctaaaaatcgaagccctatttattaagaatgcaacagatcgacgatattttttcgatgtttccaatattttattgaaaaaaatttaaatttttgaatcattctcaaaatttaatcaataaatttcgaaaattattatttttttaatttgaaagttctccaaaatacccaattaagatttaatctgctagccaatttccgattttttgccgctttatttttacaataaaattttgcaatttgaccaattttttttaataaaatttaggaatttttgtgtccgggggtgccgacaggcgaggccggaaaatttatgaaatttttctacaaatttttaaacaattttgcacctaaaaaaagaattttttttttgatttttcggctatattttagaaaagaaaaaaacatttaatagttttttatttttagtgcttgagaaatttttgtaattaaatttttcattttttcatgaatatgtctttaaataataaattaaataatttgattttgtttggggatcgaaccaaggcaaaaaccaaagaaaaactgctgtttagccacaatttttcgaattcagaaaatgaaagtttttccagcaaagtttaatttcattcatttgtcccctatttttcgtccccttctcgagagtcgacactcaattgtttctttggctccctgcctctgctgctttttttgttatctcttcctttttttccgtctcttcttctctttctctctcatcactcacttcctctctctgcccctccctctcatttatctcacactctttcccgtgcccttgtttcctacacaatgaccgactaccggaactggagaaagtcgcgggcgatttgttctgttataacaagtatagatttagtgatagttgacagctgttcgttggtgcagatttattggtgattaaaggaagtgtgaatggatttgtgttggttaaatgtagaacagtgaaatacagtgaagggtacagtataggtgaaaaagtggtgacgaaaaaggacttaaatacgatacaaaatgagggggcaagcggcaaaatcatatggaaaattgataataaataagtgtgattaagtgtgaataagctcaaaagatggtacatacgtaatcctgattaatcataaatggtta

SEQ ID NO: 22273 - DNA, 2084 bp, Heterodera glycines
aggaaactaacaaacgttttttggctgcctttttcattattttcccaacttatacaccattgatgagcttcaattgctctactattttactcagaggtgatctttcgctttttctattgataaaaatggtttattgtttttttgggaaaagataaaaaaattcaaaaaaaccgaaaccgaaacggtataccgaaaatttttcttcggtttttttcggttcggtttttttcggttttttaaccgaaaccgaccgaccgacaaatttttgagtttttcggtttttttctgtttcggttttttttcggtttttaaccgaaaccgaccgaccgaccctcttgtccggtctctagtaaaaagtgtccaaattttagggatttttcgtgaaaaaatcggcataacttttcctaaacacaagaaaattaaataatctttgggtcattcgatagctcttggattgctctattagaaagaaaagtttcagaaaatttcattgagttatcacaactgtgaccacaaatgttcaaaaaattgccataactttctgaaaactcaataaaatttatctgaaatttttctttctaatagagcaagccaattgctatcgtaggatacaaagaccatttcatttgattttgtttaagaaaaactatgacgaatttttcttgaaaaatctgtacaatggcacttttaccaaaagcccatgatggcactttttacggaaatgacccagaaaacgatcccaaataaccgaccctttcccttggtcaacaccaccggcaatggcttataattgtgggccccaaaacgcaattctctgtcgatgaacgtgttgctgctgctgttgttgttcaatgacggttgtgcaacaccaaatgaagcaaaactacggcatgtttttgagggtgccaacgaattcttcaaaaatggtcggaagacacaacgagcaaacattgggcggagaaagtggaccatttagtcaaaatctatggacgatttagggaaaattcaaaaatatttattttcgaaaattctaaaccattaattttggagatttggattttttcaaaaatttttgacctttaaggggtgtattttcgaattaaaaattatgaaaacctatacaaatccggttcctactaattatggagcaattcatttattaattaaaaaatcgatgtgcaaataaaataattgtgtgaatgaatgaacgaacaacaaaatattcgccgtcattgagtgagagagaagagacgataaaaatggatttgggaggatgataaattgggcaaaaataaatgaatgtgtcgcgtgatatcattcggtcaaaaaaataatacaaaaattcgattacggggtaaaaaatggctttttttgggaggacacgggtgggtgaaagatccgtccaaagtttcggcttggcctttgatccctcaatttgtttcattcgtcgtcggcagacaaagcccagtccaaacagtcaaacagctagagggcaaagattaattaattttttttattatggtgagaaggcaaaaacaaaagtgacatatatgcacctaattagtgaagagggacagataaaatgtgataattaagaaaggcattaaaaagtgcacttaaaaataatcgtataggtaaatgaattcaatgttgcaatgatttacaagtgattttagtttgttgtaatcagtttttgaataaaaatgcaaaattcataactcttgaatgttcgacctttgattcgaatcccggctaggggttcgaaattggtcaaaataaatgtcaacttcctgttcagcgaccccgaaaacccttataaatatgttttcaatgactttcaaaaaaacttttttttttgtcatttaattgctaaaagcttgttcttcctggagctgtttggagttttctataagaacatcgttctgcattccgaacgccggacccgaactcgaacaaaaaatcgaagtcaaaatttcgaaattagagtttttcttcaaaattggattaaatacacggaaaccaactaaaagtcatcagtctttcaataatagatcatggatgccgattagaagcaaagatgctaa

SEQ ID NO: 22274 - DNA, 2603 bp, Heterodera glycines
gaatgccctaaattttattggaaaaaaggcgaccaaattttcaacaatttcccccattgtttttccatggccacctgctgttcgtcttgctgctgctgttgctgctgcatcagttcagtggcggacacagagtaagagccgccgcccagaaatttggtgccaaagccgcggcactggtagggccgttcgctgtccttcaaaatggtgacggcgtcctgcgaaaaaaaaattggaaatttgtcgatgaatacagtaaaaaatcattggcgaaaaactaaaaaaaaacttaaattttgaacattttataatcaaaacgtaaaaaatctcagagaaaaagatatttgagtaaaagaaaactatcgctggtcaaaataccacaaatttcgggtcgagaattttggaacaggacatatttcatcgccgattttttggcactaaaatttttaaaaaatttctaaaatttttcacaaaaaaacttagaactttataagaaagtttcaagaaaaggaatttcaaaaatttttcagcgatttttgtttaaaaaatttatgatgcattaaaaagttttttcgaaaatttttgcaaaaaaatcataaaaaaattttttacctcttggtattttcatacaaaaaatttttctaagattttttcttgaaaatttctaaatttgtagtaaatgaagcacctgcagcgtgtcgggcagcggctggtcgcgcgtctccggcaacaacatcaccaaagtgccggcaaacagtgaaaaggtggcaaaaatgatcatcggcacgatggacagcgtgacgtcggacagaatggcaatgtacgaagagacgccggagccgaaccgggcaatctgtgaatttaagggcattcgccaaaaaattacaaccaaaaaaatgaattttttttagtccgttatttcccaaattttttctggataccggtccttggacggattattttctccaaaagtttagttggtgttgaatttttgaaaatggggatttgaacattttgactaaatcactcaaaaattggcatttttggccaaaatgaatttcgatgtttcatgccaaatgacgcttttctaggctcggatgagtgtattttcaaatttttgtgatcggcgctatgattttgatgtagaaaatgcaaaacggcgcttaccatggagcaaaatccgacggcactgaacggagggaaaatgattagaaaaggcaattaaacattattaagtgtggcaaaaattggtaccatgacaaacattttaaaaacatttttgattttgtctaaaaaatgaccaaatgttgagattttaggccaattttttaaagaaaaaatgaataggactttttgggggccggcggtgccgataggcgccgccgggaggaaaattttgagaatttttaatgaagtaattttgttgggaaaatagccaaatttttcagaaatttccctctttttccccttcgccggggcgacccccacccacctcttttacaccccccccccctgccccagtgatttgaccatgggcaccggccgggcgtacctgttccggatgacggtcgggtacagctcggaggtgaagatgtacaggatgttgaagccgccctggatgaagattttgccgagcaacatcagccccagcgacagcatggaacggttggcactcatcgaagccatggcgcacagaatgaaaatggcggcggcgaccagcgtgaagatttgggaccgtttccgtccgtacctttttggagacaaaagacaataaattgtttttttggggtaaatttgagacctcattaaagaattggaaacaagttcgctcatattatgaaattttctcaaagatttatggacaaattaaagaattaaaaaatatattgtaaggtaattcccaaaaacaaaaaatattaagaatttgaaaatgtggcgctaaaaacccaaataatttttttttaatttaattaaatcaaacaaaaaactaccgtaaaagagggtctatggcaacgcatacaataatttttaattatttcttaaaataaaatatttttaaaatgaaaaattggcaaaaaaaaatttttgtattttttttttgttaaaatttttggaccaacgaatttacttcatcaaatagacacagaagatcagtgtgggcagttcaatggcacccgcaacggcgttgttcagaaagaagttgccgctgaacagcacacggccgggcgccgactgatcggacagcgctttaaaataaagggcaattattttattaaagtaattagttggctaatttagtggggtaattaaattattaaataaaaaatctatcaggctaggaaaaaacaatattataaacactgctcgaaaattttcaaaaaaaaatgtacaaaaatttagcgaaaaaattgttgaaaactagcgaagagaaattctatgtttctcgtacctccaaaaaatttgcaaatttaagaaatttttatgggcatttgaacgaaaattctatgccattcaaaaatttgtaatgacagcatttatttgcacacaagagcaggtcattccggagcagctcgtttccccccccccctacgtatcctccccgcttc

SEQ ID NO: 22275 - DNA, 2334 bp, Heterodera glycines
  unsure (1)..(2334): unsure at all n locations
gaccccaaaanaatttttgaaatttctagggggcctagctcgaaaatttttgaaaattttacatcatgtagtacaccattcgatagcatntaaaatgctctacaattttgctctaaggcaatttttggataagatcaactcctgacgagttatgggcccgggactcaaatgtcccgctcaggccaaaaaatttttctatttccggaaaaaaatcgaaattttttcaaaaatatcaccaatcgatagagctcgaaaaactatgttttggaagtggtcttcgtttctctgggaaaaatcgttaaaaaatcctaaaattcaaaaacccgaaaaccgttttttaggcctaactcgaaaatttttgaaaattttcgaaatttttaaatttggaaaaatcgggctttcaaaactctacaataagtctgctggtaactccccgcccagatcaaaccctaatgagttattcaaccgggactgaactggacaaagttggtactgaaaaagttcacgaacctacagcctttcctattgcagatagaggtttggatttttttttcttttttagaaaacacttcaacttagccccctcacagcagacattttttgattcgggttttagaaaaaaagttaggggccttcaaacgcaagaaaaagtgagaaatcggtccccgggactcagtcgtccgcgctgaatttttttctatagttttcccagatgcgcctcaaaaagttgtaagacccttccactattttcagggcgctcccggccttcggccgggagattttgtttttgcaaacgaaactccttgtcaatataacgtatatattaactagcgggtgtgtgcatgcgagggtggcgcttgggaaagcgcttcgcgctttgggagcttcgctacctagataaggtcggcttgtgaaggttagcggctgcaagtttttaatttttgttgggcttggacggaaaaatattagcgatctcaatttgcattcgccaaattaatgggttcattacgttcccgctccccccaccgtaaaaattttaatttcttcaaatctagaatttttaaacgggggggggacaaattaatgtactttttacaaaccaagtttcattgtactataatataaagaaaaatgccaacggtatttaaattgcaaattttatacctttccaacttggtttggttacgaactttgtcaatcaacacacttactaatgctggtgttgttcgcgtgggtccagcggattgtcactggaaaacaccgatgcgcaaagatgtcgtccacagaggggacagtgaaagttcggctgcggtttgttcatctccacgtcatttgtcgcttgtctaaaccccaaaataatcatttcctgtcgtttaattccatttttgggttttgtcaagcagttcaaactctttcaacttactttgatattggaagccatccaaaaatggccaaagccaagaaaaatcggctctgcacgccaaatttgtcggccaacgcttcgtcgagtacattgtccgccaacggaagttcgggctggccgctgtccaccagttggtgataacgcgcagtgatgtcataggttgcggaagtgttcagccccgggctaatgcgccatgggcaaatgacggtgtgcgcttcgaccaatttgcgttgaatgtgtctaaacagaaaggaaaatgagtcaattttgtacgacaacagtatgtgtgccctcctttgatttgttcgtggtttttgatgatgatcccgaattgaattttcaatttaaaccaactcccaattctgccaagatttcagtttccataaaatccagtcgccactgaccgaatgcaatggttcagcacgcgattggacacttcgtcgccaggcaatttgatgtataacactttgccacagtcgtcgcattgcaaaaactcctcccccacatttttccatccatgacgtgcgcacacaacaggcgaaatttccttcggtttcgcaattcgactggccaccttttgatttggtcaatgtttacaacattctcaaacagtaattccaaatatttcacatcaaaggttgccaatcttcgtctgtaattggcccaactcttctcgtcattcaatgccaattcagcagacgagctaaattttagaaatagataaatcactaaacagggctaattgtagggcaaacatttaaaagtacctgccaacattcacgcctccatcatttccgttgactgcgtcgtttctagccaaaaatcggaaatgagcgatggagcgtttttaccaaagtgttgcattcaatatcggaatcgggctttccgttttgtcatttttttggacaaaa

SEQ ID NO: 22276 - DNA, 1954 bp, Heterodera glycines
ctctctggggctaacgtaagacaccttcaatttgtaattgaatggtttggattcgattttctgatttgtcttcgttttgcttgtcctccattcattgcctttctcttcagcactcactccgacgacgctttgccttttcttcgcattagcacttttgacaatgttccgcccaccattctcttctacacaaagggtgcaaaaggtgttgtcctccactttaaagctttccccaacgaaatgcgttcagttaaaaagcctccgccgcactttgcctctcgactcacttggtgcaacaattcccttttggccctcgtcgtccgtcacaggttgaacaactgaccaaacaattagtttcataattgctcttttgttagtttggctgctagccatttcaaattggtggacgaatcgaagaaatggattggctattgggggaagcatttgaagtcaccgcaatatcggacactgaaaccgttccaaaaggtcggtctattatgagaggtgttcttttagttggtttgtttctcacgtcacgcttttccaggtcaatcattttcccggcgcctttcatttgggccgtaaagatcgcctttggctgcacatttacgagtttatgcagcgtttcgaaggggacctcttctgcattatgcccatcacttatgtcctccctcgcgacgctcgaaagctccgactttatttggccggctatacggatcgccatgtcattctgaaacccgtaattattaaatttaaattatgacaaatctttaccattttaaaactcttagcccgcttctgctcgtggcactggcattagcattgtttcgcgttttgatttggttccaccaaaggctgcgcttgtcgcccaacagtaaaatttacgagaaattcatcttttaatttttgtttttaagttatatcgaacggcctttcatcataaatggtgcaaaatttgacttacgaatttacgtttatgtaagtatctttttccaatattttgtcactttctgtgattttaaggtcacttcgtatgatccacttcgtgtgtacgtctacgatgagggattggtcaggtgaacaaattctcagcgaatttctctatttttttttgttttttcaatttaatttcagttttttaatacttttcggagggggttgggggctacgagtgggaagtaatttgcttccttttttcgtaagtattaaaaattgaaaaataaaaaacttgagttttgcaaaattccatttgtccatgtcactcctccatttcccctctccaaaggttcgcaagtgttgcgtacagctcagcgttgtcctcctactccaaccaattcattcacctcaccaattactccatcaacaaacatgcgtccgatgagcccgtccccaaatggcgtctcagcgaattttggtcttttttggaggccaatggccacaattccacgcgacttcgcaacgacattaatttggtggcactcaaagcaattgtcagctgcgagacgcacattcgctcgcacggcgaccattacagtgactttccatttgtcaggtgccaaaagtttatttattttttgtatggaccttaagaattaaagaatcgtgaaaagtggttttgtggcttttttgggtcactaatctcggattttacaaagacttgtcgaattaattctgaaccccggaaccgaattgagacaaaaagtcgtaaatcatttaaaaattcgcatttatgaccaaaaccgggttacacatgagaaccgagccaaaaaatataaagcaagcgaatactgtttttatacattaaaaaatcatataatttaaaattgcaattattctcaaataccattttaagccatgagttgtacggcatggacattctggtggatgccaacctccgtccctggttaattgagatggtctgtcccatcattttacattcattccttttcacaagtga

SEQ ID NO: 22277 - DNA, 1824 bp, Heterodera glycines
  unsure (1)..(1824): unsure at all n locations
cttttcatgttcgaatgtgtactgaaagatatgtcattttagacctttcctttttagaaacttcgtattttctcaatggtgggatttcaatttgaggcatccaaaaagttggcggagggtaaaaggcaggcagaacttccataggcaaatcggaaacaaaatctcaaattaaaattaaatataacaggtaaaagaattgaaaaacccatcaacctgttggcaatcgattcattaattgacaataagttttaaaaaatctgaagacgggaaaataaatttacaaaatttttatcaaattaacaaaaaaaaattctctatttttcttttcgcatttttttgctgaagtgaatttatccttttctctgacaaactttttttgttccatttcgacttttcttcgccatcagttagcacatcaggaaccggcaatcgcctagattattggacccgaaaattttttctctaaggtgactatcgggtttgcacgcacttcattatcgcctcagtaatttttttgaaaaattttggagtttataattgaaaagatcatttattgacgcctgaactgaataaagctggcggtaatagttaagatggtgggccccctttttcaaaaaaaaaaaaaattttcaagaatttttttcagatataaatttaattaggggttctcaggatcgggtagaccgattaggccttgcctaagccattgtacgagttgcattttgtaaattctcgtaaagctgagttgtccatcagctgagaagtcctaggctgagttgtcccggctgatcctgacgcagcttccacactctcagcttggcctttacattgcgctgatcagccaacaatttgactattccgttgacgaacacttccaaacgcgcaattggacattggacaaaatggaaattcgacccaaaaaatttccccgaatttccgcctgataacagtgccaatgcgtcggatggccaaatggctgtttacgcctcgtcccgcaattttaaagggtcttttcggttttgtgaaccccccccccctgaaattttcaaataaaaagtcatttctagggtaatttggggcgctgatcacgaatatgacatttatttttcaaaattccgaatctcgaacctgaattcgaacaaaaattcgaaattcataaattacaatgaaaacatatttttgggggttttcgaggtcgctgaaaacggttatgacatccatttgaccaaattcgaaacccggactctaacaaaaaaaaaggaaattaattctcgacaaaattcaaaatatgtaaaaccgacgcatgtaattggtcctcaaaatcgttaaaactatttttaaaccatagtcagaaattggtaaaagaacgtcaaatataaaagattgaatttgcttattgcgctaaaaaaccgccgcacactcgactacggcggccagttttttgaaaagcatggcataactttacttaaaaacaaccaaattttaccttcttggtgccattcgatagctaagtttttttctatttctcaggcacaggtctcttcttttgccgcattcaattgataggtccatcttatagagaaattggtataagcaaatttgtttaactaaatttattcaaaattacaaatttaccatgaaatttgaatgtaaaaatgcttataatgaataaatagaggcacaaaaaataggcaattcacatttgacttatagaggggttgaacaatagaaggcccgggccttcaaataacggatttacggtaattaaataancatttttgtacactatcacttttattcttcaggacttttatatttgtctat

SEQ ID NO: 22278 - DNA, 1778 bp, Heterodera glycines
tttgccacggaaaaagtcgtcccacggcgagtccagccagttccggttgcgcagctcggtcacctgcttggcactctcgtgcgcattctccagaatggcgccgtacttcttcaattcttcgtccacatattcctgggtcaataagaatttttagaaaaaaaaatatggaaaaggcaacactccactcagagaattctgtcccagaatttcgggttagggtttgagcaacctactccgaaaaaaaaaattcagtgtcgataaatttttccaatggaattaaaattccaatcaaaacgcaaacctggtcagcgatgccttccgccaaaatcttcttctgatactggtccaacaacggctttgtctgtcgaatgcgctggtacatcaacggctgcgtgaacatcggctcgtccaattcgttgtgcccgtaacgacggtagcacaccaagtcaatgatcacgtccttcttgaactccttgcgccactgggccgcaacatcgcacacctgttgaattttttgaggttccaaatcgcattcgaaagattatgtttttaaaaaaacaaattgcgaagaaacgcattgtcaatgaaaatttttttttcttgtttgagaaaaattggtgaaaccatgaataacaacaaaaaatttttttaatttaaagaaaatgtttcttacatgcatcaccgcctccgggtcgtccgaattgacatggaagatcggaatgcccatggcccggccgacatccgtgcagtaaggcgaagagcgcgaggcgcgcgggtccgtggtgaagccgatttggttgttgaccacaaagtggatggcgccatagatggagtagtggggcaggtcgttgaggttgaacgtctccatcaccacgccctggccggagaaggaggcatccccgtgcagcaccaatgcctttttggggaggggaaatgggtaacaaaaattcatttttggggaaatttcacacattaaatgacaattgccgctgatcaaactcaccatgtgacggtcacagtgcaaatcgttgctgtaaaatgcctcagcacggactttgccctgaacaaccgggtcaacagctaaacaatttataaattttcgtcgaaaatccaaattttcaatgcctaaccctccaaatgtgacggatttgcaaccaccgcaattttgatcatgcgctgcgattggcgattcagccgttcaatgcacacgcccaaatggtatttgacatcgcccgagccctcgtcctttggttccaaagtgctgaactgggccaaaatggtgctcaatggttgacggcacacattggacagcacattcagacgaccacgatgcggcatgccaaggctggaagggtattgaaattacaaatttaaaaaagttcattcaaaatccctcccgaaagactcacacaatggagtcaacgccgagcgcagacgaccggtcgatgacctgtttgatggccggcaccaacacttcgcaaccctcgagaccgaaacgcttttcgcttggccatttcttggccaaaaagtcctcaaactttgtggagcggatcagccgtttgaaaagcacctaaaatgggggaccaatttttaaattattccattttttcacacacttttttctgctccggtggtaattctgtgactttgggcgcctcaaaatgttttcggatccaatcctgctgctcgtagtttgtcaaatgcatgtactcaacgccagtgtgatggcaatagattttctggaattttttgtttttatttattgaattgctaacaat

SEQ ID NO: 22279 - DNA, 1495 bp, Heterodera glycines
gaaaaaagttattccgataaatagcaaaaaaaaaaaaaaggtcttcaggtactggtctcccccccccccccccgaaaaatgtttctagatacgcccctgggggtgagtctgacttatttggggctttatcaccactattaactgcccgatgcaattctgattattcagtcgacttttttcttcgtatttgtccagttggtcctcaattgttgcatcggttggccccggcagcagcgacttcttcttcgtcctcctcaaccgcttcccttcacaacagttcgcgtccgctcgtggagcatttctgtctggtcggcatgtgcggctcgtacaccgactttcacgtcgatttcggcggttcctccgtgcggtaccatgtgttcagggtgtgtgttttttggttctatatatgtaagaaaagaaggaatgttttaaaaaagttttcttataaaaatttctgtttcaaaaatttttacgggtgaagtgacccgggagggggcccctcaaaaattttcaaaaaaaattcactatcagctttttggaaaatcttaatagtcataaaatttcaaaaaatgtttttcttagaattttctttgaaaaaactttctgagatttttttcttgaaaattttctaagttaataaattaaaaaaaaatttcctcgtgtagtagttctcttcccgcacttcaaaaagccttacaaaaaattttcataaaattcaattttctctaaatggactaattgcgtcttttattttccctaaagggagagaaagtgttttttgttgcccgtccgtccgcccaaaatttggccgaatttctgcgctggcagcgccttgacggacgcgcacgttccgagacattttttggcgactgtttgccccccggggaacaactcttccgagtccatgtccgagaacgggagacactgttcttgccaagcggtcgaccatttaatgcgcaaataaattaaaaaggaatgaattcaaaaacttaagtaaaaagaaaacgtgccctccggtggattttgtgccgaaaattcattttcgaaattaggcacagaaattttggtttaatcagaaaaatgtttttttcctttgtatcggtttcggaattctcatttttctaagtttaaaaattgtagcttttctgggtcgctgatcacgtatccggcatccgttacgacccatttcgaagccctgacccggactcgaacaaaaagtcgaaaattaatttttcaccaatttttttcctctttgcattcgctaagattttcgttaatttgaattgattagggcaataaatgtgaattttgttgaaaacgaaactaacaaaattaaattagggacacccattctgcaggattgtcaattttttattggggcctaaactccataagaaccctattttttatatataaaaattggtattttttcatttattgaaaaaccgaaaattgaatgcgttcaattctcaggttggattcacgcggttttcac

SEQ ID NO: 22280 - DNA, 1721 bp, Heterodera glycines
caagaaaagcttaaataacaaaaaattcgaatctgttatacaattccatgctgtgtagttttctataaagcaattattcatccactcttaattactcacctattctagcccattaaatgccatcaccctttaaagatacttcgcaagaaaagcttaaataacaaaaaattcgaatctgttatacaattccatgctgtgtagttttctataaagcaattattcatccactcttaattactcacctattctagcccattaaatgccatcaccctttaaagatacttcgcaagaaaagcttaaataacaaaaaattcaaatctgttatacaattccatgctgtgtagtattctataaagcaattattcatccactcttaattactcacctattctagcccattaaatgccatcaccctttaaagatacttcgcaagaaaagcttaaataacaaaaaattcgaatctgttatacaattccatgctgtgtagttttctataaagcaattattcatccactcttaattactcacctattctagcccattaaatgccatcaccctttaaagatacttcgcaagaaaagcttaaataacaaaaattcgaatctgttatacaattccatgctgtgtagttttctataaagcaaatattcatccactcttaattactcacctattctagcccattaaatgccatcaccctttaaagatacttcgcaagaaaagcttaaataacaaaaaattcgaatctgttatacaattccatgctgtgtagttttctataaagcaattattcatccactcttaattactcacctattctagcccattaaatgccatcaccctttaaagatacttcgcaagaaaagcttaaataacaaaaaattcgaatatcatactccgggttgagtgcgggtgtgggcgcggtggagtccgacaattgcctgcacttgggtgcaggactttgacaatttggagggagagcacaaaggggccgggggcgatcgagacgggactacggtcggattggggccgcacagaaagaaagcacagaaaattaccaccaaattttatctcaaacttgggtaattaaaccgaaatgggtgagcaatgggggaggacaattgagggggggcaaaaatcggccaaatgggccacaaagtgaaaaatgtgaacaatttggccctattagcccatcacaaaaaattgcattgaaattggtcaaaaatgggggaaattgggagagcaaggagttggagcagtacaacaacggaattgtgtgagggggcgcaatcaatgcatggaaatagcttggggggcgccgtgatggtgattgattggggagcggggcgcttgtgggacaattgtggggggcgagaggaagagagagagagagagagagaggcgaagcaacactttggtgtgctgctgatgattggtgtgttgatgaagcgctggtgttgagcacttatttatattggccaaaaagtggggagagaatgggcgagttgaagctgataaggcgggaggaacggaaaattgctggggagagtgacagccagtgataaggattgggggaggaatgtcactcaatcgaacattggccccaaatttgaaaattgtttaatttggtttttggtttttggggccaattcaattttgcacaatttgtgcacaattgtaaatcaaattatttgattttcgcgagagggcaatcgcgacac

SEQ ID NO: 22281 - DNA, 2002 bp, Heterodera glycines
  unsure (1)..(2002): unsure at all n locations
atagatggataattcaataatttattgccttttttcctgcacagagttcggctagggacatcatgttcgaggtgggggacaagcagcgtcgcattgccacagcgtttgaagcggtgcgcaaccggacaggcggcgccgacgcatcctttgcctccatgccattcccgtcgctgatcgcccacctgcagaaccgacgtgccaagcgccagaccgaggcttgcgagtcgtgctgcattccgggccatcccggccgcgctggcacgccagggccgccgggacagcccggaacgccgggcgcgcccggcagacccggcgcgccaggtaatttaaaaagaaaaattttaaggaattttaggcttacaatgaatttattggtctctgagctccgagttttcaattttaaaatttattttttgataaattcaataaaaaatagataatttaaaaaatagaaaaaaaaatttggacactacggaaaaaataaatagaaattcttagtccaaaaattggccataacaagaattttttttattgtaaattttcatcaattattcaaataattttcgaaaattttttgtgtgtgcctattttttcaaaaattatttttgcgtcttgaatagaataaaaaaaacaaaatctgctatatgaaattaaaattacgtaaaattaaaaaattgtaacaaaaaatgatttttaaaaagatggcgcaaaaaatttccaggacgaccgccaatgatctgtgaggagattgaaattccgccatgcaacccgtgcccgcctggcccacccggcaggcaaggcccaaccggacagcccggcacacctggcagatccggacctcctggccgacctggcaccaacggtgagtggagttaaaaaagtagtttttgttttttaattttacaattttaggcttgcccggacccccgggccctcctggaccgcccggcacgcctggacctactggacccgatggagaggtacagtctattatgtcatactgtattcttctagccaaaaatttcattccatgccaatgcacaaagccgaacaaaaatcgatattcgaaataataaaacccaaaattttcgaaataaaccggaattttcgcaggcttttctggatggcgcccggaaaatgcgtcagtggaaaatgcgttagtagaaaatgcgtcagtgaatgttttattgtcataaaacaagttccttgcgttttcgggggcacagaccatgaatccggtatccatttcggccaaatccgaaccccagacccgaattcgaacaaaaactcgaaagtccaaattttcgaatttagcatttttggttcaaaacggcatacatgatctattattgaaagactgatggcttttagtttgtttccgtgtatttaaaccaattttgaagaaaaactctaatttcgaaattttgactttttaattttttgttcgagttcgggtccggcgttcggaatgcagaacgatgttcttatagaagtttatttctatattacaatacaaatgccatacaactttattttaaagtattttttatcactgacgcattttctactgacgcattttccactgatgcattttccactgaccgattttccggtcacgcattaggttatgtatttcaaaaaattatgcaattaaagatttttatacaaaatgaagtaatttggacaccaaattcctcttttaaaatataaacccaagaattaaacattcaatatgcacaatgattgatcaaatgtggcaaaaagtgtacaaaattaggcgatgattgatcaagatgccaaaaaatatacaaaattgggcgattattgttcaatgtgccaaaaaaatgcgcaaaaaatgggaaccccatcaaaaatttttttcgttatgaatgtatgatggctttatgctgctgatgctacaaataataataacattatttattcaattaaaatttttgtttatttatttttaacttatttattttttattcaantagtgtcc

SEQ ID NO: 22282 - DNA, 1585 bp, Heterodera glycines
  unsure (1)..(1585): unsure at all n locations
atgaccaactcgggcagtcagaacattggcaatgtgatcaggtgggaattgaaggggacaaaggcgaagtgatcaaagagaaggacaaagagacagtggaaaacgattgactgataaggaaatgattcaaaaacataaataaaatgatcaaagaaacgtgttaattgatacgatttgtcatggttttgctcttggcacaaatgccgtccactctcagggacaccaacttcttggagccgggtctgttcctctaccgcatttcgggctcccatccgttggacccgcgccagggccaaaagggcgccggcggaagtctaacgggggaagaggaaagcgactacgaatatcagcaggagcagcaggattacgagccgggggaccaaatctgtgagttgatttgacccgttggttcccaatgttcgcgagtgattcagcggaatgtccgcccgaccctttccgcgactcgtgcccacccaactgcaacgtggtgttggacgacaatcattgctccctttgcatttgttcaagtacgtcttcgagacgtcgcgcacccattgccattttcaggtgttatttcggagaatttggccgggtcggcctacgaaaagcactcaaatggtttgcacttaggcaatgttttgccaatgcttcaaaagttttttcagacatttctcccgaccgttcgcttcgtccgttgcccatggccactctctccgcctctcagcgcacttccgacttgagctgtacgcctcggcagggtcggctccaatgccatcccaggtgaccatcactttcggcacttttccaatcctcgcaaattcaattctcttttgttcgcagtgccaattgcatccagcagaacaacggctactgttgccaatgtgacaatggcttcatcggcaacggcgtcgagtgtttggcgaaggacggaccgttgcgaatcaatggaatgtttgaagcggcactgaacggaaagcaaatgcaacggacggaccttttcggtcggagatacccactgattaaactcacatgggttgtgctgatcagtgcacttacttcggtcatttcagcgtacgttcagcccgcggagggccaacaacacacggcattggccaaagtgccgcccgaaatgggctggtcactgctccttttggacgcactgtccacgccgttcggttggcttttcgccaaagtgccagcagatgcgcagcagcagaacggattccaacttagtggcggcaatttcactcggatcgttaacattcatttgggtcggtgtttctaatcactcaaatttacgccgtttcttttctgatcagtgccaataatcaatcagataattgaacaggtgaacgttatgcgctggtcatccgacaagaatttgctgatcgccagttcaatgagcacttttccgtcaatgttttcgtcagcggaactttgccccgagtgcgcggccccgtccaagtgacagtgcccgaattgaagagacttatcgcagagagagagccggtgaatgaatgaatgaatcatcgaattacttnttgcgattngggggaaagaaaagggaaaaccatcaaaatgggcg

SEQ ID NO: 22283 - DNA, 1182 bp, Heterodera glycines
tccgaacggcacttaaatgtgcgcgccgcgggggaagaggagacgaaagtccgcgtgacaacggtaaaatcaggcgaaaagacaaagcaaagcgaagaaaacactccaattaaaggaccagcaaattcacttcgtcgaatgtccccacaaagttcgaattgcgaaatttccatgggaaaatccgcgaaaaatttaaggcaaagcaaagcgacgccctttccgttgtgaaattcgaacgattaaacgccaattttaacaaagaagaaagtgtagtgcgattcgcatcgcaaagtcgcattgtgagcaaagggggagaagagacggacggaggagggacggaagacagacaggtgggggaagaggaagaggaaagtgatcgggaattggggagggaaagtgatcggaaaataaggaaggaaagtgatcgggaattggggagggaaagtgatcggaaaataaggaaggaaagtgatcgggaattggggagggaaagtgatcggaaaataaggaaggaaagtgatcgggaattggggagggaaagtgatcgggaattggggagggaaagtgatcggaaaataaggaaggaaagtgatcgggaattggggagggaaagtgatcggaaaataaggaaggaaagtgatcgggaattggggagggaaagtgatcggaaaataaggaaggaaagtgatcgggaattggggagggaaagtgatcgggaattggggagggaaagtgatcggaaaataaggaaggaaagtgatcgggaattggggagggaaagtgatcgggaattggggagggaaagtgatcggaaaataaggaaggaaagtgatcgggaattgggagggaaagtgatcgggaattggggagggaaagtgatcggaaaataaggaaggaaagtgatcgggaattggggagggaaagtgatcggaaatggggagggaaagtgatcggaaaataaggagggaaagtgatcggaaaatggggaaggaaagtgatcggaaaatagggaaggaaagtgatcgggaattggggagggaaagtgatcggaaaataaggaaggaaagtgatcgggaattggggagggaaagtgatcggaaaataaggaaggaaagtgatcgggaattggggagggaaagtgatcgggaattggggagggaaagtgatcggaaaataaggaag

SEQ ID NO: 22284 - DNA, 1376 bp, Heterodera glycines
ttttttaaaaaatttcattaggaatttccatataaaaaaaattctgaatttttttttcttgaaaatttccaaatttttttaaaaaattctttggcgaaattatgtcccggcgaaatttcggccggcgaaattttggggtgcacccatttctgattatgcttttatttggtatttaaaataattttcctcagaattaatcgaccgacttttttgacaaatcagttggccattttcgtaacaaaattcattaaaaattctttaaaattttcctccggcggcgcctatcggcaccgccgaccccccaaaaagctatcttttcttaaaaaattagccaaaatctcaaattttggtatttttagacaaaatctactaacaaatagcattaaaattacaaaaaaatttcccggcggctcttatcagcaccgccggccctaaagttatggcttgagctcgcaattacggcaccaaaaagcgcaaaatagcactgaaaaaaggcacaaaaatcccgaaaaaggcatgaaaaaaggcatttaaatttttttattaatgatttttagggagcaaaacacgtaaaaactaaccaaaaaactaaattttgctgatttattgataattcaattttataatgtctttcaataaggaaatttttaaacctaaaattttttatcaagaaaaaaaatgaattttggcgttcaattcataaaggtatattctctgaatttttttacagtagctctctcaattggctttaattatgcgctcgactgacgcatagacgcaatcaatcaattaattaattataatttcatccatcggcaggtgacccacaaaattgaggaaagcgcttgccgtggttcggcccccggcgacaccatccaccaaaaaaaagatgagaattaaagacgatgatgatcaagaattaaaataatcaaaaaaaattaactttttcgatgaggaatattttctgattggagggtattcaaattcattaattttacttggtaaatgtgaataaccatcggctgtttggaatgatcaaattaaatatcatatttactataatacagccccctctgaaataaagccctccttttgaggtgagttgaaaaataaagccccggggggatttcaagggaaggtgttctgttccttgtcaccgatccaactctccgccacgtcgcatttatgatgaactgaagaaaatttgtccagctttgatccaacgcttgatactccgcacaatctccgcacggctttttcgctggactcggccaactccatgcctttggagcgcacaacttccacttggggctgatgggtatccaactcattgttttcgaaaaaaaatatttaaagaaaatccttaatatgatgcc

SEQ ID NO: 22285 - DNA, 1477 bp, Heterodera glycines
  unsure (1)..(1477): unsure at all n locations
tttctgccgatgggtgaagcaatgctcggggctgaagctcccccaatgcgtgtaatgacggacggcgctgtttgctggtattacaacaaatttggagcaaatgtctacgttgactgcacataatcaacaacaacaacgacgacagcaacaactccatcgcctacaaccaaagaaaccacttctttggatgtggaaattgtggtcggcggctgtctggcggccatcgctatcattgcgatagcggccgataacttgaggcgttttaaaaaaaagtaagctgcacaaaattaatgctgggcaaattaagcgattatttttagagggaatttatttattttttctaaatttctcggagcaggtcctttcctctccgcgtcgccacccccccccccccccccgaaatgttttcaaacctagaaactttttattaaaaaaaattcctaagaaatttcttaataagaaaacttcaagaaaaaattttttgaaaaagacacgtaaacagaaaattcttaacaaccttttttaatgttttacatagaaaaagcattaaaaatcgctactcttaaaaaaaaaattttttccaatatctaagaaacctaattgtaagaaatttagaaaaatgaaatttgatgcattcttttcgggtgcctaacttccttgcgtggccattaagagaaaattgaattttttttagtggttttgcttttctgccgatgggtgaagcaatgctcgggggctgaagctcccccaatgcgtgtaatgacggacggcgctgtttgctggtattacaacaaatttggagcaaatgtctacgttgactgcacataatcaacaacaacaacgacgacagcaacaactccatcgcctacaaccaaagaaaccacttctttggatgtggaaattgtggtcggcggctgtctggcggccatcgctatcattgcgatagcggccgataacttgaggcgttttaaaaaaaagtaagctgcacaaaattaatgctgggcaaattaagcgattatttttagcgggaatttatttttttttttaatttctcggagcaggtcctttcctctccgcgtcgccacccccccccccccgaaatgttttcaaacctagaaactttttattaaaaaaaattcctaagaaatttcttaataagaaaacttcaagaaaaaaatttttgaaaaagacacgtaaacagaaaattcttaacaaccttttttaatgttttacatagaaaaagcattaaaaatcgctactcttaaaaaaaaaattttttccaatatctaagaaacctaattgtaagaaatttagaaaaatgaaatttgatgcattcttttcgggtgcctaacttccttgcgtggccattaagagaaaattgaattttttttagtggttttgcttttctgccgatgggtgaagcaatgctcgggggctgaagctcccccaantgcgtgtaatgacggacggcgctgtt

SEQ ID NO: 22286 - DNA, 1572 bp, Heterodera glycines
taggggcgaaaaagtccaaaataggacccaaataggggcaaaaaattcgcgaaataggggcgaaaaagttccaaattttgggatataattttttaaattgcagttttttatatgaaaataatttcaaattaaggcaaacaattttattcactgattgcagttacatataagatatattttcgaaagttttttcatttcttatgggtctatttttgaaaaatttagtgtcgattcttaggggtatatttttctgaaaattttttggtcgattctttggggtatattttttcaaaattttttggatcgattcttaggggtgtatttttcgtttttattgcatttttgtatttttatccttggatatcatttgagcttctctcgccataactaagccgcaaaaaaaatatgtaaaaacataaaaatccggtctctattgatgatatatggaactgcgtttttcatgcttattatcaacttcttacttttgattttttttaattgtagtaaagttttccaaaatactgttttttgtcggccaattgctgatttttaaattttcatctaatcagcagaaaatatttgtaaagatggttgaaatacatcctttctgtaacattggtgtactgcgaaagaccgatgataaatcattaatgaatggacagttggcgttaaaggttttaaaatggaaaaatgtagatgtgtattaggctatgcattcccataaaagaactaattttggcaaggcagtctttcggttcattggtcccggttttttataaataaaatttctggaaacatatttctaaggctaatttgggccgctgggtacgaatctgaccaccttttcgaccaattcgaatcccgaacccgaattcgaacatttttttaaaaaactcaaaaatttcaatttcatcaaatatgtacgcattagatgtccggacaacgctccaattgtctaattgttgcccagttttttggacgaatatatgtggcaatagttcaacggaaaaaagttgtcaatgcttattgttaggcgtacttatgtaaatatttgatgaaattgaaatttttaaattaaaaaaatgttcgaatcgggttcgggatccgaaattggtaaaaaagccgaaaattagtacaatagcaaatcgactatgctctacacgataaaagcggttttaaaaagtaattactcaatccatgacaatttaactaaaacatgcatgcacagagcgcgcgcaattaccttagtcctgtttgtccgatgcatgcagctgattgcactcacagtcctctctgcaggacacatctttacagctcaagcactcgtgcctgcagcaacgcgagattgattttaacggaaaaatgcatgcacgtccgagaaagcgcgcgcccgtctgcacgcaatgcaaaattttgttcgctattttcctgttacaatcaaaatgttttcacttaatttcttcattttttgaatatttaaatattatgtaagaaaataagcatggcaaaaaataggtcctaaaaagaagaaaaaaaaaattttttttttgttttttctaaaaatatgactct

SEQ ID NO: 22287 - DNA, 1306 bp, Heterodera glycines
ggttttttgtccaaaaatgaccaaaatttgcgattttgggctaattttttaagaaaaaagtgactttatgccaataaaatttcaaaaaattctcaatcatgagaaaaattacattttattcacgaaagattcctaataccatattaataatcttatataataaagttgagtgtttgtgctatgtatgtatgtaacattgtttgaatgtggcgttttgtatttgctgtgaggagagattgaaaagaaaaagagatgaaaagaaatagttttgaaaaagaagaagttaaaagaaatagtataggaaaagaaaaaagcaaaagaaatagttaaagcaaaaagatttctcttggaatgccggagatttgagtctcagagattgaaatgctggtgggttgagttccagagattggaatgtcattgaaagttggtgggttgagtcccaatgtttagaatgccggagatttgagtccattgtttagaatgccggagatttgagtcccagagattggagaaaaagcccagtctattttatcattcttaattctataacacaatcgtactgcctagcgggggatgcgccgaaggcgctgaccccgctataataaaaaataataattctcaactatgagcaaaaaattgacataatgccataatttaatatccaaatatgttataaattcaaaaatttaccaaatttcctttgattattttttccacttttccaaatgctcattttcaaggacgtccttgcatccaaggacattttttattttcaagaaagagggcccaatttcaaggacgtccttgccattcaaggacgaatcccatccctgcaataaaagctttccttccatttttaggtacatcgatcactctgtcatcgcttttcttcgttcaaatcaccaaatttttgagaaaagaggcatcgatttacatttgtggattccagcatcatacaacttggatgagcagccaatttgggatgtttttggtcgtgaaatttggcccattttttcgacaaacattcgctatttgggctttaccggtgctgatcatttggacaatttgcttcgtcgcacttcgccaacaattctcactgatctcaaccaattgacttcaatctattcctgtgctttgttgcccgctgcgtttggtggtgattttgatgggccaaatgcaacaatttctgctggccaagcattgtccaaatggttgcacattccgagaaaagatggccaacccaagcgattgcgttgcgataattacaacgaacaagcgaacactgattggatcacaatttcaagga

SEQ ID NO: 22288 - DNA, 903 bp, Heterodera glycines
agcctaaaaagagtgccagtttgaggattgtcggtcattttgtgaaatgccaaagttacgggtgtccaatcgtcactgagaattgacaggcaaatgtgcccgttggagtacacgtggggatgcaccggaatgttttcacccataaacataacctaaagggcaaaaaaggacttattgtgagtgatttgaaaatttataaataattggttcttcaaatcgcacatacttctggcgatgagaatgggtattggtcgtcaaatctgaattgcaactgaaaaatttcactgtcgtacaaagtattcctgaaatgaatgtaaaaatttgcaattaattgtcctaaattaatgaacaatgccaaccttgccccctcgaggatgagactccaacacattaaatttgcggtcgcctgctcctcttgaatcacatgaacacctaaaaaactaaactggagaaacaatcggaaataaattgggaatggaaaattgctgcacattaacgcaaactcagtgccaaacctgaggggggatcttttagcatttgggtgagttcctaaacaataaaagtgaaagggttttttttttgagtaataaccttcgccaaccgccgtttggttgaatccatcgcaattaggtataacaaatatagtattaattaattaataatcagatggaatgaaagcgactgaaaaatgaaaaaccttgtataaaaacgaattctcgagccaaaattttggtagaaaaaccgggattaataattgtgaaatggataggatgggtgagagccacaaataataaaagggttttttacatttttcaatattttcaactaacaaaacggaaggggaggcaaacgaacgaatgaatgagagagaaatcgatgcagggggggggggaggaatgaaat

SEQ ID NO: 22289 - DNA, 712 bp, Heterodera glycines
  unsure (1)..(712): unsure at all n locations
cccccccccactcatccacccactctttcctcccccctccctcctctcccatccatccagtccctcccattggaattaatatattgctccgtaattgcaattgcgcgccgctccttccccaaatccgagcaattccagccagtttccttcctgctccccaccttatcccttttttcgtcccatttcttcatcattcccttcgtcagcttctcctccgcccctgtcttcttcgtcccatactttttttagaaactcgtcgtccaaatagccacaaatggctcaccgtcgccgtctcttctgctgcttcgtcccgctccaaattatgataaaagagaggccgcgttgtgctgccggtggccatttagtacctcttcgacccccgccgaatatttgcgcttattcgaaatggcaatgggcggacattcgccgcatttcgccaatccgtccaccaaatcccaacaatttcctttcaaataattaactttccggcattaaatattggaaatcgaagaaggcattcattcattcattcatcgcagtgaattgtctccaaattcgccgcccatttgaagaattaccgagtcgccgacaaaagtgtcaatttgtggggcgcatcgacagttacaaaatgcatcatcagctgtcagttcctttcaacttttccgtccaagtntctccgaacttccccccccccccccaaatgacaaatatg

SEQ ID NO: 22290 - DNA, 2204 bp, Heterodera glycines
ggttttttgagtttctcaggtcataacttttttggaacttgatgatttttttttgaaattttgcatgataatagaaaacacttatggctaccgaatgatatcaaggttttaaaattttcttcattttgggcgaagttataaataattttttgtcaaaaattttccatttgatggttttatgactatcgttccagcaccattgatacttatggccagcaggcccctaaccagaaaaaaaattggaggcctcagttttttctttttaattcacacaaataaacaatgttaaattaccgtatcatccaattaccgtactatctcattttccaaaaatactactgtatagcagtgacgcatttttccattggagctttttccacattttccatcgatgcatttccgggcacgcacccactcacgccttctccttcttcgctggttatgggcctgctgcccatgccccaccccaattaaacgacgactaattaggcacccaattaataataatttagcccctcgcgcagaaagaaaaatgggaaaaaattggacaaaataataaaatccgttgcggaagaggagaagccgaagaagcaaaatgacaaaaataatgggaggaaaaggaaggaaaagaagaagaaatcggagatgggaaaaatgggaaaatttatgtgagtgaatttggggggaggcaattcagagccaaatttgagcaacaatcaaacttttaagcaaatttaattaacagattataatttgaaaatttacggtggagtatttttcgggtaaaccggagaaatctgaaatcggaaaaacccaatgaagcccagggatcccagttctccacctggtctggagaatttcggccgaaaatcctgtctagtgcctttttgacgaaaattcatgaaaatccgagagttttaattaattcaaaattttaaagtgtcatttttgtacaaaatctgctaataaataataaattaaaacaaaaattcttaagaaattttcctccgcgattgactgactctccattgtcaaaaattggaaaacatttttaaaataatttttcgtataaatagaaaaaattgaaaatttggtcctcgtctgctgggcatgaaaaaatgttggccgcgtattcagcgtgtacaaaatttgctagtaaataataaattgcaccaaattcataagaaaatttcttaggcgacggtccctgaaattattttgagaaatagaaaaaatttacaaattttgtcctttgtctgctggacacattaaaatgtttgttggccacgtattaagcgtttttcgaattccattctcattcattttcatatgcattttgacccctgtttttgagcacaggttcactgtgttcatggtgatcagtatgttcgttccacaagttccgctcaatttggtgatcagtaagtgcaaaaatcaatcatttaaaaatttatctaatccaattgcatacgccaccaaaaacaacatattttcaattataaaatctattatttttttaaatgattatagataagttttcaaaaaattattttctgttttataaaataattattttatttttttgccttatttttttgctgatattttaatttttattagtaactttgagatgattaatgcaaaataattcgttaatttaattttcaatattttaattaattattcccccttttaattgcatttgttttgaagagcacaatgaccaatttttgccaattgcgccagaaaatttggcgtgccgcgaggcgaccaatggcagcggtttcaattgcgagctgagcgtcaaccaaatggtggtggacgacgactgtagggacgtgtccatttgggcacggatggacaacgacacgagcacactccaactgttgggcgaacaggtgaagaagaagaagaagttgaagcagttcagggaaaattggataagggtaacactggagaattgaatgatcaaaaattcttggaaaattggcacggattttcattaaaatgggactcaatgggttttttgggcagttgggaagctggtttttcgaaaaatttaaataccaaggatttttgggaaaatgggcactggaattgatgaaaaattacacagggtttttgaaaggatttttggaaatttgtgagatcggcatcagggataagggaaaatcacaaaaaaaaattttcgtatacgaaaacga

SEQ ID NO: 22291 - DNA, 1214 bp, Heterodera glycines
aatctctgttgtacctcttctaatcacttttatacctcttttatcacttttgtatcactttttcactgttgtacctcttctaatcactgttgtacctcttcaaatcactgttgtacctcttataatctctgttgtacctctcctaatctctgttgtacctcttctaatcactgttttacctcttaaaacgggcgcgaatccgccctttaaggccgcgaagcggcctaaaaatcgctgataattttttaaaattccgataaattatccctaacatcttctatcttttcattacttttaataaatttaaatgtttggttttattaataataaatttttttagtttaattaaattattttttgatgaataatgatgttcatttaaattatttattatatttaattaaagaatttcagctattattttaaaatttaattttaaaatttttttcatttcaatttaaataactattcaattattatacatttcataatttgtttttcattaataaaaagtgtattatattttaaaaaatgaaaaatataacacatcgattttttatctattttgaataaaaacaattccttaattaccgtaaatgctctatttgaatgcccactttctaatcactcttgtacctcttttagtcactttttcacctcttctaatcatttttgtacctcttctaatcattggtgtacctcttctaatcacttttgtacctcttctaacaattttgcacctcttctaatcactgttgaacctcttctaatccttttgtgccacttctaatcactgttgaacctgttctaatcactgttgtaccttttttaattcacttttgtacctcttttaatcacttttgacgtcttttaatcacctttgtacgtcttttaatcactgttgtacttcttttaatcactttttacctcttttaatcactgttgtacctcttctaacaattttgcacctcttctaatgacttttgtacctcttctaatcactgttgtacctcttctgatcactgttgtacctcttttaatctcactgttgtacctcttctaatcactgttgtacctcttctgatcactgttgtacctcttctaatcactgttgtacctcttctaatcacagttgtacctattctaatcacttgtacctcttctaatcactgttgtacatcttctaatcacttgtacctcttctaatcactggt

SEQ ID NO: 22292 - DNA, 2014 bp, Heterodera glycines
cagaaaatgctctgaaacgcaccaaattttatttatatgctagtttaggcactctgatgctttttctatcaaaaagggagatgaataaatttttaaaaatttttaattcctttttaaacaggccaaaaagtttaggcttatcttttttttcagaaacttatcagaagcgccccaaactttgcagggatactgaaaggaaaagaattaacctgttttatcacattagcttgtcatcagtttttataaaaaattttcaaaattctgagtctcctattattttatttttttttcaaaattttgaagggcggagggagggcgaaggcccaccacgaggccgcgaagcggccgagtgagtacctcggtgcatgaaaattattaaggaagagagttcattatttgtttattttttgcataattaattcataaatattttttccagaaaatgctctgaaacgcaccaaattttatttacatgttagtttaggcactctgatgctttttctatcaaaaagggagatgaataaaatttttaaaaatttttaattcctttttaaacaggccaaaaagtttaggcttaacttttttttcagaaactgatcagaagcgcaccaaactttgcagggatactgaaaggaagagaaataacctattttaaatattatctagtcagttcattaaatatttttatccaaaaatttttttttgggttttcggggcagtccccctggaccgatgcgcccagattatggggagacggatccttccgggatagcttcccgatagcctgtactttaattctgcgttggatttttgctccccataatggttggagtaccccaaacggacaccttgaaaaaatcgattttttggttttcgggccagtcccccggaccggatgcgcccagatttatggggagacggaatccttccggaatagcttccttatagcttgtactttaattctgctttggatttttgctccccataattgtttgagtaccccaaacggccacttgaaaaaatcgattttttgttttccggggcagtccccccgaaccgatgcgcccagatttatggggagaccgaaccttcgggaatagcttccctatagcctgtactttaattctgcgttggatttttgctccccataattgtttgagtaccccaaacggacacttgaaaaaatcgattttttttgttttcggggcagtccccccgaaccgatgcgcccagatttatggggagaccgaatccttcgggagtagcttccctatagcctgtactttaattctgcgttggatttttgctccccataattgtttgagtaccccaaacggacacttgaaaaaatcgattttttttgttttcggggcagtccccccgaaccgatgcgcccagatttatggggagaccgaatccttcgggagtagcttccctatagcctgtactttaattctgcgttggatttttgctccccataattgtttgagtaccccaaacggacacttgaaaaaatcgatttttttgttttcggggcagtccccccgaaccgatgcgcccagatttatggggagaccgaatccttcgggaatagcttccctatagcctgtactttaattctgcgttggatttttgctccccataaatgtttgagtaccccaaacggacacttgaaaaaatcgatttttttgtttcataaatatttttttcagaaagtcatgcgcacccgtccgatctggcaagttaagcaacgattgctgactagccaaaaggttcggtgccgtgatgaaacgaaccagcactgcttaccccgcggcacccggcacggtcccccgaaggaatggatttaattaaattctctccttcggggatttttttccattaggtcgtccgttagcgttcgattgctctagtcaatttttcaaaatttttgttgaaatatttgtcgtgctctgaagggcgtgggagggggggagcgaaggcccaccacgaggccgcgaagaggccgagtgag

SEQ ID NO: 22293 - DNA, 2414 bp, Heterodera glycines
  unsure (1)..(2414): unsure at all n locations
ctgatcagaatggagttgaaagtgcaantattgatcaatgtcggtgaaatttggttgctttaaaaaacaaaactttcattttaatttgaataaaatgaaaaagttacgctatgagaagtcgaaggcgcattgcgcagctgataatgataatgatcatcatcactttccccttcctcatcagcagaagcattgaagacaatttgatcaaaaaaaaaagatgaaccgttattcgttaaagagtcaaaaagtcaaaagtcataccgaaaaagctgagacattccctttcctcggcactcatttcgaattggccatgccgtgtctcaactgattctgcggcctgtccatgaccatgcccaacttgctgctgctgctggtgttgctctctctgttcctcgtgctcgttttgcgtgtcttccttttccctctctttttcctcttcctctttctcctcctctttttctttttccctgtcttccttttccctctctttttcctcttcctctttctcctcctctttttctttttccctgtcttccttttccctctctttttcctcttcctctttctcctcctctttttctttttcaatgtcttccttttccctctctttttcctcttcctctttctcctcctctttttctttttccctgtcttccttttccctctctttttcctcttcctctttctcctcctctttttctttttccctgtcttccttttccctctctttttcctcttcctctttctcctcctctttttctttttccctgtcttccttttccctctctttttcctcttcctctttctcctcctctttttctttttcaatgtcttccttttccctctctttttcctcttcctctttctcctcctctttttctttttccctgtcttccttttccctctctttttcctcttcctctttctcctcctctttttctttttccctgtcttccttttccctctctttttcctcttcctcctcctctttttgatcctcctctttattctgataattttctcccctcatttttccccttttttgctgagtttctaatatttcttttgcccaattgatttcatagtcatgcagcttctcaccaattatttttgccatcgaaaaaataatgccaactttgattaaattgcgtgccgaattcctttcctcctaaactttgaatattcaattaattttaattgtttctctcttttttcttacctttgtcccttcattttccgcgaatagttttgtgcttcttgctgacatttttgtcagaaaagcaattagcgcttctccaatttggccttttattgaatgcatttctcttaagaaaggccccacaattattcctccgctgtccttggccaattgaatcaatgcctttaaaatgggtttttggattaaattactttaaattgccaattaattgacttaaccgaatcgggcggtattaaattataaaaggaaaatgttggagaaatatgccgaagcagcaaactgatgaatttgcgagcttggaaccgcgtgacaattcgacgattttctcaaatggaaaagcattaaaatcatttcgataaaagaataaaaaagaccgaccgaatggggcaaaaaattgggaaatttcagtgggaggcgaagggatcggtggggaaattgcggacggagcagaagcagggcctaaatgactaatcgttttcacaattttgcatttaagtataaaatattaatttggattcattttattgccaaaataataaaaaatttattaaaaaatataaaataattaacttttttaaaattatttgataaaagagaacaaaaaaagataatttcgatttaccatgttcttccaaatcaaacgcaagtacggaatttgacttttgacggaacaaaaatacgaccaatgcgaatgccaataaactcaaaacattgtcattcatttttgtgaacggctgaaattaatattattttgtgaaagaaaatgataattttaagatggtttttccattttcttttaaaagcatttggccacgtttaacccacgcttttcctgccaaacattacacatacccaagcttatatgtaaaatggttgctattaagatttttaatcagctaatattcgacgttaaaaaggtataattgaatgaaaaaaaatgcaaagagaaaagtcagagctcccaagtgtcctgattttcttctgtatcaaatatcatatttttcgtctactattattagggctggcaattttatgtaaatagatattttttcctggcttctccatgctctaaatagtaggaaaaacactttatttttttgtgtttgagaacaaaagttgggacttttatttacatatttttacatatttcgggtttttctacatattacaaatgtacatatttttatacatattt

SEQ ID NO: 22294 - DNA, 1410 bp, Heterodera glycines
  unsure (1)..(1410): unsure at all n locations
ggaacccaaaaggaaaatgcccaaaaatttcgcattgtcagtgcttccatttttcggatttatttgtgccacaatttttccacggcaatcttcactcaaaatcgtgcaaattccgacactttttcaatgtccataaaaagtgttccattggatttgctttgaaccaaaattaatttgtccttttttggtccatcaacagttgtgatatcaatggtcaatgtaattccttcagtttaatcttttaatttttttgggtcaccattttacttcgataaaaattatatgggaaaatggaggtgggggagggggaagataagcaaatccaattcaaatgccaatgggtagttgagttcatttttcgacccatatcaatagctaaatgttgcttttaaaaaaaacgatgggaaaactggcagaaaaatggagagaaaagggagtattcctcccgaaatttacaacaacaaaaaaattcaaaaaatcaaattttattcacaaaatgtaaaaatttagacaaaaagcaaagaacgaactaatggaaaaaggcaacataaaatgaaggagtaccagtactttttctgtttttgttctatagaagctcatactgttttataattctttgtaagtcatattgataagggcaaaaaggaaagcttcatatctctgccagattgctcctctccatttgtcagcaatttaccatcgatcagagccaaaaagtgccaatttgttttgcttagctcagctggggtgtataacataaaaagcgttttgggaaaattacatataaaattatcattatttttgcctaaataagtgaaatgacaatggccgtccacatgaccaatttgaattggatgctcagtttgcggatggactctctgattttgatgtaatagcccttcaaaagcattcacaaattgacataaatttacaaatttgcaaaaatatgatgtgaaaaaatatgaagcagcttttgctcgctttttgcccccgagggccaaaatcaaattaggatgggcaacaaaaaagtgcaaataatgggggcgaagaagaaacaatatgggacgggctgattcttcgaacaacatcaatttgaattttttgttttaatttagttgcttctgttcgcattgtgaagtgttcggcataattgtggctttttgtctttgcaatgccatcgattcggaagaggcgaccaattgacaaacaagaacaaaaacagaanaagtatctgtgctcattcattttatgttgcctttttccattagttcgntctttgcttnttgtctaaatttttacattttgtgaataanatttgattttttgattttttttgtgttgtaaatttcgggaggatactcccctttctctccatttttctgccagttttcccctcgttttttttaaaag

SEQ ID NO: 22295 - DNA, 1755 bp, Heterodera glycines
tgcaggtcgatggggatcaccaaccctcacctaattttcactttcaaacgtactgaattgtttgttaatcaaattatctgccttatcaaataagcagctttacgaaacgaaatctggaagcttaaacaaagtgaatttatttgcaaatataaaaataatattgaacctgagctttgttcggaatgagataacaagatgagaaaaaaacaaattttactttggacggacttctagctctgtcatacggcgaatcgttaatgaactctcggggatgggattcggatcgcgttcctcctcgtacatataagtagaagcaattgcgagcattccaccatcaggagagaatgagaggcttacaacagagcttgggaaccttgaaaagaggtaatttagtgaagcaaaaaaaagcgctaatacttcctaaattggcataagcgcttccggttgaacgggtcccacatgttaacgatgtaatcgctccctcccgtggcgaaagttcggtggaccgggtggaaggcaacagcgttgaccgggtaaataagctctccgaattcctccttcacgcgatggcatttgaatgcatactgttgtgagaagttgtcatcacaaaacaaaacaaaaagaatttacctttcctttctgtacttccgggtcctggtcgaagtattcaacagccacgcggccttcaattgaagacaaaacaaacgcttcgccagaggggaaacatttgatagaacgggtttggaactaaatgcctgaatcagaaaactgtaattttgcttttcaaactttcagtggcgattctcttgtctgcaatggggctttcatattccgaacatcccaaacaatcactcgccgatcttttgttccaacaacagctctgttgtctacaacgtccagtgcatacactttgtctccacattccatggcaccgactggcatcaaagcgcgaatgtcccacaactgttaaaataaattagagatattggggtgaaggggtgtaaaggaccttcattagattgtcccatccacccgaaactgcaacacgcatagtggcacaaaactccatgcacctcactccatcggtgtgttggcccataactgtctctgaaaagaaataatgcccaagttatttggatatctgtcaataccacgtccactctccaagtcacacactttgaccacctcatccaaaccaccgctgacaacttttattgcatcctcaaatgaagttgttcaaaaaagaaaagaaccaaaattcaagacaaaatgttacgacaaaagtgcagcaaagtacagatttagtatggtaatatgtgcgcatgtccattggtgcccccggattggtgacatcgaaaattttaacaaaagtatcccaagttgagacggcaattaatcgtctagtaatgtcaggagaaaactgaataataatgatgaaaaggataaaaaaagaaaatagatacctgaattttagaaataccataagcagttttgagagaaacaggaaattcatttgccgaagcacgtaatgagcattcatttcaataatttatatctgagaaaattaatagttttacacatggttctaaatcaagcaaaaaaagacaatcaaaaatgtaaaaacatagtctcgggaatttgcagaaatcgagggagggcagatcgaatttgaattgatatgtagtaaaaaatacaatgttaattatagaaacgaaattctgtgaaattccataaatttgtagataaggactaatt

SEQ ID NO: 22296 - DNA, 2201 bp, Heterodera glycines
ggtggtggcagaaccaaacggacgagtgccagcgtgaccaaagcaagtgacataagcaccaaaacaaatattaccaccaacaacaatgacgacaagagcagcagcaacaatctcgacaaacatgacaccagcaacacaagcgttgacgacccgttcaatttcaccactcaatcggacgttcatcctgagccattgaagaacattagtgtaagcattgggactgaaatggccggtccaacaaagtgtttttttcaacaaatgaatcattcaattttgaaaaaatgaatgattgaatggttcattcaactcccatccttttgtttgtgtcgtaagatggtgcaatttcctcccctcccctgccattatgcacagatcgaacgttcatccttcaatgaggtgaagtacaccaagtcattgcccagctcggctgaccgttacgcgaacatggagaaaattgcggccagccgcaacccgcagttggccgcttcgctctccacacagccgtcaaattcagttagtgtgtgtgtgtgccgtatgtgccaccatcttttgaaaaatttgtttcggaaatattggactgcaactcttttttgtacaaaaattgttttaacttatcaatgagctgggcaatgtcttggtgtgcgaggcatttctctagtaggcaaatgcaagttttacccgtctattggagacattacttttgcatcaaaacggaaaatgccatatttttgtgtgttttagaaggactcgttgtcccacctgagctcgatgaccagcgccagtcttcgccttgactttggcgacacgcccaagtcgatcagcagcattagtcaacacgggaccatcaccaaggcatcaaaaaatactaaacgaatcaattatacattttaattgcacagccaaagcttgggttgtctggcacgacgcgcaagcgacgaagtgacgcgtcaaccgcggctggcggcacgacgcctcggtccacggcgccgtcggccaaaaagccacggacagcgaccaggcgaaagcggtcaaaacgcgggaggagggcagccagtgatgaggacgatgatgatgaggaggaaatagaagtagaggaggaggaagaggcggaaaaagaggacgacgttcagcaacagggggagcagggtgaccaaagtttgcgcatggaagtggacggtgaagggtcgacgagcggacgtggccgaaagcgcggcacaacgcccaaggcgccggcagatgcgggcgttccaaagacgccggaacgcggcagtttgaggcgtactgctgggtagggaatggggcatcgacaccattttcataggggttgacaaactggacataatataaatattcgcagccaatttacccgtttttgctagctgtatcgtacattgaggaatttaatttcattttaagacatacaaacccaaatttagtattcatttatttgctagagttatggataacaaatttccaggcttgactcgtcccggaaatcggagcagaaacagaaggaggagttgttgtaccaagtgccggaactgtcacctgccgaacagttgggcgtggactgtcctcgggacgcgcatttgttcatgggcgtcggtgcgcgcgtgcttgccctttggggcaacgattattactcggcgaacatttgcgggtttgaaacttttttttattacctattaatggtattttaatggccattcgaatgataaaagcggtgtcatggaaatgttttttccgccaaccgacctttacaaaatttacttccatatttcagtcgtgaagcattgggccgttactatgtgcacttcgtggaggacaatctgaaccgtatgctgccacccactggcgttattcctatctctgcgttgaagccgggaacaaaggtacatcgactaatttcaaattaaacaattttattttattcgttttagatttcatttattgacattgtgaatgacgaagagattggcaaagtttgtgaggttgttgagcagccaccaacagacgacgctggtggatgggcacggggagagttcaaactgtgcgagttggacgaggaagggaaccgaaccgacgttatcaaaacgtaaaaaacctatccattttggcattttgatgccgcatttttaaaatattacagtctcaaatttatttttatgttttttttggtttagtggaatatagtttaatgt

SEQ ID NO: 22297 - DNA, 1576 bp, Heterodera glycines
ctttctattctctttcaaatcgccccaaattttttttacagcttaactaggccctattaagcttatttccagaaaatctcgcatgaattctcatttttaaattttttatagatttttaaatgtttgcattttttttggcttaccaaaacttcatcgaacctggttctttctattctctttcaaatcgccccaaattttttttacagcttaactaggccctattaagcttatttccagaaaatctcgcatgaattctcatttttaaattttttatagatttttaaatgtttggatttttttggcttaccaaaacttcatcgaacctggttctttctattctctttcaaatcgccccaaattttttttacagcttaactaggccctattaagcttatttccagaaaatctcgcatgaattctcatttttaaattttttatagatttttaaatgtttggattttttttggcttaccaaaacttcatcgaacctggttctttctattctctttcaaatcgccccaaattttttttacagcttaactaggcgatattaagcttatttccagaaaatctcgcatgaattctcatttttaaattttttatagatttttaaatgtttggattttttttggcttaccaaaacttcatcgaacctggttctttctattctcttttaaatcgccccaaattttttttacagcttaactaggccctattaagcttatttccaaaaaatctcgcatgaattctaatttttaaattttttatagatttttaaatgtttggattttttttggcttaccaaaacttcatcgaacctggttctttctattctctttcaaatcgccccaaatttttttttacagcttaactaggccctattaagcttatttccagaaaatctcgcatgaattctcatttaaaaaattttttaattgctttttaaatatgccaaaaaatgtaggcttaacttttttagtgaaaattcgatcactcatattttttgctaattgagcagaagcgtaccaaactttgcagggatactccccggtaaaggactaacttacactgaaatgagcgccgagctagctggctcaaaaaaattttcgaaaatctgagtctttcgtttttatttattttttgcaaaattaattcttaaatattttttcagaaagggttctgaaacgcaccaaattttatttacatgttagtttaggcactctgatgctttttctatcaaaaagggagatgaataaaatttttaaaaatttttaattcctttttaaacaggccaaaaagtttaggcttaactttttttcagaaacttatcagaagcgccccaaactttgcagggatactgaaaggaaaagaattaacctgttttatcacattagcttgtcatcagtttttataaaaaattttcaaaatcgccccaaattttttttacagcttaactaggccctattaagcttcagaaaatctcgcatgaattctcattgataaattttttatagatttttaaatgttttgattttttttgacttaccaaaacttgatccaacctgttactttctcg

SEQ ID NO: 22298 - DNA, 1263 bp, Heterodera glycines
ggcgctttaaaagttgattatagaaaaaaccacaaaaataagacaaacccagtaacactctttaaccaaatgcggacccccacagcaccaacagggtttgggccattttaagagcggcagttttggctttggtggcttacgtccccgcatttcctgttcaattctgatttcttgggcccgtgaagggccacaagacggtccagacaaacgcaagattccctctgaattttcagttttttaaagagcacaccaataccatgtttagtttaccatttcgaaccctcgtgtgagtttgcgaagagcctggtggctcaatgtcagggaggacgtcccaaaagtcgtcgtcgtcgtcgttgttgttgtttgcttccggacccacacttctgacaggaacttctttgtccgaagcaacatcccaaaggtcctcgtattcctctgggctttgaacacggacccccttcttagctttgatacgtttttggggcgagaggtactggttgaagaaatttttcatgtcaccgaaaacaaggattaaagtttaattataatgagacagccaaaaggtatttaaatgtttaaacatataaaaggatattgcctatggttttttgcttgctatttatgtaagccaaaacatgacgtacccacatttatttattaagcaagaaaaataagtttcagaagggcggtgaccacttactctgtaactgtcaaaattatagcgaaacagagcaagtgaataaagaaaacaagcaataaaatctttgttcgaaccctcatttcttcacaacatcctgaatcttgacggacgccagcttcatagtattgtcgagaactgcaattttttcctggaaagaatacatttaatttacatgcaaaatattaaagtgtataattacgttcattgcgtccattttggctttaaagtccacttcaatcgtacccacttgcgtctaaaaaaaactaaaacataagtttaaagaaacaaaaaccttaatcgctgaaacttcagtttgcagctttgcgagagctcgcttcaaattgtgctcaaccgtacccactttcgtttggagagcacaaatgtcctgacgcatgtcctcagtctaaataagtcatgtaattatcataaataatatatacaactttaccgcaattgaagaaagcgtttgcgagctctgaactctcgcgttcagatcgctgacttgcacgcccaaatttccagtcgaaccctcaatagccagttgcaggttgttgagcttttcc

SEQ ID NO: 22299 - DNA, 1192 bp, Heterodera glycines
tgatggccggttcgggcacactttcgccaatggatttcgtggggcaacacacgggcaccactcaggtacagctcgtccttgatgaccacgtcttcgcccaacacgctggtgttcaccatgtgcacgtgactgcctgaacaggtcgagaaaagtgccaaaaagtgaaccagtgaaaaaaatcattgaaaaagatttcaaagaataaattccaaaactcatggcaaaatcacaaaaaaatccgtttaacggatcaaagaaaaccattcggatatccctcctccaccaaaattaatggaatttcacgtaccaattacgcatttgcgccccacaatgctggaatggatgagtgtgctgcgtcgaatgactgtgccggacagaatggtagagtcgcgaatgcacaccccgtcgaggagccgaaccgcggcaccgatgcacacgttgggcccgatgatgcagttggcaccgatcgatgccgacgggtcaatcatcaccttttggagggagaggcatgagggaagataaacggatttggttttataaattattcaaatgccaaagataaagggatatatttttggatttttccccattttttcctgagctcccagcggccaaaattcaagaaagcaagtttttttttggtggctgtaaagctatttttcgagttacccctagatttgaggctttttagttcctattttacatttttaatgcctatttttggcttttttaggacctaaaattaatagttgggattttgaatgaaagcaaatttgattgcaatttctatggcatttgagcttcatttatgcagttacgggttgattaattgtgcagccttcgccgattgtcgttgacgacgaattaacgccattttcaagagcacttttcacaactttttgctgctgttgatgggcaagataaagacgaacaccaaaaaatgtacgaaaaattattgcaaaaaatgattgaaattaagtacccctaagaaaatccttcggctgtccaacgtccatccaaaaaccgaccaatataaaggcgtacaaattactcacagaacacatttttgggaaaatctaaaaatttttaaaatacttatttccaaattcttaaggatgaccgccgctcacctctttctcaattgagcatggctgacgcgggattagctgcagcaccgacgggtttaaatgta

SEQ ID NO: 22300 - DNA, 2071 bp, Heterodera glycines
cttccgatggatttataccgtagaaatgttcagtgatttcgatggcacggcggtatacggtaagcgtaacggcgggttcgggaatctgaggaaggtcagattcaaaacaaagattcacagtgaacaacaaaacattttagcagaggaggtgcggttctattgcactttatgagtccaatcgacttttatgagtccaatcaattgacaatacctggtttttatacaataactttgaacaaaccctatctttttggtatcattagaaagcagtctaaagaagctaaaatatataaaatttcagcgtttaggcaattgccataaaagatttgattaacttagtaattgttgattaggtattttcgtttataactttgtttaaatgttagaattctgttgttttctcgtattattacattcttcagacttgcgctttcgaatgaaaaaatatagggtttgttagaacattgaacaaagttattgtgtaaaaccaggtattgtcaattgattggactcaaagtgcaagagccgtgagcgcgggtcaatgccaactcttagacaggcaagtcgtacaatagaagcttaggccttgacctaaagcttaggcctaagtctgtgcacgagttgcctttttatgaaaaaattaaaaaacggcattcaaatgcaaaagtacggccatgaaaatttgtttaggaaaattctgcgactcacgagttgaatttggaagaattggcacaatgccaattcgtttctgtagcggtcgattaccgatctgaaaccaatcgatgtcagttccattttgcagttctggtaataatccatgaatttaaggacgtccagcattacttccactgtccttaaaaatctctctattgcattgttcgattggccatgcattttaaacgtcttacaattagaggtttaattaatgaaatttgaggataaaaaatactaaacaaataactcagtttttgattactattttcgatcattcaaatcccgttaaaatataattattacaataacaaaatcacatggaatcaatcgaaatgatggaaaaaacaacgaaacaatgtgtcacgaagggaaacattcagtcagccatggtcataattatggttgttttacgcataaatttgccacgcacaatgcaacactcatgacgaagcggaaactgccaactttcgcaggtgttccatgaacacttgcatggaaacgtcgtccgtgaacacgggggcaccgccctcctgaaattgtaatttcttcaaatgggctgaatattattcattcattcacctgagaatacgggttgttgtgtgtcaacgacggggttcactttggaaagcaaaaagcgagcctaaaaggaagattggatgaagatggatgcagctgtatccgcttctgaaaacctgtgagccttcatattccgtcacaatgtatcgaggcactggaaaacggtcttggatgatggccgtggcatcctgcacgggggcgtcgagcagctgcttgaacgaagcatattgggggtcattttggtaattggcttttcgccaagcagcaattgtcttaaaaaaggtattttactcattggaatcacttgcaaaagaagaaaggacctgtccatggtaaattaacacatggaagaaatcgtccattagcaaaatgcggtcaggcaaaatactcgacgagtccaaaaggacgggttcaggaggtccattgaaagaataggagaacagctgaggctgtatcatcgtcgtactttcaaaaacattttcacccatcaaaatatggctgaaaaagatatataaaatacattaataaaaataaaacacaaaccggtagtatacagtttcatcaggagaattgttaaacacttgcagaaattgggaacggcgcaaatgaaacataaattgggggaacagagaaaatttgtcggtaagtttcagtgaagcagggtcttctttgtggtaatctccaaatctttgtaccttaacaataaatttttaagattggaattcacaatgaaagtagagaaatgcgagaggtttgatagtgaaataagtcaccagcaaaa

SEQ ID NO: 22301 - DNA, 1059 bp, Heterodera glycines
  unsure (1)..(1059): unsure at all n locations
aaantcgttaataaaaatttttatttacctattttggaatttttgtacctatttaatacctattttgagattttttttacctatttaagtacctattctgggatttttcttacctaaaaatcgcatccctgaattcatttggcgccaacgtttcggcgattgcgaaaatatgttttacaatctttggttgcatatttctgagttttacccatgcgaatagtctgtcttattttctttatgcgtcttttcgtgcatttgtattgctttagttgcatgaatgtgaattttgatgaaaaatgaattttcgactttttgttcgaattcgggtccggggttcggaattggtcgaaatggatgtcagattcgtgctcagcgtacctataaacccctagaaacatgtttttaagacttttgaaaattttgaaaaatttttcaaaaaaggtgtgataccatctaaactattaccgagaattctaacattccaagaaagttacaaacgaaaatcagcaattacttaattaatcaaatcttttttggtaattgcctgaacgctgcgattttatatattttagcttcgttattttgtgctttcgaatgataccaaaaagatagggtttgttcgaacatgaacaaagttattgtataaaaacccaggattgtcaattgattggactcataaagtgcattagagccttttccataaacgttgtcctcactcaccataacaaaaagcgaatacgacttgaggactgtgaagtcgtgaccgcgcacttcaaagtttattttttcgaacagtttgtccacattcagcttgtcgttgctcgctcccgtcgttgtagcagatgccaatgatgagtattgacgccgaaatggaaaagacaaagatggtgtagacaaaaaggcgcacttcctagcaacaaacggatgaaccaccanattcacagcggacaacgcgcgacaatggnaaaagcgggagacaggcagaaaaacactgttcgaaacgaacattcttaaattaaatgccagtgggaaaagtcacaaaaacgcagtaaacgaaat

SEQ ID NO: 22302 - DNA, 1143 bp, Heterodera glycines
aaaggtgaaaatgaaaatttgtaattcttttactcttaagcagccaagtctgagtttttaacccctagattattcagatcaaacttttattttaaattttattaaatattatttagctatcaacatttcgaaagtactttgtcaaatgccgaaacaattattacaagataaatgatgtctttcaaatatttttccacgaaatataatttccttacgttgacccttggagatgttgtttagtcaccggtatttattatgtaaaggatttcttttgtgagacaatttatttttaatggaagtatatatgatattaattcatactcatttttttttgttaacgtgcatttttgaagcagaatatcatctcttatttcatgttaaattaaattttatgcaataaaataacgcgataacaaattaaatttaaataaaaactgtaaaagtgatcttaaaattaattatataagtgtgaatgaaataaacttattcaaaaaaaatatttgacataaagaaaagaaaagacaatagttattttaaaagcatatgaaatattaaacaaaaaaatgagaattcgaaaaataatttttttattataataataaaaaacgaaggcaattcttttgagcctaatcgattatgaaatggctagttttatggccatttcttcgctatccattgccttttcctgagatgagatgtgtgattcggcaggggggggcggtgcgttggagaaatttttgtacgccattgttcgtaaagcgacgagggaagagaggggaggggggggggggggataaaaaaaagaagaatggcattgatttggtttttaataaaataaaaaagcttatgggggggggggggcaaaaataaaaaaggaacggccaccgatttagcttttaaagcaaaaattaacatataaaatgaaggaacgataattaatttttgaaaattgtaattagttatttttaattcttaagcggctttgtgaaaaatgcatgcacctaatatttgcaaatttttgaatttagtttttttaaattttaacagcctctgagctttttataattactaattattttttcatttttgaaaccataaaattgccaatattatttggtataattttgttgtatcttttttttt

SEQ ID NO: 22303 - DNA, 1164 bp, Heterodera glycines
attggtaaataagcacaaagtattaaagattttgtacccagatcaattaatttgataagaaatgctaaaaacaaattttctaaactgttaaaaaggattcttaaaaaaatatttagactatctttatatctcttttcattttaatgtatgtgaaggaaaattaattcatattgaaaatatattaaaaaaaattatacgatgcaattgttttttgcgcaagattatagaagaaacttcagtataataatattcgaattcaaattaataaacatttttattgatttattcttttgacagaaaaaaaagaataaataattaatgaattaacaagcatatttccaataattaggtaatacatttaatttaacaaaagtatgtgcccttaaagagacatagactgtactaattataaaatttaaaaatattaaagttcattaaaaatagttgataaaatatagaaaattctcgtttataaattaataataaataaaaatatcaatataattttctatttcaaatctaagaatttttaattccatgttttatttaactgtcaaattaatatattctcgacggacaaaaattgctaagtacaacaatgttatgctactattataaattaaaaattctttaacaaattgtcaagaattaaataaaagtcgacacaaaataaaataaattaacttttgtgaattataataataaaaaaacgcattaaggtttcaggggtaaaataaaagcaaatactctttaaaaattaataataaatcattgttgtagttaatggataaatattaattttgcgacatacattgaagagttggaacttgtccttattcgcaagaaataaatcaagtacatataatttgagtttaataaatcaaaaatattatttgaaatattcaaaatttattctttaactattattaaaatttataaaaatatcaaaaaattttattaaccaaaacaggatgatgagtagccaaatctacatcaacaagaagaaaattgaataagattaattaaacactcaaatgtaataaagattatttagctttaaaatcaaaaagtattacacaaaaaaataaaaattagtatattaaaatgaattcgctggtttatccaagattataaaataataattcaatcaagagatgacgaata

SEQ ID NO: 22304 - DNA, 852 bp, Heterodera glycines
ggggagaccgaatccttccggaatagcttccctatagcctgtactttaattctgcgttggatttttgctccccataattgtttgagtaccccaaacggacacttgaaaaaatcgatttttttgttttcggggcagtccccccgagccgatgcgcccagatttatggggagaccgaatccttccggaatagcttccctatagcctgtactttaattctgcgttggatttttgctccccataattgtttgagtaccccaaacggacacttgaaaaaatcgatttttttgttttcggggcagtccccccgagccgatgcgcccagatttatggggagaccgaatccttccggaatagcttccctatagcctgtactttaattctgcgttggatttttgctccccataattgtttgagtaccccaaacggacacttgaaaaaatcgatttttttgttttcggggcagtccccccgaaccgatgcgcccagatttatggggagaccgaatccttccggaatagcttccctatagcctgtactttaattctgcgttggatttttgctccccataattgtttgagtaccccaaacggacacttgaaaaaatcgatttttttgttttcggggcagtccccccgaaccgatgcgcccagatttatggggagaccgaatccttcgggaatagcttccctatagcctgtactttaattctgcgttggatttttgctccccataatgtttgagtaccccaacggacacttgaaaaatcgattttttgtttcgggatagtttttcagaagtgctctaaagcgcaccaaatttatggggagaactaattttagcactctgatgctt

SEQ ID NO: 22305 - DNA, 1559 bp, Heterodera glycines
attgaaataacaatatacataaataaatccaattataatgatcagactttcaaaaaattttcaaaaatgaaccctaaaaatccaaaaagaattaattttttcagacacaaaaaatatatgtaatattgaaatcaaaataagaagatacatcccgaaaatctgtttttttgattttcattaattcactatttaaaaaaatttcaaaaattctgacgaaaaatgatttttgaaaattgcggattgcgggaaattgcggggtttttggacccccgtaattgtggattgcggatttccgtaactgagaaaatctccgcaattgcggattgcggatttccgtaattgaaaatccagttgcgcccagccctggatcctagagacctgatttgacttgcgcattttcattcagaaaagtgataagaataaacatggaaataaacaaaccttgcgtcgctgaatgacagcaaactctaaaaatgaacaaaatgtatcaaaagactgtcgaattggcaaggtacaaaaaaaaattttcaaaataaatttctctaaaattccaaaattttctctattgcctatcgaaacgtgtggaattttttccttaaaaacattcaattcttaaaatcaacccaaaattggaacttgactaacttatgcaaaattcaattttctcctcgttatcgtattgaaattccactaccgtaccccatgtgcgccaacattgtgcaccgatagccggacggacatgccgcggtaggcgatgggtagccagccccggcgcaaatgattgtgtgaccctgcttatccgttgccggcaggcgcatccccgcacaaccggcgaggtccactaaagcaaattggagaaatacgatgaaagtagagtgcagcgggaccgggacctgaacacgggcaactgagtacaactgagtaccaaggtcccggttttgaccagttttgaccgggaaattcccggcttttttcccggttttcccagccaaaaagtcccggtttttcaacccaaaaagtcccggtcccggtcttgcccaaatttcccggtcccgctgcactctagtttaaaacttattaaattagatagaaaaacaaaataaaattttggaaggatatgtatttcgaaaaaaatttatattcatagggatgtcatggatctttggcaaaattcttttttttcaaccggtttaatgcctatatattttctaatatgtattcaagctttcatcagacaaatatttaaaagtgagtacaataaatgagtgttatgttcgcaaactctcgtggccaaccaactactggcattgctgctggtcatttgtttgagtttaaggtttgttgttctacagttcttgcttggtattttcccattccgtgccaactgttaattaattaccctttcatcatttggtttaggctggccgcactttgatcgaattgggttcttctgcggataagcgcagggctgtggccaaccccgaccccggcctgatttatatcaaacactcacaggatgaccaacttcttcatttgtgttggctgaatcgaaaaaggaa

SEQ ID NO: 22306 - DNA, 2049 bp, Heterodera glycines
ctaattaaatctattaattacttagttagttatttcattaaatcaattggatccgggattacggtaggtggacacagtcaattagtttattcattaaaataattgggtcccgggattacggtagacgttgggtgcattgatggaatgaaatttgaagattttgcgttacggcaattttttttcaaaaaattcacggcattccctcacgatattgagactacatattataaaatgccataacataatggaaattgcaaatgctacaggcaataaattcctaaatgatcttaggtcatttggtaaaaatatacgacaattggggatataaaatcgatggcttttaaattttttttttaaattttgacggaaataaatttgacaccattaaaaagaattaaatttttcaagattgggatgacggaatttaagaaaatacccagcaaaagggattccacgttattaaatttcaaattttaatccctccaaaaattctttccaaaattcaatgccaaatttcaaaattcctccaattggcccctactgttgagacaaaaactgatctcgccgcttctgtctgctgttgatccaacaaattaaactaagcattataatcaggtatactgatgatgatgaaattgggtagggccgaaatttgagatgaataaatcggcagaggaaaagccccggagggagagaggcggggggcacaaaatgtaacttaactacaacttctcgggaccaaccaacctcgagagtgaagcgatgtcgaattttttagcatgacaaaagttttgttgctatccaattgaattgactcaaaaaattttttgtcctaattaagcaaagcattttaatttgtcatagttttagggatgtattgtaaaagtcattttgttttacattttgccaatttttcatgtcacattttttttgtcaaaatttcgaaaatttgtaccatttttaaaatttgtatttcattctcttaaataaatgtaagcaaataattttcaaagaataacaaaacaattgagcaaatgatttacaaaaaaaaaaaaaaaaaattttgacctcttttttattttttaccattttgtctttttatttcgtaaaattaatttgataaaaaatatttaaattaaaatttaaaacaaagtttaaatgaggtcaaatgggtaaaagtgatagacgacaattgattgatatagacgacaattgatttggattggaaaagctgaaaaatagaaaattcagacctccagcaaagggaaactagagaaaatttggtttttgaggaattttaaaggaatagctggaggtctgcagaactattttcttttgacaagatgggtgagttcattttgaagtgattgaatttggaggagagctctgtcaatttcgttttggattgctttgtcaacctgcgatggttttgaagtgtcttcactggcctccttcggttctggcccacgtccatgactggcttccttcggttctggcccattttcgttgacgggagtcgggtcttttgtctgtgcgggttgcatcggtggtgccactgggactgggtcttgttgacgttttcggacccgcgcttcgtattcctccttgagttgttctttggtgagcgcagggcggacgaacaggcgggcaaggtttttctgagaacggagtcgaacacgctcgcgcttccatcctccgagtgcaatgtgttggtgcgcggatgttggcatgaccactttgagtgggcgtggtgtagttcgctgagagtcgaaccggccaacacgaaagatggcggttggtccagcctcaacttcgagatgatccaagatttttgtggtggcttccctgtcatcctgaacacgctccgatgggcggatggcattgctttctgggaggccgatgaacaccaatgtgcgttggcgttcttgctctgcgagtgcggcagtgattgggtcgaggtccagcacaggtgccattgaacgtttggcgggaggcggagtgatgtttgttgcgttggttcgcttcatgtcgaataattagaataataat

SEQ ID NO: 22307 - DNA, 2094 bp, Heterodera glycines
ccccccccccttctcatctgtcgtgctttcgggcgtcatctgctggcccaactttatggcctaatcccttccagtcgccccctcattattgtctttgcccattcgacctcacattttcggccggggcttttcccccgtcggcttctgctgtccacgcctcgccaaataaactttggacgagaatgtgcggacctcattctgctgcacacatttatgggttaattaacagcaagcaatttcgccaaattcttgaaatttaattacatttttttgcctgtaataccaaacaaaatatttcctttaacgatttcgaaaatgtagactaaaattaaatttttgcctattgaattttatttttctaatttaaaaattacaatttcttccttcggaatttttataaattattttgttattttaatttttggctaatttttttccattgattaggcttcctcatttttaaaatttacaactgatcatcacattttctgtctcgctttttctctctttttgctctttttgccccaccgtttcacctcataaatctgtctgctgtcagctgctgatcacacagtttttattgatcaaaactctttctgactgatcatttgaaattctatggtttgtcaatcactctttttttcgcttgtgatcagaagcagtgatcggtttccgcattacgtcccttccccctattctttgctttttgacgaggaaagcaaatccatcgcaatatgttggttatttgagatcatttgaagtgatctcccgatcagttgggtatgcatttccgatcagaagctttggacggaatctatttttaaatttatgacgtaattttttctgttgcttattttaaaaggcttattcataattatattcattttaattattgtccattttccttctctatgctgtattttaattgacatctgcttataggtattaaaagtgactgataagcacttaatcatcagtgatcaaatgcagtccattaaatcccttttttaattcaaaataactctgtttttttatatagaatagataaaatttctatcaaataattttcaaactcaaaaattttaattttattatttattttgacacaaaaaatgatttttttttttaatttttattgtatttgctgcattttctctatcgtttttgggagacaatgtgaacaatggatgtgttactgtggcttaatttttttcaaaatatatcccattttataaattggacgaactctaatcgacattttgtgatggtttgttacctgtgatccctggtgaccccactctttgtattggattttgggtgcattttggtgttatgtgtacattatgtattaaacattttgccggggggggggtcgggtggaatttgcgcgattggcggatttattcttgggcgaggagagagagcaaataatgctttatgtatacacatattctatttgttgtgttgtcgattgggatggctcacctccgtatgttcggagcgacggaatttgagggcaatcgatcggaaatttcgggaggggggggggggaaaggggtgaaggttaatgaggtggggaatgaatgaattaatgaggaggttgcttacatatgtaagttcccgagaatttgatgatcaatgagttttcataaattttatctggggaccgtgaaatttttgagattattttaacaactgttaagttttcttacagttacaaagaatttgaaaataaggattattttaaaaataaaatgtattttcgcttcctaaaactcggactctctaaataaggacaaatcttaaaaataaggacacttatgaaatggacaccaaattatcaattcagtaaccaaccaaatctattcatagggtaacgaataatgggttttattttaattaaaaaataaaactatttttattttgacattcttctttctgtgtaaaattaaaatttttaattttgatttttttagaatttcccactcaactagtttattcacaacaatcatatgtttattttttataattaaatccaagactctcgaactaaaaagaaattgttcggtgaccattctttgatcaaagaatcca

SEQ ID NO: 22308 - DNA, 1313 bp, Heterodera glycines
taattagggtttgttgaattaatttcatacttaaatggcgacacaacagcaaaaagtcggtcaaaagcagcacaaaacattgccattaagccacaattcaaagcaaaaatcattggctaaaaattgaaaaattaaatcaaaataaaaataatttgaaattcagaatttaccgtcataattaagtcagcagtgagcaaactgacaaaatttgtgcccaaaatgacaacaaccacaaaaaaagtgtgcccaatttggtggaccaattcacaaagacaaatcaatgccatcagaaaattggcggagccgcggagggaactgaaaaatttaaatgggaaaatttaaaattaaatttaaaaatgccacggcatttgcctggatttgacagtgactgccaaaactgtgccgttcaacacaatgccaaccaaaacaaccaaatacagcgcaacggccggcacaatcaaatcggcggacggaccggcgaaacggtaggccaaataaagctagaaataaatgaaaacatttttatttatttaaataaatcttggtttaatttttccaaaaataacttaaaatagttaaatcctttgtttttaccgggtcatttgagctggtattaattgatgccattatcagagaaaaaagaaattttctatttctatgagaaaatgccaacgcaaaatttcatggcaaagtttgaaaattccgaagtaggccacagcaagttagaaaaaaaggcatatgcctcaaaatccgtccctagttatgacattcaataaaagccaacttgtaaaatgttgtacaaaggtactcgtacaattgcttaggttcttaggcataggcaggcctaggctggctttggtctaagcttaagctttattttgtaaaaaaagacttgccttttgtacgagttgctttttgtatgagtttccattgacccccgggcccgtcagtctctaatagaaatgtttttattaaattttcttggtacaacatttataaaatttagtaggggactgaaatgtgccctcctcggctttcatttgataaatttgccacttttagaatatgaaaatttattttttgccatttttttttggcaaatttgcctttaattcagggaaaattgggaccaaaattagccataaattgataaacaaaaaatggatataatcaaaatatgatgataaataaaggaataatataaggccacattaaacacaaaaagaaatttaaggaaaatattatttaattgtgccaaaaaaattaattgtaaagtgctcaattgcccgtttgacaataatatgtgaacggaa

SEQ ID NO: 22309 - DNA, 914 bp, Heterodera glycines
  unsure (1)..(914): unsure at all n locations
ccaaaaaagacttccctttgtttcgttgttgtttttctctatattttaagctacatannttcttaggaaattggggaataacacaattggctaaaatcataaatatttcggcattgattaacaaaattaattgctttgagttttatgatgtaatgaccgattaagataatgagcaactgtatggagaagcaggtgttcaaccggcagttgtccaagcacggccttcaaagtacggacggagatatttggccatgaaattcgaattcacttcagaacgaattgttgatgagcagttaattgaggctaatgtgaccaccaaagaagtggaaaatttgttggcttatgacgagtcgttggacgttcttttggcagccgaccaattcaaaaaagaaatgaaagaggaggcgaatgagttggacgacgaccttctcaaaatgctcctccatgaatttcctcataaattttttgaggtattttcaatctcccaattcttctcttttaaattttgtgcttttagctgccatttttgcatgaatcgatgatggtcgagcaagaggaggatttaagtgccgaggaaaagttggaggcccaattgctgtacgagcgcgagaagcgcggcatcaatttcccaccgcagcagtcgtatggtgcaggacagccggatctgttcggcacgaatttgccactgcaaaattttgggtgctttttatatgacaaacgggaaattttgagtaatgtcactgttttttccagcaatccattcatggcgccacacttccaacgaccatggcattcgacccctttgcccaagcgcattgagttcgcaacagcaaccactcaaccaccgcgaaaacaccagcagcccaccgcttctcccgtgatggtcataaatgaaccgatgacactgccaaaag

SEQ ID NO: 22310 - DNA, 1695 bp, Heterodera glycines
gatgcaacagtccaatggtaaaaaaattttttttttttattatcaaaaacggttgtttttatttatgtttttttttttgattttgttaatttttaattgcatttccaaggtgttccccctcctcctccgtttgtttggcgtccgcctgaccctggtgaaattattcagatagatgactgaatgcgaaagttttgtgatcgactgatcattccaagcaaaaaacaaatggctttataagtatttttgtaaaatcattattcccagaatttttaactctttcttttctgaatttgatgagtccttttgaattttattacatttgcatttggcatctctattctgtaatttttatctaaagcgaaataaattgttctgaatcgtttaatcggtttttggcacgtccaattgtgtgccgtacatttgtccgccatgtgccacgttcgaagtgccgtctctttccttggcgactgttgtgggttcaaccactgcaaaagtgccatcattccttccttttctcgttttttattcccccaattcggtgcctcaaaagttttcggatgctttgaatttaatttagccaatgtctcccttttctgtttcttttacaaaccgttaattctgatgtcggccgcttcgtcctccaacagaatttcccttaggcatgcgcaacagccgcccattggccaacggaatgaccggcaaaaaagcgaatggaattattttttcgggggggactaatggaggataagtggtgccatttgagacaaaaaaggaatggatttattaacgatgaggaagtggattagattaaaaaataagtggggggaatggcactcatcttcaaacaatggcaaaccatcgctatgggaacgaagacacacaaagaaagcactcattgcaccatttttattgaacacatttaaaatgatcttttattgaaccagtgttgactttcacttcgtttatgtgtatttaaacaaaatgttaaattcaaagattcaaattcgagtccgaggttccgaattggtcgaaatggatgctggatttatgatcaacgaccccgaaaacccttggaaacattaaaaatgcaggggttggaccagctccactattaccgaaggttcttagacattgtataatttcctacagattaaagtaaatattctgatttatcaaattgttaaaggcgcaaaattcaaaaaaaaaatacaacagaaagattatgttgatgagaacggagcaaatattacagccaagtcaactttgttgtgtgtttccgcttgcctttgccggtaaaccgatgggtccaaacctaacaaaaagttgaaattcatcccgaacaatttattagctatcaaagcggaaggaatgttctttgctttttaataaaataacagaaaaaaatattcattctttattagatgcaaaaaaacaaagattatgtaacctaaaattatttatgtttagaaatttatttatagaaaccagcctaattttgttgattttaattttaaatcaacaaataaatttaaataaatatgttaccaattatttctgcaatttgacatgcatcgatttcctcgattggctcgcaaaggcgactgactacgggatggatttgatgggccaaataataatgaatatctgaatgagtgaagccaacaactaattggtttatgtgcgtcccgactctag

SEQ ID NO: 22311 - DNA, 1694 bp, Heterodera glycines
  unsure (1)..(1694): unsure at all n locations
ggtgtatgactgacctcagccatgcacctccctctctttaaaaaaaaattaatattacctntaatgatggcaacacaaaattttttgaatttttcactttcagcgcttatcaaagacgccggagttaaaaattctcaatttcataaaattctttagcaaactaataaagctaaagaaatataatacaaaaaaaaataaaattcaattataaattaattttatttacatattttttaacacataaaaaaagttaaagcaactgataatttcattcaaattttctctactaaataaaaaaaaactattaaataaaagtcaaaatcgaaaatgccaacagttagatgcatttattttttaaaaaattgcaaaataaattttagctttaaaaaggaataaaaaaaagattggccgacatttgcggcttgaaatttcggtgttacatttgtcgcgcccagcaaaacgaaatatttttcagcggggtcaataagagttgtgccaagttcagaatttttgtagcagggcaatagtcgacctgtcaaagaaatggaaatttataattcaaaaaataaaagagttagcattttacatatttaattaacataaatgagaaatctataggacagacatttgccgaatgcttgtaacaagagcataggtacattggattacaagaaaaaagagttaaagacaataattaaatttatttaacaattatttaattaataaatagcgcaataaattaaattccggaaaattttcgggtctcattcccattgttttttaaaaaaattttgaaagaaatagaagcactttttaataaatacagaggattttaccgaataaataagccaaatacttttttaactcttcttcatttattatatattttttactagcagctctgagggcatgcgtgccgagtggagtcttctgggcctagcagttcggggggaaccggtaaaccgccacggtgtagaccgtcgcggctgtaagtgcagtagcagctaccagaagatgcgtggaatcgcgagtaatttatttgaaaaatattattgaatttaaaaagacttaataaaaaacaattttttttcttgctgggtgtttggatgggggggctgccgaccccgcccccaaccccccccccccctcacgctggccgtaaatgataaatttataaaaaaaaatttcaaatcaaaaaataataatattataagaaacattttttacaaagaacagcattaaaaaatgttaaatatgatgaattgtgaatatgatttagaataaattaagtaaaaaacacaaatttaatttccattctttaagaataaatcagcaatttatttaatgattttttaatattacaataatatttattaaaatgtactaagaaaggttaaggaaaaaagcaaaaaaatgccaactattcaaataaatcagaattccattataaagggtaaaccattttcattataaatgattaaaagaaaatagtaaagctgatcggaaaatatgaatctatgacatatgattttaaaaggggaaaaatgtgaataaaatgttctagagcccagtaaaatgtttgacgattggcagttgtgccaccttcatcttcatgttgcgcttctttgccacctccctcagctttccccgttccgagggcgccgaccgtgttgttcctggcgcgtctccacatt

SEQ ID NO: 22312 - DNA, 1179 bp, Heterodera glycines
attaaaaaataattgttagatttaaaaataattaattaaactgttattaaaaaatatttacgacaattcaaaattaaatttccattttttttattcattttccaaattatttaaaatttcttgtcataaattatcaaaaatatattatattttattatattcctcttaaataaaaaaaaaattttcaagaaataataattcaaaatagagagaattttgaaatttattgccattaaaatcccatccctttctaattatgacttaattaaaatgttcaaacaaaacgccgtccattgaaatgttttgcattaatttaaatccattcggaataacttggcataatgccaatgctttggtcatcgtcttccccaaccgttcatcatccgctcctcagttgaccccaatttgcggggcgaatggggcacggcacattcgcccactcccattgtgtcccccgaggggcaaatgggcggggcgtgccaaattctatggcaccacaggtggagggggggggatcggttaagtgaatgaatgcctgccacacacaatggcacatccttccattacgcccgccgtcggaagggatgtgccaacgcggaggccccgcccctccccccgggggattttttgcccggccatgccaacttattgtgcccaattgcgcacaattttccttccaatgatcttccggtcattatgtgaataattaaaagcccctctcgtggaccattatttttccaaatatgttttttttaaaattttaattatctaaaaaatactcaaaggtttgtcgccaatctttcctcgataatcctcattaattaattaattatcattttaattggacacttcgaaatggagtttagtcagtccaattaattattccatgattaattaatcaattttcaataatttagcatcttttctcgtcagatgttcactttttggcccgtccgtctgtctttgcccgatgggcttcaaaattgctgttccaattgccaattgcccattagcagttcattgccccagggcataaacgaccattacgttgagcagcagcgaaaggtgccaaaggaacagaatgccaaaaacatcagcaccaaaagacaaaaacggcacacaaaacaccgccaaattaggcatacggtaatttgctaaaatacaaaatgccaatttaac

SEQ ID NO: 22313 - DNA, 872 bp, Heterodera glycines
aataaaaagaataataataatttacagaattttgccgatgccaaagacgaggccaaattggccgaactatgcacagaattggccattcgtttgctgaacatcgccgatcggtgggaggcgaaattggagatggaacagaaacaacagcagacgaacatggcattgatcattttcaaatggattttcacaacaaaatgacaaagtgtcaaacaattttaattttcaaaaagtgccaaaaaatgtaaatggcctttcctttttaattgccatcttttaaaatgatttctcacttcgatcgataaatggcttaatttttgaattttatgcttaaatgtttttttacttcaaaatgagtttaaaatttaaaaattcagttgaaaattcccccgtgtgtcctcattaagcctcaatctttttgggggacaattgacattggcacgattgtgccaatgtcaattggagaggcgggggggggggggggattaattttcgcggacaattgtctcctcgccgaattaatcccccaaaataaataatccgcagactcacgaaatcctgtgatgataatgaacaaaaaatattagtgaatgtaaagcgaataattaatcagatttatgaaaaaagctaacaaaattggggaggacattaattttgtctttttaaattattttcgctgatttttaagaaaataatttattaggaaaataattacaaatagaaattgtaaaatgggaaaacattaatttgagcttaaatgctgtgcaagggccacttttgaaattcgaacaatttaccaaaaaaattcttttttaaaacagtaaaatgttttaattggattaaattttgagggaatttagtcaattaaaatggca

SEQ ID NO: 22314 - DNA, 983 bp, Heterodera glycines
  unsure (1)..(983): unsure at all n locations
aaaaatccccagaaaatacgaggaaagatatgcntggtcacaataaaataaaaaatggctagtatgtaaaaatttgcggtcacaaataaaataaaaaatggctaatatgtaaaattggcgtccagaaatttttagactaatccgaagcaaagcacgaatgaattaaagaggcgaaagaattcacagtatcgtttctaatagggaaatattgacaggatattcggctaaaaacgggtttgatcatttttagcgcatttttaggtatacatttgagacaattgggcaggacaagaaaagaatgaagttgatgcctcatgaaactcggaattggttatgttttgtcgaaaatatccttacataatactcataaaaaatacaaataattcaacccacctattctatgaccacattctgaaaaaaatcccagaaatacgaggaaagatatgcttggtcacaataaaataaaaaatggctagtatgtaaaaatttgcggtcacaaataaaataaaaaatggctaatatgtaaaattggcgtccagaaatttttagactaatccgaagcaaagcacgaatgaattaaagaggcgaaagaattcacagtatcgtttctaatagggaaatattgacaggatattcggctaaaaacgggtttgatcatttttagcgcatttttaggtatacatttgagacaattgggcaggacaagaaaagaatgaagttgatgcctcatgaaactcggaattggttatgttttgtcgaaaatatccttacataatactcataaaaaatacaaataattcaacccacctattctatgaccacattctgaaaaaaatcccagaaatacgaggaaagatatgcttggtcacaataaaataaaaaatggctagtatgtaaaaatttgcggtcacaaataaaataaaaaatggctaatatgtaaaattggcgtccangaaatttttagactaatccgaagcaaagca

SEQ ID NO: 22315 - DNA, 890 bp, Heterodera glycines
aggaggagacgagccgattgagagaggccctcgagggtgaagaagggcggggattcgtcgtcggaagaggaggatgagtgctgttgttggtgctgcagctgctcctcctcatggccttgttccatgggtatggcaatggaaaacgacgacggccggtgtacggaagcgaaagggacggaggcggtcattgcgcgagataaaacagcggaggaacaaaatggggggaggagggagtgaatcgatgaagggggagggagcaaatggaggggggggggagcgattacgaattacgagcgatcgcaggaaaagataaaataaaatcgacgcattgcgacgctaataaatgaagggaaaagaaaacatgaatataaaattcttaacatttccttgagccaaaaatgaaatgaaaacaataaattaatcaaataaaatgaaagttaaaacggaccgaacgacggaagtcaaaatgaaaacccaatttcagcagagctcattgccaatcaattaatccgtctcattagcacttaattaatgcttaacgaacgaaatcagaaagaaacaaattaaagagaaaatcagcaaaagtaaagcaaaagaaaattgcaaaacgaaatgaaagggaaataaatttaataagcaggcgaagggaaggccttaaaacaaggctttctattgtaaagggtgtgactctgaaggaatgttcatcggatggaaaggggacggatcgatggacaaaaaaagagggagggagaagaggggaaaagagtaaaaaaaagtggaagaggaaagggaaaggaggcggagggagggagaaaaaggagtcgagggaacggcggaattgcgaaacagcgaacccactctttttgcggggggggggggggggtatttat

SEQ ID NO: 22316 - DNA, 1318 bp, Heterodera glycines
  unsure (1)..(1318): unsure at all n locations
tcggattgtatcccgagtcgggatccagaccaagtgccgatcaatcccgatgattttggaaaaacgatcggaacggatcccgagtcagggtccagaccaaatcccgaccaaatcccgattattttggaaaaacgatcggaacggatcccgagtcaggatccagaccaaatggcgatcaatcccgatgattttggaaaaacgatcggaacggatcccgagtcagggtccagaccaaatcccgaccaaatcccgatgattttggaaaaacgatcggaacggatcccgagtcgggatcccgaccaaatggcgatcaatcatattattattttgaattttccattgaaaaaaattgttttgaaaaattagagaaaaaacaatttcttaaatatattaaattttttagaaaaagctaataatgtgaaaaatccgagatcgagactcgagaccgaaaaaacccaagacttttctcgagtcgagactcgatcgagactctcgagtagcactaaggggcgggggcataatgcacgcacacccatccaatataatttttgttgaaattctcaccaaaaatatgttccaatgttcgggccgaaagccgcgtgccgcgtactgcacgtgccgttcaccgatggcgagcagagacggcttcaaacactcctccatgtggtagagatttttggcagcataagcgattgtctgctgatgggaaggcggacacccaattaaaaggttaattggataaaatactaattaataattaatttatcatttaatagcaagtgaattttaatgtagggaaaagccaaaaaaatatacaaacaaatgttttaattaatttttaaattcatttatttatgagaaaaattgaaaagttttaaatttttattttcgaaatattctattttttcagctgatattccaaatggtttccttcttttttctttagcctaaacaaattttagttttaattaattaattaaattaattaattattgcctggacaaatttgagggcctgggagcgaaagtcggccgattggcgccactcgtcgccatgccgatgaattttggggaataattgctttgcttgaggattgtgctcaaaaatatactgaaaaattataatttatataaaaaatttaatatatttattaaataattttttanattaatttaatttcatattanattaaaaaagacgaanaatttaagtcaaatttttaaatttgataacattaaaaacaataatttgtttattttttaccaatttcaaaatttttaaaataaaacttggccttacgtcgtaaatcgaagcgccc

SEQ ID NO: 22317 - DNA, 1447 bp, Heterodera glycines
gctttttctttatataggaaaatccattaagtgttataagttgttgagggggttaaaaatgtgaaagagaaagtgaggaaatattgcccttttccccttttctatgttttctctgctgcaccactgtttcgcttctctttgatttctttgaattagaatttgcgggctccctgcgcgatggaacttcaaatttttcattaccggtaatcccaaaaaatcccgcaatttccaagagagggatagctgattagggtcaagcaaaatcccacgcgggattcccgcgccgtgctctattcaaaaggcaccgaaatccggcattgatcagcgtaattagtcagctggactaaatcagactaaaatattttattttaaagatgttttaagttttcggagaaggcgtcgtccattttattcggccatttcatcatcgattgttccggcttcaccttcgtcgactgtatgggcgtaaatgcactcaaagaaatacttattttgttcaattacaattacactaatggaccctaattattctaatgagtgtaattattagaaaagtcattaatagccgaaaaaataacaacagattttcaccgaaatgcgcgagcaaagagttcttgtgtattttgcagcggcaaaaggtgggcgttatttaaaacaaattgtcgaaacaaaatgccaaaataatttagcgcccgtgcgcgatctgttcgaaaagtgcggctttttccgctacgtgcaaaagcacaacttttacccgacaattcgcgacgcggtggcaatcgcgcggaagcggcgaaatgcgtaagcggaaaaataaataaataattaaaatgtgaaataatggtaaaggagggagagggaagcttaaaaataatgaaacattccactaataaataattgttattttaaaagatgaaaaaaattcgttaatttaattattattttaaaataaattaatccatccaatttttattgaattttaataaaattaaatttcttattctgacaatagtttttttataaaattatgatcagggcaaagtatgcaaatgcatatttttttcctggcttctccatgctctaaatagtaggaaaaacactttcttttttgtgtttgcgtataaaaatcgggacttttatttacatatttcgagattttggtgcatattttgccattttttgtgcatatttttcgatttttttccatatttggccattttagtcaaatattttccgatttaaatatctcttaagaaaattttgacaaacaatagatgagatttaataccgaaaaccttgagaaatttttgatttgcgattgcaaaaacaaccgataaaatttatgaggaatacaatttttttttaattgaattttaataaaattaaattttttaatctgacaataaaagttttaaaataaattatgcttataaatttgtttattgaa

SEQ ID NO: 22318 - DNA, 1550 bp, Heterodera glycines
ttttttcgtatcaaatttaaaaaaaaattttgaattttaaaatagattggatcgtcaaacaacaaaacattatgttccccactcaaaaacagttgtgatcccgatattcctggtcctgttgctggtgatgatgatcttcatccgcaacaaactgtggagaccgccgccaataaccatccaaattcctacgacgacaatttttgtttgtccggcaccgccgaaatgggcatcgctcatcggtgtcttttttttcttggcattatgtttggtatttggcattctattaattttcaaatattttgtttagcctccgggggcgtgtgtttgaggagcatgaactgcccgcatatttcatggcacaaagtcgttgttttcgcctggaggcgccttcaaatcagcaggactcgggcctctaccgcgtgcatgagttcaacaaagtgtgttttgcaagggaaaatatttcgaaattttcggcccaaaaaattcacaaatgaatggccccaggtgtccgtgggatttccaaatgaaatttggtggtggatagagcatcaccgtttacaagtgtgcaatggtatagtggtagtgcgttaggcgaaaattttttgcgtcccaggttcaaatcctctacatgcaaatccattttagaattttatttttgcttttttatacaaaagtcaattataaaaaattttttataaaacaaatcttttatttttaattttatttcattaacaaaaaatttattaaagataataatgtaataaatatctttaagttcataaaatctaatttttgtctaatactttttgagtaacttatgtgtcaaaatgggttaaaaataagaattttatatcaaaacattttttggataaaattgactttgatatgtataaaaaacaaaaaaataattaaaaaatgaatttacatgtaggggacccgaacctagtgtttaaaaaacgatgacaagcgcactaccgatacaccaatggacaattcgaaaagaagcaaataattatttaatggccaaagtgaggcaaaatccgaggcccacgtgctggcaaatacccaaagagttttggccgaactgtgtcaggtcagtgcccatttgtccatttggcttttagatttattttccaaattttatgaagttttgtgtgcccgttccgccggtcatatcattttgctggtggaggggacggagccgaccttcgggaaagtgtcgttcccattggaagggcacgtcgtcacggccgataacattttgccgctcatccaacacacgcttggccgccgagaaagagtcatttgcttgccggtaagtcgtccaattgcagagacatttttggggacgaagcccaactcatttttggactctttccaactttaatattcggagaatttaaatgaattatcaaaaaatctgacaagacatgaaactcctcatatgagttaattgcagatgttcgtcagaggtttcttcaaaaagtcgggcgtttggcacttttccgacagatggcaccgtttcggctgtttgatggtcagagctgaat

SEQ ID NO: 22319 - DNA, 1374 bp, Heterodera glycines
gatggcatttcccccctttttactgtacattaattaccccattaagtgtgccgttggccaccatttgagccaatcgttggtaagcaatgaattcgttcagtgccgttttgatgcacatcagttcagccactttcatcgtttcgtccaacattaccttagatttttatttttttattatttaattgtgctcattaaaattatttttcaaaaaaatttattttcgacgactattgaaataataaattttcattttttatttattattagcaaaaagttatgaaaaaatttgggtttttctgaacatttttgataataaatctacaaaaaataaggtacattaatgttgtcaaatattttattatctttttatggtcgtgtaaactgtgcaatagagccaaatttcccgaggcccgagactaataccgcaaaaagccaagaccttttttcgagcattgattgactcgagaccacgactctcgatcagcgtaactgattatcctgtctggaacctcaacttgatgattttttattaaattaatttaaccggcgactctcttttagaaaatatgttatacaaaaaattgccaagcaatcttatcaaatttatttgtattttttgcatttagttcagttgaatctgtgcctactccgctcaggtgattttaccaaaattaaattcaaaaatctgttgaaaatctttgaaaaattttcaaaaacatccttttgcttctccttcccttctttcagagcttcctcagtcggttcgtgctcgttggtggtcagtcattttctatttaaattttcaaaaatccattaaaaaaattcccaaaatttaggcacgtattggcgctctgttcgctcctatggtaagttcaggtaaatttgtgatcaaaccctttgatcgcacttcatcaaccattgaacgcgtcgcgtcgttagggttcactaaggctttctccccctccatgaaattttttatattttttccaaaacatttttcatgttttgaaattttttcgaattttccaaaatctcgcaatcccgcacgggatcccgcaaattttaaatgcgggatttgcgggattaattccgcgggatcccgtcccgcaaaaaattttgagttccagtcccgcagcgggatccgcaaatttgaaatttccggtctctactagaaactgagtcaattgattaaatttgatatttaaccgaaattatgtgatgaaaaaaattttggaattaaaaaaaaaattttgaaaaaacttcggcttcgaaaacttcgggttttttgggcttcgagcttcggacttcgaataaaaattgggcttcgccttcggcttcgagtgctaagccgagcttcgacggagccctgatcgg

SEQ ID NO: 22320 - DNA, 2481 bp, Heterodera glycines
atttgaattttgacgaagaaattccgttaaaataactatatctttgaaggcgagaaaaaatgtacgccaaaaagcattgaaagattttgatttgcgttatgctagagaaatggaaaaaaatgagactttttgggaaacataaactattttttgatgatttttttcagtttttgtgacatattttggttgcctttgggaattttaggacatttttttttgttatcaagggcttaataatcattgattaaaatttataaaattaaattttttttcattctcaatataaataattcattcatctttcattttgcaacaaatgacaaacaaaatactggaggtgccaccgatttattccccttttttgtccccggaggcgttgttttatttgttttcgattttattgcttcgttcatttcctttggcgctgtttcattttttggcatttcctttggcgctgtttcactttttggcatttcctttggcgctgtttcactttttggcatttcctttggcgttgtttcactttttggcattttttggctgtttggcattgtcttcggcgttgagtttggcattgttttcggcgctgttttgtcctcagttggcgccactggctttcttggcacggcaggtggcactgttgcttgtttgctaattgatgctgccatttttgccataggcattgtttgctcatttatttgatcgtcagttttcccctccggcaattttccaccctttgtttttgcaaggcttaatgagaaaacgggaggaggcggtgcatttggcattaattgagctcgtggcgccggcggtggtaccattttgccgttgttgaatttgatgatattcactgggtcgcctgagggtcgaaataattttaatttgacagttaattacattaattactgtgcccacctgtgtattcaattgactgattaatttcttcggatgacatcagtaaacgaatttttttatggtcatcctgacgttgatacagcatttctccttcaaaatcaatctaaaattttattttttaattaagatattttgtattttaaaaaaatatataaattttaattagggttttaattaaaatattataaaatttattatttcaaaaatgatagttctacatgaaatataaaaggcaaaaatgaatatataaattaatctttacatcaaaatatttttatattttccaattaaaaaaatagtttcattaaattcttatattaaaaataattataaataatattatttcgaaaatggtagttttatataaaattaaacgatgaatatttgatcaatttttttattaaaagatcactatgcatttatatatatttttaattaaaaaatgatttaaagtacttgccaatccgtattttcttgctctgatcagcatgccaactaactataaatataactgaataaacttcaaacttatattttggatcttactgtttctgaaatgcgactgtacatgtaaaacaatgggccaaatcttaaaaattaaatttaaactttatattttaatttcctcccaaaatgccatacttcatgtagcaatcgggcggtgtgccttcaccattttgttcaatcatttcgcatagaaacatcacttcacgcatcacatgctcgccgcccttcaaattcatgattttttgtttttttttaaacaaaattaattaatttatttatttaattaaaatatttttttaatctaatttaaacaattttaaaatagaagttgctggcaaataatgttcatttaaaaaaaagaaaaattattataatataaaatttattgtttattttaataaaaataaattactctaacgccgcgggcctgtgattttgtgccgattaaaggtctaataaaaagaataatatatatttttaatttaaacaatatatattaccttccataatcctgggaatttttatcaaattttggcgctcccgcaaattgctttgagccatgttctctgcccaattaaaaagttaattaattaataattgatcatagtcaaaaaatgaaatgatttaatttttaatattaaaaataattaataaatttgaaaaatttttacatttttgaattgttcactgtttgtattgcggttgtgttgaatttggccacagtttggtccacagatttaagctctggatcatgtttgatcactggcatttattccaattttttgtttaactcttcaaatggacaaaattttaaattccattggcaaaaagaaaaatggccaagattttggggaaaatttaaagggaacaaataataataataacaataattgccgttttgaatgggtttgtctagcctaattaattattaatgggccgactcattttaaaaattcaaccacaaacagaataactcagacaagaaaagcacatttttttagatgaataaaatatatcttagaagatcttgaatttaaagagattagaaaaaaggaaatc

SEQ ID NO: 22321 - DNA, 1919 bp, Heterodera glycines
  unsure (1)..(1919): unsure at all n locations
tttaattaaacgtgtataatttttatttacaatgaattaaatctgaaaattcagaacatgccgtaaatgaaaatgtgtgatccatgcaaagaaaaaaaaatccagnaggacaattttaattacaaatgatcactttctgtttatgacaaattcaaggacacacttcaattaaagatgtacgctaaaaaaacaacgtaaatatatattttttttacaagattagaaactgaaagcctgaaccggtagtgagtttatcccttaattaaaaaaccatataaaatttttgaatcaaaattcatgacgcattttcagaatataagcattaaaatgctataataacaattaaaaaagatttgaagtgatgcttttattaatgttagaaagatttaagttcgaggaattaaaattttggacttgagggaaatattgttagcattcaccccacctttgcaataattagtttttctaaaattttctcacccataattttttaaacttctgtgttccataaaattaatatgtatacttttattactagggattcaatttttaggcacaaaaaatggctcccggacaatccgacagtggacattccgacagtggacaatccgacagtgaagacaattcgacagaggtggacaatccgacagtgaagacaattcgacagtgaagacaattcgacagaggtggacaatccgacagtggacaaacggacagtggacattccgacagtggacaatccgacagtgaggacaattcgacagaggtggacaatcagacagtggacaaacggacagtggacattccgacagtggacaatccgacagtgaggacaattcgacagaggtggacaatccgacagtggacaaacggacagtggacattccgacagtggacattccgacagtggacaatccgacagtgaagacaattcgacagaggtggacaatccgacagtggacaatcggacagtggacattccgacagtggacaatccgacagtgaggacaatccgacagaggtggacaattgcgacagttggatgatctctgacaggaaaatgcacaacaggatttaaaaaactgccgacaccacaacgtcacaagtggtagccgtagtcgacgccgacggaagctgaaaaagggggaaaatgcagcatggacaaaaatgtggtgttcacttccgattgccatgtatctgaagaaaagccatttggaaatgagcgattcggaggcggaacgcggcagtcggtccataatgtccaagtcgggcggattgaagccgagcgcagtggcgggaagaccatcggtgaccaaattgacccaaagcaattggacggggatcagagcttcgggaatgcctgaagcgtgttcacaatcagtcaggacacgacaaaacaacgaatgaaagtgacaaaccaagcgcagcgacaaggaaaatggagacgacttcaccaatgtttgacgagatgagatagcgaatgctgaaaagcgaagaactcatttaaacatcattaatgtaattataatgaacccaatttcaaattcttcccctcccatccatacaattgtttcatgttgttgtaaatggcacggccttcctccaccgctgccacaattgttgagaaattgtcatccgccaacaccatttccgcggcactttttgccaccgccgtgccactgcccatagcaatgccaatttcggcctttttcagtgccggcgcatcgttcactccgtcgccggtcatcgcagtgatttcgccatgcgattgcaaatattcgacaatctcaaatatacaaatttttgctaatcgttttcgaattgcttaacgtaccttcgatttgtgcgcgggttcaacgcgagcgaataatttggcacgacggcacgcgtcgctttgctgttggggcggcagtcgtcaa

SEQ ID NO: 22322 - DNA, 1151 bp, Heterodera glycines
cgattttatggagaaaattgttagataacaagatgatctcagatttgagaaaataatgataaaaatagttgattcgtttttttttaaatttaaaaaagtcaaaaatatgcacttacaaaaaataaaataaataaataaataattatatttataaaacgaaaaataataataaaaaagcggaaaattaatttatcttataaaaaaataaaaataataaaactcctctaaattaacaaataattgaaataaaaattaatgtaccaattttagaaaaaacaacgagataaataaatggaagtcttttgtgaacaaaatgaataatcgtttaattaaaacaaaatatttgcaaataaaatgttttttcaacaaaattattaatattaatcaccacaaattcatttctctgatcataaaaatggccttcacacatttttttgtgacttttcttcgcctttataatcgcttttgttgtgcgagaaaataagctttaaacattgcgcaaaatctgtttgtatgcccaaatatgaaagccaataaaataaaagcagaaaatatttaaaaagaaataatttaaaaaacaaacataaaaaattaaaatgttagtcaaatataatgttttaaatccaggccaggcctggttccagcctatgacatgcctggatttttcgtgaacctgaattttccagggtccttgttcaggaaatccatgtccagcagcaggtcccggctttttataatgttggactctgtttaaaaaaaccaaaggattctctcattttttttgcacttaataaattggaaatttttttatgtttacggataaatgaatggattttaagcgataatgaataagatcaaaaataatttagtcatattaaaatttgggtaataattatgctatttaaacaggaaatattcatgtcaatacatttgaaatttgtcggtattatgcaaagtaaataacttccatataaaattttcaacaatttttacaagatcaaaatggaattatctcttttttttcatggtaaatcagcatttgatatcctaaattaaaattgtaattttatttttaaataaatatttcaatatatatccaataatttatttttcgttaattaaacacagaaaaaaatacgaataaaatgaat

SEQ ID NO: 22323 - DNA, 1645 bp, Heterodera glycines
gaggacgctcaacatggtcgagcaattcgtgtcgcaacctttttccacaaaattacaaaaattttcaacaccatatttatcagcagcgcacaaaacaacgatgaaatgctcatactgtagggaaaaattcaagcaatatacggtaacacaggtttggtaacaattaataaataaggaatttgcaaattaattagtcaacagatttttcgtccaataaaaattttaatttctcaccctgacggattaaaggcccaaaattaaaaacttatttatattcaaaaagaatttaattttagatttcatttttttgtttgtcaattattgcctaaatgagtcatttgaaatgcctaaacttttatttgttgcttttttgtataccttttcaacaaattttttcttttcaaatgttaaaacaattccatctgcactttttgtcttcgttcaacagcatttccaatattttttggtatgtgccaaagtctgtgtttataattttaaatgaatattttatgtcagttttttaaaataatgaatttttaaaaattaattagatttattttattattaaaagattttattaaaaaaaccagctaaaacatgaagcattccattcaatgtttttattatttgagcatctctgataaactttctctgatctctaagaagcatatcgcgttgtgcaattaacgcattgatgtgatcattaatttctatttgctcattatttcctaaattggtataattaataaggcccgatttttttgaattatactgcatattatctggccaaatatcgatcgaaccagacacaatttcaattaaacatcaatcattatggaccgggcccaataaaaaatttaaaaatcattgtttgacgtaagaaatcaaacactaacttgagagtaggttcgggcccccgaccccgaaaattaagattatttttcgggttattcatcgaccctgcgctatgcaccccgacccctgaacgcagcttgagtcgggatcgagaggtaaatcataaatccctaatccgacccagattgatttgatccacccgactttaactgatcccgcctgacttttctcaccccaaagagttatagccctagcctccttgagagttcggatagtttgagtggtggttttatttgtttgaactaggctttttgggtcgagactttgctggcatatcataatggcataatttttaatttgttttttttggcataactttgcgtgctttattcttcgacagttctttttatacactttttcaattcatcattatgccatcttagtacagtattgcgcactttttcgtcataaatgtggtcggcatgtgtctttttatgcacaattggggccaaaattcgtaaaaatgtgctaatgttttgggcagtaagagccttcgatggtaagcgtgtaattattggtccaggggcggatcgaatgtccacagaaattgtatgaaatataattatgggcaacggcgctgacatctataggttgaggacgcattttttgtataaacgaagacgttggcattaagtttaaaatattggtgtaaaataataaaaagcgatttactgtatttcctcaaataaggacaccccgtggctattattagcgaaccacctcaaaaagg

SEQ ID NO: 22324 - DNA, 1351 bp, Heterodera glycines
cagaactctgagaggataaaaattgatttcaattaaatgttttgcatttttaaacgattgaggggggaggattaatgaatgctgctcctactttttaccaccatttatttatccaccaggaaatgacctttgctcgttgaattccaacgctctcttccgttcgttgggttttatgcagcggacgtaatgcggcacacagcgcatcagcgagtccatcagatggttggcctgactctgtgaatgggaagtgcggaatgtgttttgccaattcagcaaacgaatgaatggaagaggaaatgaaatttggatttgtaaatttctaatttagggttcgaattcgaaaaaaaatcattgagtcggacgacggactctgattttggtggaggcactagttggctttttgttgttgccgttttcattcgacacgcagtcggcagcgaacaactgacgcatgaactcactgaaaatatgcgatgaaaccatttgctattttttttttcttggtgtttccacacacttctcactgttttgcattagttggaccaagtcgacgtgcaatatgtccatgttccggtcgcaaaagccctcaatttggtagaccacctaaaaaatggccagtcaacctatgaaaatgcaaaaaaagagtgcctcgcccgcgtagtgtcgtacgacgaaactgtcggcaccagaacggaaatgctcgtggtcttcgtgttgttttttcagatcactcagaaactttttgtccgctccttcgttttgcccgtgcagctggagagaggtgtcgtccaagaggaacattatgccttagaatcgatgcgttttgttggggattagtccctcccatccatgctcaagactgaacaatttcacgagggtcttgagcatcgttagccgcccttggactaactcatccccaccaccgccattgacgctgctcacccggacgcggccgtttcgcctcgatcagttcgcagacaattttattgttgaaaaattcgatcggagtccacttcagtccctccgattggtactcctcctgttccgccttcagcgtcaattcgatgaaaatttgctggagtttttcattaacgaaattgatgctgaaaagggaatgcaatgggcacagaaaagcggcactttcgcaccaaaactgttcaaatccgttccgttcgaacacttcgaagccgtaaatgtccaacacggccaacgaaatgtcaaacgaattgcggttggcatccacgttcagtgcacaatttacagaggccactaaaaacacacagtgttgtcaaacaagcaactatggtagggtacggtaccaaggaagtcaaagagacgcgtgtacagtcct

SEQ ID NO: 22325 - DNA, 1284 bp, Heterodera glycines
aatttttggaggaagagtccatcgttttttattctccctaaccagttcgaacagtgaaattcgaaaatgaacatttatatcccccgcccccgctcaatttggtgagtttgagcataaaattgaattctttaaaaatgttcaaaggtccaaaattgctttattgggcactaaagtgaagattttgcaatcagcccaccaccatcaaatgaagaaggaatgaatgggtaaagtgaatgaatgattaatgttagtgggaagttacgcccaaatgtttcttgccattcatttttctttaaattgttccgttatcgcctgacccttttttctcttcctttccttcaaatcgacaaaaaaaccagcgattgttatcaaattgggttggacagtgcacaaaaatattcataatttgcatgaatttgttgagcaatggttggataataataacaaatgaaatgctttttaatttcgcttatttttaaattgcaacgtcctaaactgtctttgaacaaccttttatttagagtagagcgggaccgggaattttgggcaaaaccgggaccgggacttgccgggacctgagaagccgggaccgggaccgggacctcggtttttgtccgggaccgggaccgggaaccgggaccaaccgggaaattttaaaaattcataaaaattttaaaaatttaaaaaaaattcaaattttaatttatatcaagtgaaaataatacaaaattatttggttttttataataagttaaattaatgaaaattttcaaacaaattttcttcaattatttcaaacaattaatcatttttggacaaaatcatcgaatattaatagaaattcagatttgattttcacatcacttttttttggcgcgctttttcaaaaaacttttgggaaagaaggggtccggcggtgccgataggcgccgccgggggaaattttaaaaatttgggtgcaatttgttaacagattttcaacaaaaaaggttggtttttgcgattattaagctcaattggtaggattttcatttaaaaaatgataaaatatgtatcaattaaaaaaaaaaactatgaggaatcatattttctttataggaaacccacgagtatacaaaaaaaaaaatgaaaatgatctaatttctgtagagggattgaaccaggggaaagaagaagggaaagtcaaggagactagccatcaggccatttgcacacttgggcagtgttacttttaaagaatatattaattattattttttattttttaactcccaattttctcac

SEQ ID NO: 22326 - DNA, 960 bp, Heterodera glycines
  unsure (1)..(960): unsure at all n locations
acacatttttaaatatactgccttttatttactctaaacaatgaaacatttataaaatatggcattttcagactgttacaaaagttataagtaaaacaaatatacagtntagtccaacaactcttaaagcaacaaacaaatgcgaatttttatgcacaaaatactgttttttacaaacaaattctctatcataaacgcatttctattatttttttaaaaaattgatacattcacattgttttttgtactatgagtgaattttgatattaaaattttgaaaaaaataagaaaatgccatatacgaatactttttgggcgatactatagatggtggatggtcaacctttttgaaaaaaatgttttgttatagaaagtcaagaaaaattgttatggagtttttttgggtaaggaacataaatcaaatattcattgagaacaatatagaatgccggaactcgcattcagaacaacatttcaaaaacaaaacttcataaatttattatttttgttagcaaaatggatcaaaattcgtgttaacctcaaccagaaatataacaaaatcatatttgcaggatatggcatttatgtactccattttgcaaattgatgcataacatttgcgatttatacgcaaatgccatatattttaatcctaattattccttaatgctttttgtccttttccttatccattgctcttttcttttgtcactgtttttttctttaattttctgcccaccgtttatcaaacaaatgcaattagcatatgataattaaaagacatcatttttcgcactaattgccttcctcctcccccttctcctccgcttctttctttctgtcccactttcccttctttcctccgttttttcgtcctcttccttcaattcccatccaaaaatctatgcttaatcaatcgcttctcacccaaacactcatcctttggatgcaaaatccgat

SEQ ID NO: 22327 - DNA, 1496 bp, Heterodera glycines
agaaggcattgcgtccaatgatcatattacgatcctaaaacgaacaaaaaaatattttaaaaaatttcggtggagggggggaacgaccttctctccgtccgtataaatgataccaattgtcgcaattttatataatttttggagttattggtaaaggtgccaaaattttattacatatttttgttgattttttttttacattttaaaaagctatagaaattggatttaaaatatgaaatgaaagaaatttgcaacaaaattagaaaattatatcatctttgatgacatcgataacctatttggcaacaataatttggaggcaaatgctgggtcataaaaaatacgcccctgtaaaatgccgtaccccatcaccatcgaacgcggcgccaatgtcatgttcaccgagtgccatttggtcaacaaggcccttggcataggtcaaattcggatcaggatgaccacctaagaaaagattggatgttgtttttgttggataaacccctaagaattcatccattttattggcaccgtaatgtttaatttcagggggttagaatcgcctggctagtattttggctgaaattttcgacattttcttattggtgcccctccaagtttcttcgcccaaatttcccaccaaattcgctcatttttccaaaaaccaacaaaattggcaatgtttggtgcaaataccatacaaatttcgcccatggcatcctttatcccaagccaagccaaagtcctgggagtgtccttaatggccccctctctggccatggcaatttggccaaacctccaaagtctggtttcggcactatccgtagacaactttgtgccggcgcgccgagtcggtccacaaaaatggtggacacatagggcccggtgacgccgtgcattgagtcgaccagcagccgaaaggggcgcccatcggtcattccaccagtgagaagggcgcggatctgaaaaggccaaaaatgaaaaaagttaacctagaaattttctaagaaataatgtaaaaaaaaataagagaaaaattaaaaaaatgaaccaaaatgtgtgcaaattcaaaaaatgtacaacattacttttgaagacataaacgcaacaaatttttgattaaatatcgtcttatggatcagcttggaatatggattatgtgaacttttgtagatttttttaaatttttgtgtgtgacacccaagcccgtagccaggtaaaattttcggggggggggggggaaagggaggggtccggtccgaagacctgacctttttttttcttcttttttttcaaatttatccataatttttttttctgaataaaattgataaaagttgtttacgatctgcaaataactacaattttccacttgtagacttttctattgtttggtcgtcggcggctgctgcttaaaaaacaactttttcccgctgctgggtaccaccttttcactaaaaaaggacccaattttggccgttttacggaaaatttgagtg

SEQ ID NO: 22328 - DNA, 1010 bp, Heterodera glycines
accatcttactgatcaatcaattcctatctccaatttgctctcccattttcctccgatcacttgtttctctaaatcttttgatcacccacctttcaatcagtgatagatagccaatgatcttacagatcaatcaacccttttgcattttgctctcccatttcttccgatcactgattgttctttctgatcaccaagttccttccccctcactctctgtttagtcagttgatcacttcgcttctgtcctccttgcgctccatcatctctctgctgttgctgctgttcctgttcatcgtcatcttcgccctgctcggcatgcaggtgtttggcggacggttcaactacaacccaatgcaacaggtactatcactactccacctctgctgctgattgggattttgggtttatccccctcccccactctcgaatcctatgacaatttaagaaccagaaacaataagttattgaaaagattaaagggccatgatcggccattcatccgcgaaagtcccaattctcgataaaaaaaagaaaatatgagaaaacaacgaaagcaattcgatctagcttcgggagtctcggatttacggttcgcttcaaaatcccggcaattactcccatttttagaagccccgtgccaacttcgacacgttcatccaatcgctgctgacggtgttccaagtgttgacgggcgaagactggaacactgtaatgtacaacggtatcgaaagttacggtggcatcggctcgctgggaatgcttgtctccgtttatttgtaaaattttggcacattttcttttggaatttcctttccgccctccgcccatttctctctttgtttagcattgtgctgttcatctgcggcaactacattctgctcaacgtgttcttggccatttgcgtggacaatttggccgaggctgatcaggcaagtgatcagtcaggcaacggtctgctgaatggctgagtgattgggttttctgattgaagatgatcaggacgcatgct

SEQ ID NO: 22329 - DNA, 1043 bp, Heterodera glycines
ccccccggcggcgcctatcggcaccgccggaccctctgttcccttaaagttttttgaaaaaagcgcgtcagtaaaaaagcggtattaaaaagcaaaaaaaaggtcgccaatttcatggctggaccatttcgcaaaaattgaccccccccccccttttcatgtatgatgtttgaccaaggaatgtgatcagtgacatttttgatcacttcggtatctggatgacattcaatggatagggaagcgatcgatttgggatgcctgagatagtcgggatggcatttattgatcaggaataaagaataaatgatcagtatgccattccttgatcagtgaggctatttgggatgtctgagacggtcggagtggcatttagtgttggcatttgcggattagttcaatcaattcgtgtgataactgatttgtttgctactgtgaaaagtgttgctgatcaggaacgtagaataggatggtggtttttcagcgtcagtcaagtgatcagaatgattttttgatttaaaccatggttttgatgagttcaggtgatgaacgcaaagccggaagaggaagaggacgaaatggaggtggaaggcgagtacgaggacgacgacaagtacgaccatggcgaggaggaagatgaagcggacgagggcgacgccgatgacgatgacgagattgagggcgagccggaggaagtggtggtcggcgcgaggccgcgacgggtgagcaatcgatcagatcagcgggggcattcgatcggccgatcgatttaacacattattaataggaccaattttcctgatcagaggcatgatcgctacatttatagatgaggataaccgattggattaatgcgtcatcgatagataaggaccaccaatcgggttaattttcgatcataggaatatgatcgatgcatcattgataggtaaggaccaccaatcgggtcaatttgctgatcagagtgaccatttttcgttttttttatcacactaattacaattaaatgttcctcatttgtcaggtttcacatttgggcgttcaga

SEQ ID NO: 22330 - DNA, 1255 bp, Heterodera glycines
tgagtgtttttaaattaaaaatgagtaaagacagacacattgacaaatgggcacctgcttgaactgctcctcgtacgaccaattgggcgtgccatttctgttgtgactgctgcagttgccattgtggtgggcaaccgatgaccgaccttcgctccttaatgagcagcaattaaattcaattttttttttaaattggatattttaatgattcatctgcccacatttaaaggggccatgggcgaaggttttgtttcatttgactaacaaagcaaaaagttatggcttcttaaaattgtctcatcagacgcaattgacccctcgggggtaattataaaacttttttttttcttaaaatgacaaataatattcattcattaaaaccatttgttttattttcccctccatccgtttggctcactttaagctcaaatcctcgggttcccccatcgcttggttttgtccggaattgctcctctcctcgtcttcttcctcctcctcctcttcctcctcgtccttcacgtaacccatcggcgaagaagcgatttgttggaacaaattttcggaggctgaaactttttaaattcatattttaattaaaataaaaattacgatgaaaaaatgaatttaattacaattattattggacggaatggacagaaaagtcgccgcatcgaattgattttgatgggccttaataagtgggcaagaatattattattcccccatttgccattgccattgtctcccaacctgcatgaattgctgggattggtgttgcagtgccatcagaaagggcgaaagtgtggccaattgctgcacaaatgggttgttgttcatgccgcccgccggttgtgccattgtcggaaggaatgggactgagtcggcggcggagaggccggctaaaaagtcaaatttcaaatttcatttttaccattgccacttcaaatgccgcacttcctaactgattgctcagcttctgaaaggctttgtgtgcttcgaaaaagtccatcgtcgctatacccgtgccctgctgctgttcttcccccgctgaaatttcaatttttttaaatttcaaatcaaccccctcccccgcccctctcgccgactttgctccgtcgtcgctgtgcagtcaatggcattgtgccgcaacgcatgctgcaagaaaagactgggtgaactggccaccaactgttgctcaactccggccaattttggctgttttcaaatgtttaattattaatgaattttaattaga

SEQ ID NO: 22331 - DNA, 720 bp, Heterodera glycines
gaaatagtgacaaaaagtccgaaatagtgacgaatagtgacataattttcagccaaaaattgagcaaaaataatttttattcactgattgcattgcaaatgagtagggctgggatttttaagaccaaaaaacccaaaatagttacctaaaaaaatttttaaaattaaaaatttttgccaagaaagtaaatttttgagaaatttttttttcatttcatagtatattttgaaaaattttagcttgattcttaggggtgtatttttttgaaaaattttagctcgattcttaggggtgtattttttggttttattgcatttttgttaaggaattttgcccaaaaatgtcaaaatagtgaaaaaatagtgacaaaacgccaaaatagtgatttttaactattttagtgacgaagtcgccaaaatagtgatttctagtgaccgataatgacatcagaatcgaaaatttttaatgcagaaatgcgttttttgagctcctttcttcaaatcaatcgagcaaaaaatttagttaaaacctaaaattcacagccctactgattaggttccgggtttcccaaaattcccggtcccgctcaactctatttaaaactatcattttgcaatcctccaaaaaagaaattatgaagctccaaccctgacgaattagcaaatgaaattaccatttgaaagttgagatgtcgaagtccttcaggggaaaattaacgcg

SEQ ID NO: 22332 - DNA, 1249 bp, Heterodera glycines
aatcaaatttgcaaaattctggtctttgaccccgaacaaagactatctatcacatttaattgctgattgccaaaagaaagactcaggccattgcttcatggagacctgcacaccccaaaacaccttgaatttcattgaattttaaaaaaaatcctagggttcgcaacattttttttacaaaatatgaactccatttgaaaaaaaacaaaattaaagattttttgtatacatatgaacaaaaccaaaacaccaatcagtgaatggattgcagtaatgggaatcaaaaccattttatagactacacatacatcccttatatacagaacaaccaattgcatttcacagtaacgcatgtcttttacgagaattatgcacaccatgtttctataaaagacatcattccatcggggattttcattatttctattaacgcagcaacacaatgtcaatttcttatcgtcagcttctgttcattgctgcttttctcttcatcggttgtcatgcgcatgctggcgttgatcacacgcatctggcgagcttcacttgtgccacggcgaaggacggtgaaatcaatggcttcagagcggttgacgatggtctgctgtgagttgtgcaaaacccttccatttgaaacaaccaatcatcccaaaatcccatttcagaattggttccgacgccactaatgccactggtgctatgatcctctttggtttccagacgaacaaaaaggaggatttgtacttcaaagtctttgtgccaacatcatcatcatgcctctcatcagtgaacaacttcgtcgtcagcggtcgattttgtgaactcggagcgttggagacagaggtgagtgaaaaacactcaatttgtcacataaacaatcagttttttgtggtttcagactgaatcggctaactgtccggatggaggcggcgctggcaacggctgcaactcccgcagtgtcacctgccaaatcaaaaccgtcaaggaagtagcggaattgcctgacggtcgagtgttcaaagtcaacttgggaaatctcacacaagtgacggcactgtgcacgaagtggaaggcgtacttcgtgagtttgacgtttttacaggtgaatcatctatttatgctttgttgtttcagaccaatgttcgtcaagtgatggaatcaggcggaggcggagaaccgtgtgtgattggtgattcggcgagcggttttccaatgtggctcatcgttttgatcgtcgttgtcgtgatttggt

SEQ ID NO: 22333 - DNA, 1970 bp, Heterodera glycines
  unsure (1)..(1970): unsure at all n locations
aaaatggctcaaaaatttttgataattttcatcattttcgttttaaattaaatttaaaaaatattcaaaaatgaagaatttaattatttgcatcaaaattttaattgctgccaaaaaatattaattgttgcaaaatctttaaaaaaaattcccaattttttaaataaacatttttgcacaaaattctctatttaagcaaactgtgtgagttttgttgacacaatttcgtgtgttcaaatgttaaaatttttgctagggatcatttttcattaaaattaaataaaagagccgacacattttagtttacaggttttgaaatttatttttggcattttgtcagtaagtgtagaaattcgaagaaaaaaaatgacaaacagtgagaactgacggtccaaagacttgaagcacattgaactttttaactgtttttttgtggaaaaggttataaaattaacaaaaataatttattcaaaaagcgctacaaatcattgatacaaaatattttttattattaaaagttatactgttataacttataattagagttgagcggtaatcggtaattgtaaaaaaaccggtaccggtactgaccggtaatgcaaaaaccggtaccggtaccggtaaaaaccggtaattttccaacgtaaaaatttttggacaaaatttttcaaatacaaaatttttattcagttttcgcgcgagtgcctgttttttttcgcggcacgtttttctgaagacttttggggacaggaggggccggcggtgccgataggcgccgccgggaaaaattttgtattttttaatgcgatttgttaacagaatttgtaaaaaaagaccaattgattaatttttgggtttttaggatgcttaaaatgaaagaaaaaaagttggaatattttttttaattaaaatttcaattaaaataatggtaaagaaaatatgaagaatattctatcccagtggggaattaaacccaagcgagaaataataaaatcagaaggtttagccagccacttgaccacttatgcatatgaacaaatgctttaaatgaaaataaataatttaattttttttctcaaaaaatttctccttcttcaccattccctactcttttctcacccagacccccattcttaccagtgcaaatttttaccggcggtaccggtactagacaaaccggtaccgatactttgatttttgaaaaaaccggtacaaaaaaaccggtaattaccggtcggtaccggtaccggtaccggtaaaccctagttcaattccctattgggatatgatagttttcaaattttttaaaattactttaattaaaatttacttaaaaagaaaactttctaacattaaaaataatttttctctatttttaaaacagcattagacccattaattaaccaatgactggacattttttggacaaaatctgttaaaaaattcacaaaatttcaaaaattttcacagcggcgcctatagcaccgccggacccccattttaccttatttttttaaaactttgatcccaaaatggcaaaaatagtcctttattttcctcaaaaaaattggctcaaaaacataaatttgttcattaaatgggcacaacatattgacattatctcgaaaaaagcagtacgatctgcttttgctatactaaaatcaatcaaaactcgtgatatgaaaatacttgtaaatttgtttaatatttattgcaaaccaattttagagtttggatctccaatttcaatccttatttaaaanaggatatagaaaaattggagaatgtccaaagaacttttatgagagtatttagacgtaacaattatactgttgacctacctaattatgctgaattcttanatatttatcatcaaaactcgcttgattgtcgtnaggtaaaattagacttaaaacttttctatgaaataattttaggtaaaataatttnacaaataacgaatccttttc

SEQ ID NO: 22334 - DNA, 2195 bp, Heterodera glycines
  unsure (1)..(2195): unsure at all n locations
cttattttaatatggttcgttcagaattcttaataacataattttccggtggaagtttaccggcaccatcggacaaaatttttttttaatttgatcatttttgaatttatattcaaaaaaaggtcgtcgatttacatggctgccccccccctctcttttaatgtatggtcactttcactgaatgataaatgggctatttctttgaataaatttgtcaaaaattgcaggttatttgttactgcgaccaaaattaagcaattgccaaccgaattggtcagatttcgcacttaccctcacgtttttccgatgattccaccgacccgcagaaaattagcgtttggaaagcggcccgttatacaagtgcggcgcccacttattttccaagtcttgacaagtacatcgacggaggtaaacaaatatgaccttattgaattatgaaattttgatttgatgaattagcaccagattctggtgaatgagtccgaaggttttcggcccatattcaggggagacgggacaaaatttcatcgccgaaatttcgccggccaaaatttcgccgccgtaatttcgccgggacaaaatttcgccacaaaaaaaaaattaaacattaagaaaaaaaaaaatttatacgaaaattccaagaaactctttttccaaattatttcatgaaattttctttaaaaattctgaatttttctcgaaaaattccaatgttatcaaaaaaacgaatcggccaaaaaacgaacgtccgtcgtccaatggtaccaccctcgtccccctatttttgatatttttcgaaattatattccaatatggtatgccaatatttgacaaagtcggttttgaaatttacattagaaaaatattttgacttctcgggtgtcccttccgaanttaattactggatatgtgcatgattataatgcacgtttttggtcctttttgagtcaattttttgaatttttaatcacttggagtctgtgccttaagtatttttaaaaataattataccaccaaacccttttaggaattatggcaaacaacccgagtgtggagttactgcacgaacttgccttcatggacaattcgaaacttcaatttttgctgtcgcttggcactggcgttgcaccaacagtcgaactggcgacaactgaatcgacattcccaactgcgacaattgaaggacttgggaacacctacagaattttgatgtcacaggtgcaaacttaaagaattggtttcttatatttaaaccgggagttcgttcggctctattgcggtttacaaggctaaaaaaagaccattgaataattagaaaattttagtgctcatgaatcctaaaagaaacagatcttgccttcttggtatcatccgatagctctgcgagcctattagtctgcaaaatttcaaagaatttctttctcaaaaaaagatggccagaaaatctcataaaactagttttctcaaaatttttggcgataacttttgaaatttaacgaaaaatatattctgattagtttttcttgttgtaaacaattttattagagccgagcaatagtgaaatttgagttttaactttttgttctaactcgcgttcggggttcggaattaatagaaatggatgtcagattcattatcagcgacctcgaaaacacacaaaaagtcgttttacacgactttttaaatttttgttattttttcgaaaaatggagggcgggggggggggagggggacaaaacacacaattaccgattgcttgtcaaaaaattttacgtaactcatgtaacatgaataagagataaaaacgaacatcatattcatgttcatctcaaaacatttccctcgaaaaacaaaaattatttttagggggtcacaaaaaggaaaagtaacctccggcgcacatgtatgaactggtccttaatttatatgtatttgtctaaaaaaattttttttgatggtggggatgaaaaaaaaacaaaattttttaaatttattaacagaataggaagcaaaaaacataaaataatttttgatgatttttttccaattacagggtaaaaattatgagtaattaaattttagtttgaataaaaagtaattcattaaaaaggatgaggtgcaatggatgacattttctgtaaagaatttattttgtaaaacataaatatgagatgacaattgtagaaggcgtcagg

SEQ ID NO: 22335 - DNA, 1289 bp, Heterodera glycines
tttttcactctgcacagcgcgcaaaagaatcaattaattaattgtttaattaatttgatgataattaactaattaattaattttatggtaattaactaactaggtaataaattaaatggtagaataaagttaattggcccaccttatactcagcgtgtaagcgtttggcctcacaatttgtgcactggtcaagaacacggagtttgaatgcacctaattaaggcatttttaggcttaattagctataaaataaattttttacagcgatttgaaaatcgccacaattattttagttgaaaaattaacagataaaattaggaaaagttaaaaaaagaatttagagaatatttttttcccaattttcaggttttttgaaagattgttataaaaattctttttaaatttaaaatgtacgaaaaatggttatggattattttaaaattgtttgagaattttcatcccaaatgtgccatcgtcgtcaatactaattgctcatgtcccgaaaaacgtgccttcaaaaaggcccacaaccgccgggcatcggttgcacgcaatgcgccatttgggccccgactgagcgtccaacaccaacacgccacggccgccaaagcagcggttcaagcagggcaacactccctgggttctgtcggggacacaaaatttaaaaatgaaataaaaaataaatacaaattaatgaaatgaaatgccatttttaattaataatttgaattttaattatggtaaaaagaaattaattaaagtgcattattttgtaataattaaagaaaaattcataaaaaataaatatattatataggtcatattgtcggttttttggagaaggtgattttttgacgagaatcaagaccaataatacatctagaatgcttaaaaacttgaagactttgtccatccccatctcctcctttgcccggggcttttcatccccggcattgagagacatccccacacccgattattcaaaatttaaataatttaaatttaaattttttccctcctcggcacatcattcactcattgcccgtgccaccacccacttgtacgagttggggcagtccggatgcgggcacaggttgcagctcaactgtttagtgccccgcgtctcctccagcgttgggtggttgaagcagtacgggcagaacgggaacgagctggacagcttgccgcccggcacatggtagtagagcaactcgaactcgtccagcggacacgtgcgctcaaaatgctgccgaatggacgaccctttggaggagggcagggcgtaggtt

SEQ ID NO: 22336 - DNA, 1027 bp, Heterodera glycines
caaaattatttgaacccataagttatcacattattaatgtgctttttcacctaaaaataacatagtctttcactgatcgcattttccattttatgcgaccgaatcgccaaattttttaaaaattttgtgccaaaaattcacatcgcaaatcgggcaatacaatcgttggggccgcgtctcgaccagcttcatgtagcgccggcatttgccacatttgctgaacggtttgcccgagtcggccagcgatgtaaatgaatctaatggggtaaaatggtgaatttaaaaattgtttaatgggcctaattaattggttaatgggcgacattcacctccaaaaagtgcgtcaaccaaatttatgttctgcacaaaattgagaaatttctgccgaaaaatctcaagtgtttggttcttgatctgaaattaaatttagaaaaaataagtacaaatatattttacgcaatttcaatagttaaatattttgagattttttaaattttaaaaatttaattgactaattattttatttattattctgaaagaaaatgccttaactcattaataatacaacattagtcagataattcattagtcaattagtgatttttatccgtcttgaaattggtaattaaattagttatagcgcaattagttagttaattaatgatttgtccaccgtctgatagtccgcttttcccttggcaattaggtccaattggcgctcaacattagcacgcattgttggcaaaatcaagtcggggtccacgcgttggtagccatgcacaagcgcaatgcccaatgttgtgggcatcaatcggcgacgggttggctcaacctgcccaaatttgtgccaaatttaatttaaataaaaaggggcaatttatagtaataaactaatgaccaactcaaatttcggtcaattgatgaaaacttgaacaaatttcttaataaaaattcattaaaaattccaaaatttttcttaaatggcttaaaatcacaaaaattgatcattttagtgaaaatctgttaa

SEQ ID NO: 22337 - DNA, 1697 bp, Heterodera glycines
cagccaagcgaggcggcccgccaccgacacattgccactcagcagccatacacaggctttcacacgtgcagcactgagcggtataccacagctccaacgtatggaagcaccccaaaagcatggctcgtgaggcagctgccccgtaatgttgggcagcgtccacaagtcatctcgaacgacctgtgcccatcagcggacgggggcatttggtggtgccaacgctagcccaacaggacagcaggtaggtggtgaataggaatcacttgggtaatgatccagcagcaggttcacctacagctaccttgttacgacttttgcccggttcaagccactgcgattaaatcggttccagtctgcataccgaccgaagccggaacactaaccgtccccgaatttctcgaaatggctcagtcccgggcagcgacgggcggtgtgtacaaagggcagggacgtattcagagcgagttgatgactcgcccctacaaggaattcctcgttcacggacaataattgcaatgtccgatcccaatcacggcaaattttcaccggtttaccaacccctttcggggaaggacaagcacgctgattttgccagtgtagcgcgcgtgcagccccggacatctaagggcatcacagacctgttattgctcaatttcgtgcggctgaacaccgaaaatccctctaagaagttgtgcccacagaagcaatgagccaactatttagtaggctagagtctcgctcgttatcggaataaaccagacaaatcgctccacgaactaagaacggccatgcaccaccatccaccgaatcatgaaaaagctatcaatctgtcaatccttacggtgtccgggccgggtgagtttccccgtgttgagtcaaattaagccgcaggctccactcctggtggtgcccttccgtcaattcctttaagtttcagctttgcaaccatacttcccccggaaccggaagactttcgtttccgggaagctccccaccagggcgaataaatccgccggcggatcgctagttggcatcgtttacggtcagaactagggcggtatctgatcgccttcgaacctctgactttcgttcttgattaatgaagacattcttgccaaatgctttcgctgtagtccgtcttgctacggtccaagaatttcacctctcacgtagcaatacgaatggccccgtttgtctctgttaaccattatctcggtcagcaaaaccaataaaatcggaccgaaatcctcttctattattccatgcacgaacattcaagcgaaacgcctgtttgaagcactctgatttgttcaaagtaaactcgccagcccaccgacgccgaccggtaaaggccaacgccggggaaagaccggcagaaaagccaaccaaaccagtaacacacaaagtgtgcaccggacggctagcacagatccaactacgagctttttaaccgcagcaataattctatgcattttgagagctggaattaccgcggctgctggcaccagacttgccctctcatagatactcgttaaagggtttaaattgtacccattccgatgaccggcctcataagagatcggtctcgttatttctcgtcactacctcctcgcgttgagagtgggtaatttgcgcgcctgctgccatccttagacgtagtggccatttctcaggccccttctccggagtcgaaccct

SEQ ID NO: 22338 - DNA, 906 bp, Heterodera glycines
atttgatggcttcaagatttgaaattaaaatcttcatttcgatgaattttttttggtcggagatggaacgcttttatagtattctttttaaatttatttttaaaatattatctaattaaatttataatttttcgagaccgaattgaattgtataattaagtttaaatatttattgacactgagactattttcggttcgacctagcaccgtaaggaagatagtaccttttaatagaataattattttgattattctttattttctttataaggcatattaatttgggaaaaatattttttatctattattttagaaaaaagaaatataatggatgcttaattttattggttaattgtaagttagtacatatttttgaatttttacataagtttagttttatttctgatttaattctattcaattccgcagttacctgagccgcgtcgagtctccatcggctcaacctttatttgctacctgatcttcgtttcacctatttcattttgtacattttttacattgatttgaaattatttatcattcaaaatttgaaattatatttaaatttatttattaatttaaaaatatttgtttaaaattttaaagatcatatgcactataaatagtaatttattttatttttttattcaaaagctttttttttaaattgtctaaaagattcaggtacataaatattataaaaattgattctatccatagttctttaattgtttaaatcgtattatcttttagcaatttgcggcttgtaaaatttttttttgttattttatttaaacctttaaatatttaattaataattttgaaaaatttattgcatttatcattttgtttatctcacctatatgacctctcgagtattgggcttaatttaattctaaatttttt

SEQ ID NO: 22339 - DNA, 1163 bp, Heterodera glycines
  unsure (1)..(1163): unsure at all n locations
taaaaaagagatacaanttttggtattccatctttcttttttcattccttcttgcagcgtgaatgtctttccagttccaggcgctgcctttataattataaattttaattaaaattatttgtgtttatgatcattccgtacttactgtatttaatccattttatttttataattttatttatttagtttatcatatgggttcttttagttttaaaattagtttaaaaggcggattcttagtttttctttagataaatgtatattttgataaatagaattttaaatgttttaataatttttatataatatcgtccatgctaattcaaatgctcttttcgctcttccgagaaccttaggtccaatgcaactcatttgtttgacttattttttagtttatttttagctaagccaaaaatatttgatttataaagctttttaattaaaacttgaaagttaattaatttaaattccagttaagacactcgatgggctttgtgtaatcctcaaccggatgcaattatctatcattctaaataatttttaatctcattttcaagtatattgaaataaatcagcaataaataaattattataaaagtgttgtgtatgagataattatttgtcaattaaataaatgttcaatcgactaccttcattttataatagtcgttgtcatttgatttttaaatagtttttttctctgtgttaatcaattaattatttatgtatgatttatgaattaatcacccgtgagagggggcagaattttccgcttgcgccattgcttgagtctgcaacaacatcggaatatgattctatcctaaattttaaacaatattattttaatggttaaaaaaccattctatcctttgtaaatattgaagtaatatataattctaattatttatgtttaataaattttatctttttaattatattttcagatttttatatttataagtttcaacaagtttcattaatacattgaaagtttattatcaattattttaattttatgccttgataagccaactcgagaaactgtcgggtggattattttaacgagtgacgacacttaattcggcgagatccattaattcaaatttttgttgtcaattatcaaaagtatgttataaaagcttgatttttttcatcatttttag

SEQ ID NO: 22340 - DNA, 1848 bp, Heterodera glycines
ccgactgaggccgcgaagcggcctaacaagctaaaaaccgggcgcgaatcgcccgtatgagttcaatggatttaaaaaacgggcgcgaagcgcccgtctgaaccaacaaaatttaaataacgggcgcgaagcgcccgtcttgagcctcgatgtggactaaaaacccctaataattttttttaattttaaaaacaggcgcgaagcgcccgttcgaggccgcgaagcggcctaaagatcgctgataattttttaaaattcccaattttttcacaacccatagcttatctaggtagcgaagctcccaaagcgcgaaacgcttttccacagctaaatagccgacggttcacgcacccgctagtttatatactttagaataacaaggcaactcatttccaaaaacaaaatctccttacggtttgccgggaggggttcgaaatttcgaccttgggggcaacttttgacggcgcattcaggaaaactatagattttccgatccgagggccaactgagcgccaggcgccgaaaagtcactttttaaaaattttttttgccgtttttgggattcaaaaattttttaaaggcctaattgaaaaatcggcctcgtaaaggcactccgttggaccttttagcacattttttgcttcttcaccgaccttgtagggcctaccagtttttctgaaaaactggctaaaaatggcctacttttttgggccatttcagcgccggcggaataactccccggggtttgattggaggaggtcggtgtaagcggcttttttgtacagcttgacgagctctatccaaccatgtttttggatttctgaaattttcagaaattttcgagctaggccccctcgaaaattttccgtttttgaattttatgattttttacagatttttccggggaaaacggagaccactttcaagcaaccgtttttcatgctctatcgattggtgtcattttcagaaaaatttttcaaaaattttttggaaatagaaaatttttggttgctaggcctcaatttcagttctggcgcaataactcgtcaggagttgattttatcaaagaatcgtctaagagcttttttgtagagaattttaagcccaatctaatgtgctttatctcatgtttttaccatgagtttaaaaaaagttataaaattaattgtgattttgaaactcaaaaccataggggggaccccatggttttgcatttcatgaaaaatttttttactcctaaattagctaaaatgcatttttatggcataatttgaggtcctgaatacgtatatatacgctttattttgcgtttcagactttttggaaggtggttaaaattttttgaaaaatcgtcaaaatttgagccccggaaaatcctgtgaaatttcgaaaattcataaatctcttcgtttttggtcaaatttagtggaataaagctttaaaaatagagaaaaattgggagaattttatgagatttatttggaatttctatcttccaaaataaaaaagttattccagaatttctggaaaaattcgatttttcagaaaaaaaatcagaactcccttctgaaaaagtattttataaaaataatatactcaaaaaatccgcaattttttgctctattttataaattttaatttagcttattatcacttttttgaaaaaagttatagaaataaaagtgattttggcattcgggaccaaaggggtgtaaccatgatttttgagtggaaaatttttttcaccaaaaatcttcccgaaatatgattttaggggttatttgggccgctgatcacgaatacgtgatcagattttactttagacatggttaagacctcagaatccct

SEQ ID NO: 22341 - DNA, 1515 bp, Heterodera glycines
gtcaccgcctgtggcgctcgtcagactgcttcctccgccttccgtctcgcctgctccgtcttcgcatgctcccttttgcgaaattttgcttttaaattgttatttcccgtttattatttttcggtactgaaagtccattttcactgggacttagttgtcccagtgctcagatggcgtcggttcgataccttgatttttaacttagctcatcaagagctttcgaatgataccaaatttgtgtgattttaacccttttaaaagcttaggtgcctcccttttcactcaaattttcaagttttaaaccggttcaaaaacggtttaaacgctttgccgcgcagtttttttgatggtttaggcgtttcagcacctaagaaaacctataaaagtatttttatgcaattttgagtctgggacctatgatggatattttaccttttaaattttttagtaaattaaatctcggttttttgttcaagtcagggttcgagtttcgaatttggccaaaatgcatgtcataatcgttttcagcgacctctaaaacccctacaaatatgttttccttgtaatttatgaatttagaatttttgttcgaattcgggttgggattcggaatttaagaaaataaatgtcatattcgtgatcagcgccccaaattaccccagaaatgactttatttgaaaatttaagggggggggggtcacaaaaccgaaaagaaccaattttttttgacgcgttacattttttggcaaattttcaaaaaattttccatataaatttttttgttgactaaaatttttgtaatttactttctttcttgacaaaaatttttgtttttgaaattttcttaattttgaaaaatgcattcaaaatttcgattttaattaattggaactaatcaatgaataaaattagttgccttaattttaaattattttcatataaaaaacaacaatttaaaaaattataccccctaaatttggaactttttcaaccttaatttcgccttcgcccttatttcgcgattttttcgcccttatttacggccttattttggactttatcgcccttaaaaatccgagccctacttctcactctctcttttctctcctcttgtctctttctccctcttcctcgtttcctctctctctctctctttatcactctctctcttctagccaatataatgaagtgaagagaacgccaattaatgctttaaatgaagtgttataattctcaaaggccagcgccaaacacacctttttcgctataatccccgctcgcttctcttggcatgccatttcctcgggcgacaaacattccgtttttgacaacaattttaatttaatggaactcgaattttagaaaatgctattgcttaggcagtgagagagggaaacagagagtttttggagagagagagagagagagagagaaagcgaattagagagagggagggggagagagaaagaaggaattagggaggggttgggaagggggagaggaagtagagatggg

SEQ ID NO: 22342 - DNA, 1683 bp, Heterodera glycines
gggaagggtgagggagccacgcatggttgcggtacacgcatcgattatgaaagccgcgcatgcactagcaacgaagtcctttgcgcgaagcgctcatgtcagcgcccgcctatatataatgaatgcgtactcgcgatgcctgtagaccaaaatcccttatcacatccataaattcatttcaaaatcgcgcatgcaccaaagtttgaaacgggcgcgaagcgcccgtcatgaggccgcgaagcggccgaatgtccccaaaaaattaaaaaacgggcgcgaagcgcccgtcctgaggccgcgaagcggccgaatatcccccaaaaaaattaaaaaacgggcgcgaagcgcccgtcatgaggccgcgaagcggccgaatgtccccaaaaaattaaaaaacgggcgcgaagcggccgaatatcccccaaaaaaattaaaaaacgggcgcgaagcgcccgtcatgaggccgcgaagcggccgaatgtccccaaaaaattaaaaaacgcccgatcatgaggccgcgaagcggccgaatatcccccaaaaaaattaaaaaacgggcgcgaagcgcccttcatgaggacgcgaagcgtccgaatgtccccaaaaaattaaaaaacagaccgtaaagcgcccgtcctgaggccggctacctccgaatttgtcgctgatctgtcattatgcattggctgatgcgaattgatgaggaagaagacattcccacactgtcatgtctctcatcacaagtgcactccaaagtgtcatggtcaatgccgagcaaatgggccacggaatgggccaaggaaattgcatttgcatggggaccgaatgggtcggacacctaaaaaacaaaagtccgaaaaggaactcggagtgtactagttctcgtagaaaatgtaaaaaatgtatatttattttgtaaaaaagttatttctaaaattttgaaaatcatgaaagtgtttctttaaccaaactgctctagagatttgaattggttgaaccaaaaattgggttaaatctactttaaagtttaagattatgccaatgccgcgccctttctgaaattgtccaaggaacacaaatttaaaaattaattttggtgccactgtattttgctgctggcaatctgcccacaattctttctaatctttccccaacatccatctcaaatagcaaatgctcatcagtcttcgcccgccagtctctcgcaacactcaaaatgcgataacatcgccgcgtccgtcgttccttccccgtcgcccatcaatcacttttcattccctctcaattcaaagaatttcgattgttggccaaatagcaaatcacattggcactggccattttccgccccacctgaacaactccgaccgcccttgaggtgcaaatgctggcgaatgaagcggccattttgtcgcctccggacattttttggcccgtcaacagaacagtcgcgtccttttcgatgtcgtaaatgttccccgtcgcgtagtccaacgcattgcccaacacccgctgaacatccatcgcatttgcagattcaattcgctgtttgtccgcccaaaattcggcaaaagttacgctcagacaaacacccaaatccctccgtaacaacttaattaatgaatgaacaaatgcggcattttataacgggggaattctgtaccaaatccgccaaatgaccacgtt

SEQ ID NO: 22343 - DNA, 2275 bp, Heterodera glycines
aaaagtttagtagaattttggagacccgtgaaaattttttagggattttaagggatttcttaaataaaaataagcaaatgacaatattttttaatttaaaattcaaaatcttaatttaaaaaatagagatttttcgaaaaaagacggatcccgaggttgggatcctgaatttaatcccgcgagatcccgaagaaatcccgcgggatctcgaaagtatattatatcccggtcaaaaaaaaatatttaaatatacaatttaatattaaaaatattaaatttcgttgcacttataaatttaataatataaatagaacttttttcatttcttattcctttcataattcagcatcattggctcattcgtcttcagtcaggatagcatccaaaaccaagaatcatggcttaaatgaataaatttagcaattatttcattaaaaaaatttcaactaatctattagcagcaccggactcaaatggacttaaaattatcaattttagagaaagatttttgccaaattgtacatttaagaaattgactgatttaaaaaaacggcacaaaaattttggcacggatactgaactgacacacccgctcactaatcataaaacatctgtataaacgctttaattcccaccattagcggaagccactgattgagcatcatcatttcgtttgccaaatcagcatcccgagcaccgaaaaggcattattatcattttaaattaattattatgttgaggcaaaaaaaaaatcatagttggactgtggcaaaaactccgtcctctgtttggtcgggagtttctcccgttccactggcgccgcctcactcctcaaattgccgtgccgattcgcgatgccgttggggtccctttcccaaggggagtgaggcggagggatcggggaggcaaacaaagatttgtgagggagaaattgactccctaatgaaaatgctggcagcaaacggcgcaggcgagggagacgagagatgtgaataaaggtacatccgacttagactgaatcaaaaaaagcagataacataactgagtctgttccataaccctctacaacaaaattaactaaaaacatttgtattttttttaaggaaaacctgaaaattttggctgattttcgtaacaaatgcattaaaatttcttaaaattttgccccgttggcgcctacgggatttctacagatttcgattttttgttgacgaatttttttttcataactttttaattttccatttggcgcgattcttaaaattcatgatcataaatccattaaaatgcatgtgatattggtcgtgttctgttgctgtttccgcgagtgttggaattggcattttttgtgccgacaaagctggcattgttctttcctctcagttggaccccgcgcattgacgacattggcataatattgagaatttgcgcttgttgtggatgacaatgatttgtacacttgtacaaaacaattttggcatatcgcacaaaatccgttcgaatggttttgttcagtgccaaataaatcatcggcggaattcctttaaattaaaaaacaaatctcatttttcgagagtttgggcacttcctgtgaacctaagagctgaaattttaactagacatatcatttttgaaagaaatagatttttaatgatttggtgctttataatggcaagcttcattaaaaaaaaattttttttaaatcatagtttttctaaatttcccggttttcagtgtatttttttgaggtttatatccttccgagaaaggaactattttaaatttaccctacttttggaaaaaattttgttgacaacattttgcttttcaactcttaatattttcgaaactgctatgaaatttaaatttcaactcgttcggttcaccaaaaatggtcaaaatctcgtaaaaatggggtaaaataaatttatctatcgctgagctctgaaaaatttgattaaaatgaataaaaacttcaaatgcaaataaattgtaacaaagaatactgtaaatctctttagaacagattagtgcttaaaaacttatatgatcacactaccgtatatcacatctgaaaaaatcctatacgtatttttcactgacgcatatttgcggtaaaaatggtcattaccaatttacttttgcccttcactcataagcaaccaaattacggcgaaccgaaaatagtctcagtgtcaataaaatatttaaatttaattattttaaagcaattttttttaattgaatattaaataatattaaaaattttaaaata

SEQ ID NO: 22344 - DNA, 1351 bp, Heterodera glycines
tagaaaaaattgaaaattttgaaatcatgtttccccccccctttcccaggggtattattttgtaaagtctttttttcctaaataaacttgtcaaaccccatttttcgcaccgtgaatgttatttttattgaattctgaaccgttttgagtagattagactagaaaaaattgaaaattttgaaatcatgtttcccactcccttctcccaggtgtattattttgtaaagtctttttttccccaataaacttgtcaaaccccatttttcgcaccgtgaatgttatttttattgaattctgaaaggccgcgaagcagccgagtgagtaccttcggtgcaggaaaattattaaggaagagagttcattatttatttattttttgcataattaattcataaatattttttcagaaagtgctctgaaacgcaccaaattttatgtacaagttgaataaggctctctgatgcttttactatcaaaaagggagatgaataaaatttttaattgctttttaaacatgccaaaaagtttaggcttaaattaaaaaaattttcttcggttctagctctttcaataagcaataaaatcgtaccaaattttataggcatactccccggtacaggactaacttaacctgaaaaaatgacaattgtaattggttttaaatttttttagaaattctgagtttttcactgtttattattttttgcaaaattaattcataaatattttttcagaaagtgctctgaaacgcatcaaattttatgtacaagttaaataaggctctctgatgcttttactatcaaaaagggagatgaataaaatttttaattgctttttaaacatgccaaaaagtttaggcttaaattaaaaagattttcttcggttctagctctttcaataagcaataaaatcgtaccaaattttataggcatactccccggtacaggactaacttaacctgaaaaaatgacaattgtaattggttttaaatttttttagaaattctgagtttttaactgtttatttattttttgaaaaattaattcataaatattttttcagaaagtgctctgaaacgcaccaaattttatgtactagttaaattaggctctctgatgcttttactatcaaaaagggagatgaataaaatttttaattgctttttaaacatgtcaaaaagtttaggcttaaattaaaaaaattttcttcggctctagctctttcaataagcaataaaatcgtaccaaattttataggcatactccccggtacaggactaacttaacctgaaaaaatgacaattgtaattggttttaaatttttttagaaattctgagtttttcactgttta

SEQ ID NO: 22345 - DNA, 1041 bp, Heterodera glycines
gttgcgttgttgcgcaggcacaaccggttacaccttgggtacggttaaacaaacattccatttatttttaataatttttaatcaatgtaatcacaaataatctccataatcgagtggttcgggtaatcgtcagcgagtacctcgagttactcatcacccggaagagatttttgaacttcttttttgcagctaaaattaaatgatagtaatgtgttttgtctggtcggcaaaatttttaaaacgtttcaaggcgcgttttggagtgctgaataagaagtaggctatgtttttcatgacaattccgagctccgcatctgaacatattttcaaaaaaagtattcttaccacaatcatgaaagtctagtttgaatcgttttcagggtagctgatcattaactcggccaatttaagaaaattctcacatttaggggcattctttccaatttttttgcaagtattttggcatttttatgcattttagcaaattcttgtgcctaattatcaactatttaggtatatatattagtcgatttatagcacataacaatccatccctatcattggaatatgtctctttaggaaattaaaattccccccccccctcccctcagtgttttattaattcgatattttaattaccatcgtttcccccaactgcattagtcgcacttttacagctctcttgaaagcggattcgagaaggcaggcgtcttcaagtgctgggagctcatccaattttgaaaaatactgcaacagaaaaaattacatatttaaaaaaattacacacccccccctataattatttgttcgttcaaaattccaatataattttttcataatgatcaaaaataaactaaccttaatactaccttgtaaatcaaaatgttgagtggaggggaggggaggggaagaaaaagagcaaaatgttgaggggggggggaagaaaaagagcaaaatgttgaggggggggggggtgaagaaaaagattaaaattttgagggggggggggagaaaaatagcaaaatgttgaggggagggggg

SEQ ID NO: 22346 - DNA, 2401 bp, Heterodera glycines
  unsure (1)..(2401): unsure at all n locations
aattttatgataaattactaatttttcaaaaaaaaaatttttcttataaacttttttttaatttcggctcgataattctcatatctccgaatttaccggccctccaacattttttttatgattatgagttggatccattaataatacaatgtacaattgcactttcgctactctgtccattttgttgtcccattgtcagtgacgtcgtgtccagttggtcgtcgggcaccggcggtgccggcattttcggcgcgttggcatttgccgtgctcaccgaccgtcggctgttggcgctgcagccgcagaacgcactgctcgccatgctcgtggtcccgctgctactcatgtggaccttttggcgcctgctccactttccgtccagcgcgtacagcgggtaaaattcagttttatgggggaggaggaaacgaaaaatgtacaatttttgtaacattcctttaaatatttcaaaaaattttccggcttggactttattaattgttgcaattctcaagattatcccaaactcaaaaactctctaataattttacacttttaaaagggaagcaaattaaaatgaaattaaggcgcatattattgcaagaaatgcacgcccaaattatttcggaggaataaatgccacatttcgagataacaatagattttttcaaatgcgcctattcattaatttatgcaatggaaacgaatggtttttttacaattttatgcgccctctgttcatttttcaaaattcaaatcctggtccccaaacagaaaagtacccaaagtttgtcagcaggaaagaaaattggactattcgaaggtttgatttacgggtacaccccaaaatctcgccgcccgccgtagaaattttttaaaaaaattcaagtttagaaattttcaagaaaaaaaatcttattagaaaattttttataagaaaatttcaagaaaaaaatttttgaagtttttttttgaaaaaaactacctaaattatcataaaattagaaagaaaatcgctgaaaattttcaaaaatttttttcttgaaaaagttctgccattgttttccagttcagtgtctccgccgtattccaacacgggcacagtcgtcgtccctactaatgccaacagcaggagggacccaatcgtcgccaatcgcagtgccgccaacactgtccaccattccttgccctcctctctgttgccgttttccaccgctgtcgccaccgacgcattcgacgattatggcacagcaaatgccgacgccatcactgaaccgttgctgaacaccaccaccaccaccaacaatagcagcagtggcaacgcattgacaacaaccactgtcattctgccggcctcccaaattttttgttggaacggcggccgacggacggcgtacaaaattcgagtgggttgttattattatccggtaaagggaaactgacaatgagctatttaaaaaaaatacccaatttttcttaacaaaatgccttaaaaattaaaatttctctcggcggcgcctgtcgacaccgccggacccccattttaccttattttttttaattttaactcaaaaaattgcaaaaattatgccttttttggccaaaggcggctgcatattgctattttttgctctccggcgtcgaccagttttgaataactttttggcccgaagagcaaaaaaaacataaacttttcggctgcccctcccgaaaaatttttttctggttacgggcctggggcgacctctcctgcctcgaaaatacacatctcagggttttcagcgactccgattttcccccctttggaaatgcgtttatttaatgcaatttttgcgttagccgctgctcaagtacatggtgccgttgtgcgtcgtctacttctccgagtacttcatcaaccagggcctgctcgaactgttggtgttcgactgtgcccattcgtttgcactgtcgcccaccagtcagtaccggtggttccaagtgctttaccaggcgagtcggaccgggaatataagggttgaatatgccaatggcggtagaataaccgtcggaaaatttaaaagttttttgacgtgattcaatagaattagccccaaaacattgcaacctaaatttatataacaattgaaaatttaataaaattgctaaccgaaagtgccgaatatgaggcgaagtggcaaatttacattttaaagagctactagtctactatgttgaacaaaaggccattaaaaaaaatttccgggaagggagccccgacttttgcgcctatgtcaaaaatcggcttctaagttaagttttttcaagatctgttagcctaaacagcattaaaattaagaattatagtcttctagtttactaaagaggactaanttatgtagtttgaataattaatgattttttc

SEQ ID NO: 22347 - DNA, 1260 bp, Heterodera glycines
attttagaacaattttataatctataaatatgaattcatcataatgaaaaacaatcaaatagttgatttatattctgattaaatttatcttatttaacaagagctaattcatttttatataaaaaatagcgcatatgacaataaataaactaataaattctgataaaatgttgtatataaatgcaaaatcatagaaaagcaatgccgaggcaatagcaatgatttatttaaaaaataataaaaaaaacagagtaactaaagagcaatttgaaaaaattaaatcttcaaaatataaaaaattagctaaaatttgtttaaaaattcattccagcgcgaactcatctcaatattcagtggatttaatgagattaaatccttttttatattttattttctaattttctatttcccaaatttaacggcaccgctgtaccattctaaattggttgtgatttattctaaaaacgtgttctatattcttcactccacttaaagttataagtgcaaaaatccaatagtctgtgtttttcctagctccagttattgtatctgcgcgcatgcttcatctacaaggtcaagattttctacatccggtccaatttgatgcggaaagaatcgctggtatatgttatcatcactctcatcatcatatacattaaaatcgacatcaattgcttttatctcatttcttacactttttataatattataaatagtcccactttcctcgtttgggtttggtgagtataactcagaattcgaagaactaaaatattcaagcttttccacttttggtactgaaattgtactgcctaagcgtgaatactcattcagttttacatttgggtaaaccaatgcaaaatatggccatttgtcctccttacccagccgaacagccattgcacactcacccattctctggaaaataatcatccttagctgatcatcactatttttatcccttttttgtcttttttgatattcatcgctttctggtttaacccttgcccaggcaagagtatcagtacatcttaaacctattccagaactagaaggacagtccatattattaatcggttctgttggattcttttcatcacttttttcagtatctctcagttcaagtattttctcattaccacgttttattgccaaagctgccattgtttttataataatttctctacaatgatttatttctgcaattcttttcatttccttttcattagcactttggcttgccgaagcaatattttgatt

SEQ ID NO: 22348 - DNA, 1178 bp, Heterodera glycines
tgctaaagccattataatagtaaaaaaattcactcactgtcgtaatgtccactgtccaattttccggttctgtccaaataacttcactgtcgaaatgtccgggagccttaatattttagcaaaaagaatcaactaatggaagaaaaatcagcataaataaagaaaatgaaaaagaaaaaatgataataaagaaaaaaatgcaaaacaacattaaaaattaaattattcaaaatggaacaattaaaaatattatcttaaattataatgaataaatcagctattattaaattctaaataaatttttaaaaacaattgatcgaaaaaagtaaaatatcaataaaatttagatacaaattatttatataattaatttggtaggacgaagaaaaaaagttcattcattaatctatgttaaaaatgaataaataaaaagaccataaaaacaataaaaaaataaatatattaattctttaaaatattcaaacaattacagaaaaaaacagaaaacaaaatgcacaaaatactgtttatatttatatatatataatccaaaaatatatttaacaaataaaaaacacatattaaagtggcaggaaaagtaaacgctatttaaatatgaatattttaataaagtgaaattaagtatttatgaaattttaaacaaattcttaaaatgaagtaaaatgtaaatcatataaacgaaaagaattcaaataacaattcgttattcaataaggggccataaaatattattaattttttattgaataaatgttaatatttaactccaaataaatataaaaaaccaaattgaccagtataaattagtgaacaaaataaaaatttaaaataatttacaactgtctataatattcataaaaagtgtttggaaaattaacaaaaaaaaaaaagatttaaaacctaaaagaagtcagaaaagcaaaaaatattataatttacgggtaaaagcagtaaaataatcgaacttgagtctgaaacaaaccgaataaatcaggatgaaacttgatagaaaaatattcaatttttgtttgacaaaattaacattattttaaaatattaaaatcaatctaattacaactatttgtcttaaattctttaattttgatggaatttttaattgtctttgcttttttgaaaatgagtaaaatttttaagag

SEQ ID NO: 22349 - DNA, 1972 bp, Heterodera glycines
  unsure (1)..(1972): unsure at all n locations
atttgtagggttctcagcagtttccctgcaaaatntgatgagcttctgatcagtctagaacgttgggtgataaaatgaaaaaaataattaaaaaaaaataatgctggtgtgctaagtgtgaagaactgtgttcttccaggcaaaaaattctaagaaaatttataagcatttgtagggttctcagcagtttccctgcaaaatttggtgagcttccgatcagtctagaatgttgggtgatcaaatgaaaaaaataattttcgaaaaataatacttgtgtggtattaattcataaatatttttttcagaaaatgctctgaaacgcaccaaattttatttacatgttagtttaggcactctgatgctttttctatcaaaaagggagatgaataaaatttttaaaaatttttaattcctttttaaacaggccaaaaagtttaggcttaacttttttttcagaaactgatcagaagcgcaccaaactttaaacatttttctttgttgaaaaaccttttattttaaaaaaactagcaatttaatttttatgaaaatcaattattgtgattttttgaaaatctcaacattgatgggctaaaaccattccatccagttaattttttgtgaaattaaaaaattctcacaggcaattgccgtttggccggttaaatctttaaaatttatctatctctgatgaactgaatagaacaaggaaaaatttttagatgtaatatatgaaaaattatggcaaagtgtatactaagtgaatagttatactaacccaaatctgaggttggttaggaataagtttcgtacactttggcacgcataagctcctaaatagaatttaagaagtctttacgcttgactgaaacttaaatgtatacttaaaattattttataaatattattgaagtcaattgtaaagatttctgtccttatccccatttgagactcacatttatttgtttcaaaatcttatcggtctgctttgcgaccatgatgagatttttgcacgtgccggtctgcttagcgaccatggcaacatatcggtcagcttagcgaccatgatatgtagtgcaaacgccggtctgctttgcgaccatggcgaggctggtctgctttgcgaccatagccagtagtgtcggtctgctttgcgaccatgacacaatgccggtcagctttgcgaccatggcaacatatcaatctgctttaagactggtatagaaatcaagctcagacttgcactcgcctttgcgatgcatgtggctgggctgcccaatgggagcgcctttttctggccttgtatcccagctgaatgtttgcaaaaaggattgttctttgattacttagcaatgctaattgttcgaaggtcacattttgtaaacaggaggttggctacggtgggattgtcctctgttcatcagcaacgcgtctgttgttcggagttccctgcccctggccatttagggattggcgcgaacaaagggcaataaaattggttcgctgacagctccttcggagcattgtcgcaccaatgtggttcgctgacaggcccttcggggcatttgtcgcaccaatgtggttcgctgacagtcccttcggggcattgtcgcaccaatgtggttcgctgacagtcccttcggggaattgtcgcaccaatgcggttcgccgacaggtccttctgggcatatgtcgcaccaatgtgcttcgctgacatgccctttggggcatatgtcgcacctacatggttcgctgactggccttcgaggctgtgtcgcactttctgcactcttgaatgtgatatgtgatccgatccatggctgatgtattcagcggaacgactacacaccatgacgaataatgatgtcagattgaatctatttgccactctgaataaatgcttgattaacacgtgcatttatgcttcagtgtgcctcatatgtatgccatcttatattgtaaaagtcattttgtt

SEQ ID NO: 22350 - DNA, 1923 bp, Heterodera glycines
tgatgtttgatccgacccagcgattattacacaacagtcgaccggtttctggaaatgtgtaagcagcttaaaatttggcacagttttcccattttgtagtaattgttcaaatgaatgtgtaaaatgattagggaaaggattatcgatgtttactaagcacaaaaattgcattttctattaaataattttctctttaaacagcaatgacatgttggcatatgaaaacaactatttttggcattttagcgctttaaattttcgtatttgatggatttgtgcatgtttttcggggtgtcattttttgcgtggcattttactgcatgtttacatcgcgataattaattaattaattgggtaattcattaaaactcctttttgggtgtcattttgcgtgccattttaccgcattttttggcactttcttagtccgattttacgcttttagtgcgcgcctctgaaatccaaactctaagtattgcaatatgtaaaaataacaataataacacgcaagtcattaattaattaggtaatcgattaagcatttttttgggggggggtttaatttttgcgttgagttttacggcatttttggcactttcttaacaccgcggtttttaagcttttagcgcgcgcctcaaataaatatggcaatatttaatagtgtatcacgcaaattacgaactcattaggtaattaattaattaggtaattattggactgttgcctcacaatttggctgatgtccgtctcgcgttcgatggcgattttcggcggcggacctttctcgtcctcggagtcggagctgaccgcgtacggatcctcgtcctgtgacatttctgcttctgatggcgcaaaagccgctttttgtcgatcaacaaaatcttaaaatacgcaaaaaaattgttttagtcatggcaaaaattttgtgaaattttgttaaagttttgaattggttaattcggaattttggtaaaatgaatatcatttaattgtatttaaaaataaaattgttttttttagaatcaaatatccaaaaaaagcaattaaaataaattgttcatcaaatgacaaaatgtccattaaaatataaaactaaaaaacatctctcctctgccaaaattttcaacaaaaattttattcatttcattttcgttaaatttttaaattttttcaaaatgaaattttggcctagacatagttaaaatatttaaatttttgtcgatgcttttcctatggttttcctttaaaaataagacaatttttcaaaatttcaaacaaatttttaaatgaaaaaatttttcaccgaacccccatatggttggctgaactaagcataaatcgactgactaaaaaaatgaaaaaaaaatatttaaaacaaaaggggtttcaaaatctgagattgagatgcttgtgccaaatgaatgaaaactgatgggagcgaaaattaaatgtgaatgtgtggcggtggaggcggtggcggcaaatgagtgaaaagtgagagccaaacggacgcaccggcggcggcgacgacgacggcggaaggccaaacgatcggcgaatggcggtgcatcatgcgtcagtcagccggcggctgcttggaaagaagcggattggagcggatatcggcggatcaaggggaagaagaagaagccgagagaaatgagggatgggtggaagccttggctgggagagaggaggaaaagcggcggcggcggcacacaaaagctgtcaaatgggaggatgggagggggtaaagcacacggtttgtcaagagcgaaaatttggccaaatgtttcttaggggggctgtttgggctgagaggggaagctataaaaagggggagaagcatgggatgggatgagagataagggatatcttccttctctgttgcccagccccgggtggataatggggggggggggg

SEQ ID NO: 22351 - DNA, 1446 bp, Heterodera glycines
  unsure (1)..(1446): unsure at all n locations
tgtcaatgggagcaatgttttcggcatgtagtgctggaatttcagaattctcgaaaactgacatctttgtgagaactgaaagcggtacggaagaattacaaaataagtccccatttgggcttaaaatgccgacaaatgtcaattggagcaatgttttcggcatgtagtgctggaatttctgaattctcgaaaactgacatcttagtgagaactgaaaacggtacggaagaattacaaaataagtccccatttgggcttaaaaggccgacaaatgtcaattggagcaatgttttcggcatgtagtgctggaatttctgaattctcgaaaactgacatcttagtgagaactgaaaacggtacggaagaattacaaaataagtccccatttgggtttaaaatgccgacaaatgtcaattggagcaatgttttcggcatgtagtgctggaatttctgaattctcgaaaactgacatcttagtgagaactgaaaacggtacggaagaattacaaaataagtccccatttgggtttaaaatgccgacaaatgtcaattggagcaatgttttcggcatgtagtgctggaatttcagaattctcgaaaactgacatcttagtgagaactgaaaacggtacagaagaattacaaaataagtccccatttgggcttaaaaggccgacaaatgtcaattggagcaatgttttcggcatgtagtgctggaatttcagaattctcgaaaactgacatcttagggcaaatttcatatttttattttaaaaattttacaaaaatttatgggacaattataaattaaaagatgtattatttttattttccaattatcttttgattaagctgctattcattattttttgcaatattcactttctgaaatttatttcaacaattttaagttcaaaattagactttttcgctatttgcgttttctattactcaaatcataataatttttcttaccgtatggctaaatttcgcaaaaccccttggtaccgtatgggcaaatttcatattattatttaaaaaattttacaaaaatttatgggacaattataaattaaaagatgtattatttttattttccaattatcttttgattaagctgctattcattattttttgcaggattcactttctgaaatttatttcatcaattttaagttcaaaattacacttttttcgctattggcgttttctattactcaaatcataataatttttcttaccgtatggctaaatttcgcaaaaccccttggtaccgtatgggcaaatttcatattattattttaaaaaacaaaaatttatgggacaattctaaattanaagatgtattatttttattttccaattagcttttgattaagctgctattcattattttttgcaagattcactttctgnaaattatttncacaattttaagtcaaaatt

SEQ ID NO: 22352 - DNA, 1731 bp, Heterodera glycines
  unsure (1)..(1731): unsure at all n locations
ttatttgtagggacgtgaattttagtgacgaaaaatcccgaaatagttaactaaaatagatagtaaaatgccaaaatagtgacaaaaagtccgaaatagtgataaatagtagagtagagcgggaccgggaattttgggcaaaaccgggaccgggaccttttcgggttgaaaacccgggaatttttggctgggaaaaccgggaaaaaatcgggactagtcccggtcaaaaccgggacctcggtactcagttgtactcagttgtctgtgttttggtcccggtcccgctctactctaacaaatagtgacataattttcagccaaaaattgagcaaaaataatttttattcactgattgcagttgcaaatgaataggactgggatttttaagaccaaaaaacccaaaatagttacctaaaaaaattttttaaattaaaaatttttgccaagaaagtaaatttttgagaaaattttttttcatttcataggagtatattttgaaaaattttagctcgattcttaggggtgtatttgtttgaaatttttttaagtcgattcttaggggtgtattttttggttttattgcatttttgttaaggaattttccaaaaaaaatcgaaatagtgaaaaatagtgacgatacgccaaaatagtgatttttaactattttagtgacggagtcgtaaaataatgatttctagtgactgataatgacgtccctacttatgaaccataaaatgtctaaattttcatttaaaaaagcgaaatttaaatcatgtccaccattgtggagcatattcattatgtgcctgattttgtgactgaagaggaggagcgtcagctgttggagcgtgtgtatggcgtgccgaaaccgaaatggcgcgaattggcacggcgtcgactccaaaattggggcggcactttggttggcggtggcggcactgttgggacggaggaggaagacggcaacaagcaccagtacctgttgcaagacgaacagttgccggaggtgcgaactcggcacaatggccaaaatctggggcacccaaaatctctctgccgaaatttaaaaaaaaaataaattcaaacttggatatttttcaaaaaacctgaaaatttttttgaaaattttctaaattaaatttttttttttaattttgggaggcgaattgtcacgttcccaaaatctgttaaaaaatcaccaaaatttcaaattttctgatttgctgcataaatatggaaatctgaattttttaattttcgacattggttcaagtcagggttcggggttcgacagagccttaatcatcaaatatgtaaaatttaaaaataatttatttaaaaataattttctttcagtggttggagcattgcattgataaaatcatggcgttcaattcgggctccccaatgacaacatttgctacagaacacaggcccaaccatgtgctggtcaacgaatatttacctggacaaggcattatggcgagttttattcttgccaaaaatataaatttattaatataatttttcaattatttttaaaattaaattagtaaaaaaaattttccattatttttaatattaattaattaataaattttattattattattttcagcctcacacggatggaccagcattttacccactgatctccacaatttcacttggctctcacacagttttggactgttacgaccanagtaagtcatgtctagggctccanatttt

SEQ ID NO: 22353 - DNA, 1938 bp, Heterodera glycines
  unsure (1)..(1938): unsure at all n locations
cattttttgggccaaaaatttgttaaacaaatcaaaattaaaaaatgcaaaaaaatttttcccgggtgccccttttcggccccccccgggaccccccctttccccaaaaagttttttgggaaaaccgccgcaaaaaaaaaggttgtcgcccgaggggaggtaccccccccccaagccgaaatcctgggaccgtccctgcataattcataccaaaaaatggaaaatcatagaaaattaaattttagcttttgcactaaatattgaaaaaggctgaaaacttgggaagaatgcctattaaaatgtggaaaatttgtagtcaaaaatgaacgaaaaaccaaaacatagcaaaataatttattcattgaattttgaaganaattgaaantagacaagaaaaatttaagggaaagatttgttttttttattcagaaaaggtaccttttatttttaattttatttttttgcatccatttgacaaagtccaaaacccggcccgaattcgaatgtaagagacggattttgagtacttgggctttttgctagaattcctcccccgtcctttcccgcatcggagtccgattaaggacataaaatgcgaggggtacgccgaaagggactttgccatgttgcctttcccacctgatcagattggccactcggacagcgttcagcaagtctttctgctgcacaaagtgtcggcagcgggccaacaactcgtagggctcgtatctgctcaggtcgagccgatcgtcggcggagtacgcgccgggcagctcaaaggtcaccagcgactggagccaggaggcgacgtagcgcaacagagtgccgccctcgtcgccaatctgtgccgtgcgtcgggccaatttgtgcacctggcaaatttcaggggcttaacgaaaacaaacaacaaaaaggcattccgaaatgtgttagaaaattagtaaattttcaaaaatttcgcattttttgtatttttaaaaaattgtgagggcggaaacgacggggtgtaattaactcaccgatttttaaaaaaaattttgtgcaatattgtaaggtcgggattcagttttagactatggagggggtaattattggagaggagaggcctcctatttataattgtaatggctttctggggcgaccacttataagcgatggcatttccctccattgggaccaagccgggtcaaatgccgaaaccagcacagtttttaattattttttgatgcagaaattcggtgaaaattttggggcagcgaaactcaagtgttttttgactcgaatgtcgccccttctttgaatgcccctggtagaccctgtcgaagcgtttgatcaatccctgctccgtcggcacgccccgttcaatggcacccgaggggaaatgggcgcagacggactgagcaaaggagtcatgttcagtgagctgtttgagaagagcaatctgaaaaggaagtctcgttcgttagcacagcgcaaaataaaatccaaaattaaactgatgaggccaattttcaaatgttcaacccaattttgtggaaatttttcttaatttatgtccgtctctggctatgatgagcttgggtcaaaaagtgtgggaatttttttggcatttttgttgaaatttaactcaaaattgcactgaagaggggaaattaaatgctacacaccctttctaaaatgtacaataaacagcatcgaccgacctctttcaatggcgttttgtacggcgttttttgactctgtgcgccgccgccactgaccaaagcgtccgtcagcgattggcaaattgtccaatagattttggcccttctgttttccaaatcctgtgatggcaaatgtttggaaataatactaataataancccgacgtgccagggggtatttccnacaaaaaaacaaataaattttagaattaaaatcaatattaaaaaaatataa

SEQ ID NO: 22354 - DNA, 1253 bp, Heterodera glycines
  unsure (1)..(1253): unsure at all n locations
ggcttgtcccttccatgtctccgttgttacgggaccaatagggaaatgcgtgtcccaatattctccggacggtacacgccacatgagaagttcaactgcccctggtagacgaatccaatcatcttttccgattgtgaattgttcgacttttagagagtccccccatgacgtgacaagcctttccccgtccagaattcctccggttccttcttctatgactgtttggacgttgtcctgacaattaacaccgtaccatccgtactcttttctgattggtttgaaactttcccaacgtgtttcacttattcggttcatcggacggaggctcagtgagtcttggcagtcttccagcgacgcttccttctcgaacttcttgggcaggtgatcaagagtgaccacgcgtaaaaatgattctgtgcacgtcaccgtcgttatgttccagcatttgaaaaccggaaacgatcgtgggatccgtattggtatgtagagaattgatttgttcatgattggctgggtctcggtcgggagagtacagtctcgttcttctgggaagctcatggtcacagaagttgcctctgaagggcttattgggcaaatttggtactgcgccgtcgtcggtgaaatgcatgccataatggctgccgccagagttaaaagacagataaatgggaagttcacttcgtttacacgccaagtgcctctgcctctgccggagttatcgccactcatactcatcccgcggtgctgatctacccccggtcggcctctttgtggccagttttggttttgttgcaaatatggccgggcattgaagttgttttgttgaaatcggttgccaagtggtgtttgatttgcatttcgtgaattaaaattttcgcggtaactctggaatcctcgcgttcttcctctgaatcccctgttattccctctttgtacgaaagtgttcagcatttgttgaccaaaacgttacggtggcattccctcagttcgttgaacaagatttatcctcctatcttcttgtgttttttgttgctcccgcaattcatttaattcggttcgaacagcgttaatttcagctagcgcaacttccgcttttgttccttgcgtttgtttccaaatgtcttctgccagtgctccttgcatttgttggaccctttttgcctgtgtgattgcttcctanatgtctgaggttcatccatgaagagaattttttcttttattgacgccgtcatgtttgcgcggaaaaagtcctt

SEQ ID NO: 22355 - DNA, 813 bp, Heterodera glycines
aattgatttagacaaattgttagtgaattgtgattactgacgaatggtgaatattggtgattgttagtgaaaattggcgaagtcaaatgatttgcattagtcaattgttgtgaatttaaatagagatcggcgaagtcaactgtcgttcatcggccaatttttgaggaattaattagaaattgaaaaagtcaaatgatgttcattggctaattgtagcaattaattagaaattggagaagtcaaatgatcatcagccaattgttgcgttgtttcatcaatgtctttctcatccgttcgctttgtcctgttctcgtgatttccctgtgctttccatttgctgttgagcaatcacccgacctctttctttctcctctttgtatcaattaagctccccaattaatgtccctttttttaagtggactttggatccactgacttttgtccccggggctaaaaatgtaatgtcttgtgccttttccccatttcgatcccctgactaaataacttcgggtaaaaaggagatgaaaatttcagaggaaatgcaaattcaaatgctatattggcacagagattaattttttatgtggattaaattaatgaaaaggtgtgccaaaaataaacggatatgaatatggggggggggggggggtggtgggaaaacggtgcaacggaaattaaatggaaaatgcaaatgacaaatttaaatttatgaaattatcgcaaatgtatgtcataaataaatcgaatggatcaaatgaaaatttatgaaatgaatggaaaaaaatacgacaaaaagcaaatgggaaatgggaa

SEQ ID NO: 22356 - DNA, 2126 bp, Heterodera glycines
  unsure (1)..(2126): unsure at all n locations
ttttgactacttatttccagacgcttaattattattattatttttttgtttttgtcacgccaaaacgcagcaatttggtgaaccgttcgacagaaaaggcataagcaaatgacagaatataaggtcggttctatgtatgcaatctgtgggcncaaaccctcagtcaaaataggaaatttctctgatttttcgtttttttacgggtataaaaacaaaccaagaaattattattttctgatttttgtaaagtttttgaggccatttaatagacaaaccattgtcaattccgactctaaaacttggacaaaaacattttcaaatggctcaaccaaatcgaaaatttccgtttttttcatcaaaattgaggaaaatttgttcctattttcttctttttacataatttggcttaatttagtcccaaaattcacatgaaaatcttgttgatttgatcaatttttccccatttttcagttggtcgtcgtcggtgacggcggtgttggcaaatcggtggatggaattttttggcattttttactggaaaacattgacccccacttttaggcgctgaccatccaattaatccagggccaattcattgaggagtacgacccgaccattgaagactcgtatcgaaaacaggtttattttttcgctccgcgaaattagctaactcgaaaaaagaattttgacaattccttagtaaatggtttttttttctttgaaaattcactgattttatggacccattctaagcctttttaggcaatggtaaagaattgtgggcccggatttatttttaaaaaaaatttattttttattttgctcgaaaccaattttaagaggttttcgagggtgctgattacgaatctcaactcgttttttggggggtaaatgcttctaattcatttaacaattatttttttgatgtaaaacaatgcttcaactgttaattggataaaaatgcgcaattttcgccaaaatttgaccggttataacttatattttggaaaaaaaattttcaactttttgttcgaattcgggtccggggttcggaattgggcaaatccgagttcagattcataatcagcaccctcgaaaacccccggaaactgaattttagtccaaaataaaaaagttaaaatagggggcactatatggaaagtgacagtttttgaaaagtttttcaaaaggggggaccctttttgtgatagtcataaaaatttattctctggggtttttggggtccccgatcacgaatccttcaattattttgatcaattccgatttcctaatctaaatttgaacaaaaaatcataattttaaaaattcaaaatttcaatttttatttgagttcgggttagggattagaaattagtcaaaatacatgtcagattcgtgattagcaacctttaaaaccccggataaaaaattatcatggttttttatcttaaaaaaattttgcaaaacaaaagggtccccccttttgtttcaaaaactgtcaatttgaacaaaaaattgtcgtaaacattcgaattttcgagtcctcttttttccaaagattgttatatgacttcaaccaaatagcgcccacccgtaaaactataattttatctaaagagtttgaattttcgacaattttttagtgacgtaaatccttactctttgtcgccgcaataaaaaaaatatttaaaaaattttgcattaaaatttcagaaatttctttaggtacttattgacggtgagacttgtttgctggacattttggacaccgcaggacaggtatactgaactcttccgtctaacttagcaaaaaaaaaaaaaaattttttttttggcgaccatcaaaataccgaggctttcttggttttttttttgagatgcattgacaatctgcaaaaagccacttccaatccccctgtcctccataggtggacaagggggggggtcaatttcgtaaatcgtacgattggttagccaaaatgcgtaaagacgcgaccaaaaaaaaaattttttttttcagttttggctttttttaaatttatttccatccttttgcaggaagagtattcagcgatgcgggatcagtacatgcgcacgggtgagggctttctgctggtcttcgcgct

SEQ ID NO: 22357 - DNA, 965 bp, Heterodera glycines
  unsure (1)..(965): unsure at all n locations
cctgaaaattaaaaaaaaggaaaattaaaaattttctcgctttggttttagcttcggcgtttgtgcctactaacgatacccgcgtcgagaacgcaccaaagcattgggtatcaaaggagccgaggagttctgtgatagttaaaggggtgatttctaccccgccctaccacacgctacaccctcctcattaatgtagcgattaacttacctctttaggctcctaaatttaaaaaaaaacttaagtttttcaataaaaacatattttcttattaatacatatatcattattttcaaattttgcttcgaattttaatataaaaataatatataaataacttaatccaagcgataaaacattaaaatgcttccaaccaaacgatattttgggttttcttttctgaattttcttttgaatattttattttaattttatcccagctccgagttcttgataaagcaacatacaactgaccgtgtgagaacacatctcttgttaaatcaattccaattttttcgaaggtttgtccttgtgcaccattaatcgtcatacaaaaagctaattttaaaggatattggtgacgcttaagtacataaggaagttttttatcttctattaatgttattcgtggaataaaatcaatttctcctgtcctatcacccgtcaaaatcattacccttaatacatttttttctatatcaagaatctgtaaacgcgttccgttgcataagcccatattcacatttaaattcctgattaattttgtaacacaattaattttaagtttaagttcatgatcaggaaggctatttgtttgaagtttatttagcacctcaggaagaataggtggtcctttactttcggcatcgtcaacacttttaaaaacatattctcttccttgaaatctttttaaaatttgttcattataaatgttaatttctctnattatatggtgctaaaatacagt

SEQ ID NO: 22358 - DNA, 1934 bp, Heterodera glycines
aatttattaaaattgctcctttctttatgcaaataagttaaaattaaggcaaacaattttattcaccggataccagtttgaaatgaagtacatttcgaaattttcgggattttagggtcgattcttaggggtgtattttttgaaaatttttacgtcaattcttaggggtgtatttttcatttttattgcattcttgttaataaatttcccaaaaatcgcgaaataagggcgaaaataggagcgaaatgccaaaatagggacaaaaacttattttaggggcgaacactcaaaatatggatttttaggggcgaacatccaaaatagggattcctagggtcgattaggggcgttaaaacgaaagttttttgaacaaaaaaatgtgtttttcgtgcatttctcatcgagttaaagccgcagaaaaaataagtaaaaacctaagaatccgcgccctactaataactcgaaaagtagctatagcgaaaaactataaatcgtagccctattaacaaccattgacttcataatggagcccggacaaggccgaatttgtaaaaaaatttagaacaaagagtatcacttcaaagactggtagtaaaattaaaaaaaattaattaaaagtagttagagactccattttcaccggattacggtagccccccataggtgtgggaggggtgcatggccaactgagcgccagccatttgagcgccgccaagtgagcgcgggccatttgagcgccagacttttcagtactgaagccaaaacctattgcgcgactttttttgcaaacccaaacctattgcgcgactttttcttgcaaacccaaacctattgcagggggtgcgcgactttttttggtgcgcgactttatgcaaattattttattaatttaaattaatttaaaattaaattttaaacatcttaaaagtcaaaacaacttaagacgttgaatttaaaatcatttaaaattcatcaaaaattccccgcaccgagcggatccgaaccccagggggggcggccagactgacgcactaaccactcggccacattggcaatggataataagcattaatttgctctcataaagggaaaatttgacgtcaccagcgggggcaggggggcgagagcgagcagcgagagaggggagggggggtcaaataaaaatattaattaaggaggggcgggggtgttggaaaggtgccaaataaacaaattaattaattggtcgcgtactttgtggtgccgccctccttcccgcatgcccattatgtaatttgaaaccttcagacaataaacaatttattaattggttttttgtccatttggtaattttcatttcatttaattcactttacggaaggaaaagccaatcaataatcccttatcatttttttatgccttaattttttccttctttggcatttgtttacccatttacccattactttttgccatttattatttatgtgccagattggcattattatggcaccgttttttgtgccattttgccgcaattttttggcattgttttgcccccttatttcccaatttagttcttgccaatttttggcattcttttgccacaatttttaaccctttcttttgccaatttttgcacatttttgtgccaaatttccctatttatttcttgccaatttttggcattctttgccacaatttttaaccctttcttttgccaatttttgcacatttttgtgccaaatttccctatttatttcttgccaaatttttgcacatttttgtgccaaatttacctatttatttcttgccaatttcttgcatttgttttcgccattttctcattttaaaaatatttaaattcttggcattcctgtttttttcaaattaaaatatgggcgttctggtttttttcaaattaaaaaatatttcaaccctttgcattttttttt

SEQ ID NO: 22359 - DNA, 2716 bp, Heterodera glycines
atgtgcttattagacgttgaactatgtttatcatcgttttttatcacttttagactataaatcagtgataaatcatttgttgatagcgattcgattaagctcgtcgatcagctaaggggggcgcgtgatgtaacatttttattggaaggaaccatttttttcagaaaccttcttcttctaaaatttttaaaaaaattattatttaatataaattgatattaattaattatatttaaaaataaatagaaaaatttcttattaataagatttccattgttaccttataaaaaagtctttcaacacatatttagtcattgtaagattctttagcttaatataatgaaaaatttatatttaacaaaatttcaaaaaattcttcagtcttttttattgctaacgcaattttatatccatagatccaatacatgaaatttgggattttaaaaattattttatttaaataatatatttaagagattgttgcactggatgaagaataaaacgatattaatcatctttttttcaatcacttttacgagaaactttgcagaattttattaaaatactatttctcaaaaattgattcaatatttatcaaaaataaataaatcagtataaatagaaaaaattcttactaatatttttttatgaatttaaaaatgttaattttatttatttaaaaaaaattaactcaattttgtcatttgatattttttagcttgaataaaagaatatttaatattagaaattaaaaatgagttcattttatatcaactgtatttttatttccatattttgccgaaatgagtattgaggttttgggatttattgcatttaaataatgtttaaattatttttgctaaaaattttacaaaatatgtaaaatttaaaacaattttataataacctgctaaaatataatttagattttaattttttcattcatttcgaatgaattttccattccatttttttgggtaattttttttcattatttttttcacatttatgttatgaataactcagaaaactttatgcttcggttatggtggtgaaaaaatacaatcactactgaattccagaaaattattataaaaataaaaaaggaaatgttaaatatataataattatttattaagttaataataataataacaacaaatatacgttcattaaccaaaaaatgcatccataatattttcaaaaacattgaaaatttcatttttggcaataatttgattttccaattatttgacgaaatcaatttctctcaaaataaccattcacaagcccccacaaattgcttcattaccaattttcccatcagttacgttgccatgtttacatcaaagtcataaaattgaattcgtttaaagtcttaagccataatttttttcaagttcataccaatttcattctccattaatcaaaacaacctatttattgcgggtaaaatggaatagtgtactgtattcttgctacaggtatcagtacaggttcctgtaatttggcagaatggggccaataagggagaaacatgtttttgtaagaatttagacgaaattttgccaaaattgcattttccaaattagaaaatcacttaaaatccattgataactttttttaaggaaaaaaataaaattcagggaaaattcatgctaattagtaacttccggtacttatcaaaaaaaaaaatccattgcacgctcatgatcaaatcacttcttcagggtggccaagagtcaacaaaatatcagcatctctagtggactattagaaaaaatggtttttgaaaacaaaaaatatgtaaaaattatgatatataaattagagcaattttatcaaaagttaaatattacaaactattatgtaagtggattcaacttcaattatagcttggttttctggtgaaaatcatattcgagatcagcgatcataaagagcctcggagaatttcatggccattaccaaataaggggcccccaatccggaccaagaaaaaacgtcgccggacgaatttttggaccataacttttttctttatcaaccaaatgaaattttcttagtattcttcaaaagcatatgaaaaactctatcaacatgcaaattttcaaagatttttttttcatgtaaggtcgaaaaggtttttgagttccttctggccataacttttttgaggcttaacgaaaatttttgaaattttgcaaattaaaaactaaacacttagcgctatcgaacaacactaagaatgcttaatttgattgacaatgagaaagttatggtccaaaaagtcttccggcgacgttttggggtgcaactcccaaatctgcagtttttgccggttcaaaagaagtgatttctttattacgcaagacgttaaattaaattagaatatttcacacgaaattttcacaattcattaaaataaaattatggaataatgcaaactgtaaaaaaatttgccaaaaaaaccaaacggaaattctcacatttactagaaattgctttcaaaattttctctcatcagttaccgacgcgtttaaaaatgaatttttacataaaatgataattttcttttgtttaaatctatcaattttcacaccaactctcatattagataactttggttttcgcagattgtacttttcaaaatttatttaattgctagtcaactagtctacctcattacttacttatatatatatatatatatata

SEQ ID NO: 22360 - DNA, 704 bp, Heterodera glycines
ccatcaaacgtacaacttacaaggtatcgggccgcatttgcataatttccattgccaatgacacggaaaaattcgtaatcggccaccagtttgagctcacatcgattgccttttatttctttaaggggagaatggcattcaaaaaacggcaaaataagtataattggcacggcagcacaccttttaacgacgcattcaatggacaccaccaaatggaaaacagcaaaaaaaggatgagcaacaacaatgatgaaggcatggcaaatggtggaaaaggcaattatcaacaatatgtaaaacttgaaaaaacagtgaatcagtgccgtgttaagacatttgcggtccggacatttgcggtccggacatttgcggcctgctggaaatcggacatttgcggcccgacaaatgcggtcggacttttgcggtccggacatttgcggcccgtttcttaagggccattttcggacatttgcggccggacatttgcggcccaagggaaaatcggacatttgcggccaacgaaacgccaaattgtcattcctttttcaaattaattataccaaatatttttatttaacacatttcaccaattattttgttcaatgacttataataattttcaactaatttttcgaaatatttttaactttttttcacaatttgattatttaatttaaaagagcttgctgaaggctccaaccagc

SEQ ID NO: 22361 - DNA, 1636 bp, Heterodera glycines
ctggtaagaatgggggtctgagtgaaaaattagtgaacaataattggagtcaaagggaaaaataaaaaataataattaatatattctttaaaagtaacactgcccaagtgtgcaaatggcctaatggttagtctccttgactttcccttcttctttccccttgttcaatccctctacaggaattaaattattttgaattttctttttgtatactcgtgggtttcctatagagaaaatatgattcctcatagttttttttaaattgatacatattttatcattttttaaatgaaaatcctaccaattgagcttaataatcccaaaaaccaacctttttttgttgaaaatctgtaacaaattacacccaaatttcaaaatttcccccgacggcgcctatcggcaccgccggacccattctttcccaaaatttttttgaaaaagcgcgccgaaaaaatgttatgtgaaaagcaaatattaatttataataaaattcaatcatttagtccaaaaaatgattaattgtttgaaataattaaagaaatttgtttgaaaatttcattaatttaaattagctttaactttaagattttatggaataaaaaacaaaataaaaatttaattttgtattattttcagttgcaaaaaaaaaattaaaatttgaattttttaaaaatttttgaatttatttgaatttttaaaaattcccggttggtcccggttcccggtcccggtcagaaaaaaatagaggtcccggtcccggcttctcaggtcccggcaagtcccggtttttgcaaaaattcccggtcccgtggcactctagtttttcctggtttttcctttaggaaatttttgccatttttgaggatcttttaaagaaattacagttaccgtatatgctctaattatagcccatgggggattatttttcaacctcctcagaaaaggggggataattagagactgggggattatgatagagggattatttttcaaaacacctcgtagactgggggataattggagactgcgggattaatagagactgggctataattagagcatatacggtatgcccaaaaatcataaatttcacaattttatcgtatatgtttttattattttaaatattttgagaatttttgagtttagagttttcttgttaaaaattcaaaaaattgtaaaaaagaacctcaataaactgattttttttcaaaaaaaaagtagtaaaaataaatttttttaaatccctaaaacgtgattctaacaataagcctatttgggttatttttatggcattttgcgccctatttaacaaaacaaaatttaatttacatattctaatagatatgttttgggcgtttttgtacatttatattgctttatttctcaaccctggttaaggtgcaatacgacctctcaatacaaggtttaaaagagaaaattgaagaaaagtttggcattccgcttgaaagacaaaaattggctcatttgtataaaccagacaatgtttccgatagaacagaatttagttttggtgactgtcaaacaatgtacttctataacattgtaaaaggcgataccatttttgtgtcggaaaatgtttgaaatttccgtaaaataccaattctccattcct

SEQ ID NO: 22362 - DNA, 1189 bp, Heterodera glycines
ccccccccccccctcccatcagacaatgtttttttttttgaaatttcttgagacacccacaaatactcgaatttagtcattaacataatcagattttgttggctcggagtagcagcagtagcagcgtaagcaccgaaggagccgacaaattgcacaaaattggtccgccaacggcgcatgaaatggccaatacgctgaagagaaagcgaagaaaggccgaagaacactctccaaaggagaacatccgctcttccgtccctttgaaacattccgtctcttttgccgtcgattcctctggcggaagtcagctgttcattgaggacaccgacttcggattggtcactttggaagacgcgcaaaaggcgccgtttcagtcgaaggcattcgaatggaacggcgaaggaatggacaaacgacagcaaagaaaagtggcacgaggggagggagggcaaatgacgaagattaaagccgattaagagtattgttaaatgagtgctttttcagtgttcagtcctttccaatggctttgtctcttttccttcggctcaccagcaacacttcccatccgaattgaatgctcataactctgatcacttccacagccaccagttggacaacgaggcctttcaatatggtaattttaattaataaattgaatgtgcgttttagacaatcaaattcaaatcattaggctattgaaaattaaatttggtcttcccctaattttttttgagtaaatatttatttaatgcttagtctttttgtctagaatggtctattaattaattgcccatttaaattccctcccccctctcgtcaaatgtaataatacacatgcccccaccgctcattcagtacctttcttttcgctgcttttgttgttccatttgtcatcatcattctcccccccccctcggcgtatgatcgttattgcgagaaaatagggatcaggatcaggattacggactagatacacatacggatttacggacaataatctggaaaatccgtactccgtaaaaatgcgtatccaggaaaaatactgatccgtatacggatacggattttttaatcattgttgcatattcgatcacacaactagcaacatattggcaacaaatggaagtgagggtacatatttcagcatatgtaattaattaccggaagtgctttgactaaaaaaattaac

SEQ ID NO: 22363 - DNA, 1114 bp, Heterodera glycines
gcggtatgggctttttgctttgcaaaatgttttgttagataatttatttgtcaaactaggaagtcggatttgataaaatgggatatcaaattcgtgctcagagctccaaaaacaccggagaacaagttttgcacgaaatattataatcacaaacaaatgttgtaaaccaaaaaggtcaacaaccccctttgggtgatttttaataaaattcaaaagaaataaaactgatgaaaatagcgctctttcgatactctttttttcaaaatatatccattcaattccttgcagatacattggtcaacgtcccggtcaagatgggcatgccttggtgcaagagtttgtccaacagtctgctattcctgtccaattccgttcattggttgctgaacagcttaatcatattgtgacagctgcgcgcgcgaatgtgtaaatttggagagagagagagtgcctcgctgatctttttttgcgttattttattcattgattatcatttgaattaaataaaaaaaaattttttctctgtaaatgataaaaaataaaatatataaatatggaatgtttttttgtttgtttgtttaaattggttagttttttggtgctgggtcatcatcattcaaaaaccatcaaaaaggggacgctactcaaaaaatcgtaaaaaaggaagattcgattgcgcttaagtattttctagtgttctttctctcttggagcctgcaaaattcagaaattcatgtaacttttggccagaaaaactaaaaaaaaacgtgggcttttttgaacatttgtagctgttttgatgagtaaaacgcccattttgatagtttttgaataacgtctgtctcatttcgctgcatttgctgtactccttcatctccatttcatgtgtgttttgttgctttctgctgcgcttgctcatgcttccttctctccctcctccgtctcccccaagggcgagtgtccgggccatccgacaaaacgtaccttcaaaatttacgaattttgtgtaatttatatatattacaccaattttgccaccctaaaaggaagtgcaagattggggccaccactacaccccaaaatttcaaaggcgaaatttcgccgggacataatt

SEQ ID NO: 22364 - DNA, 1066 bp, Heterodera glycines
caaaaaaaaataaaaatttatgacatttttaaatttttaaaaaaaatctttcgggagttagcagctgtgccataaattaaaccgccaaatatttttgccctttttaggttctattatttattttactttctcggtcgaaaacgagaataaacgacaaatttaatttattttaagggtcaggattgggatcccaaaaaacaggattgtcccggggcaggattcaaattccgccaaaattgggattttaatctcggcaatccaacccaggctgcaagattccaatcccgaatccggacccgccatttttgtattatttttaaagttaaatatccttttttctattgaagtgatttttaaaattttttttacaatttaattaaaaaaatgcatcccttaaatgtgatttaaaacattgattgattttatggttgtcaaaaacgagcaaacagaaaattttcccacgttacatttttttattttttaaaaccctttccacttcatccaaaaaaaaattcttttttcgaatttctatgatacattaggatgaataagttcgacccaatatttcccaaaaaacccccttaattttttctggttggtccttaaccaaaggtaaaaaggaaaaaaaataattaaaaatttggggtttttgggaacagttgggaggggaaattttttaatcgggaaaaaaattttttttaaaattttaaaaaaaaaaaatttaaaaatgggccccaactcaaaaaaaaaaaatttggcaaattttcccctttaaaaagggggggggtttaaaaaaaaaaaaaaaaaaaaaatttttttttaaaaaaaaaaaaaaaaatttttatatttttttgtttttttttttgggctaaaaaaaaaaaaaaaaaaaaaaatttttttaaaaaaaaaaaaacgggggcccaaatttttttttttcgttttttttttttttttggccccaccagggagggggggggggaaaaaaaaatatttcccaaaaatttttttaaaatttttttttgaaaaaaaggggaaaaaaaaaataaaaaaaaaaaaaaaaaaaaaa

SEQ ID NO: 22365 - DNA, 1234 bp, Heterodera glycines
  unsure (1)..(1234): unsure at all n locations
ggcgcatcggttcggggggactgccccgaaaacaaaaaaatcgatttttcaagtgtcctttggggtactcaaacaattatgggagcaaaatccacngcagaataaagtacaggctatagggaagctattcnggaaggattcggtctcnccataaatctgggcgcatcggtcggggggactgccccgaaaaccaaaaaatcgatttttcaagtgtccgttggggtactcaaacaattatggggagcaaaatccaacgcagaataaagtacaggctataggaagctattcggaaggattcggtctccccataaatctgggcgcatcggctcggggggactgccccgaaaacaaaaaaatcgattttttcaagtgtccgtttggggtactcaaacaattatggggagcaaaaatccaacgcagaattaaagtacaggctatagggaagctattcccgaaggattcggtctccccataaatctgggcgcatcggttcggggggactgccccgaaaacaaaaaaatcgattttttcaagtgtccgtttggggtactcaaacaattatggggagcaaaaatccaacgcagaattaaagtacaggctatagggaagctattcccgaaggattcggtctccccataaatctgggcgcatcggttcggggggactgccccgaaaacaaaaataaatcgattttttcaagtgtccgtttggggtactcaaacaattatggggagcaaaaatccaacgcagaattaaagtacaggctatagtgaagctattccggaaggattcggtctccccataaatctgggcgcatcggttcagggggactgccccgaaaacccaaaaaaaaattttttggataaaaattatttaaatgaactgactagataatatttaaaataggttatttctcttcctttcagtatccctgcaaagtttggtgcgcttctgatcagtttctgaaaaaaaagttaagcctaaactttttggcctgtttaaaaaggaattaaaaatttttaaaaattttattcatctccctttttgatagaaaaagcatcagagtgcctaaactaacatgtaaataaaatttggtgcgtttcagaaccctttctgaaaaaatatttaagaattaattttgcaaaaaataaataaaaacgaaagactcagattttcgaaaaattttttagagctgagctagctcggcgctcatttcagtgtaagttagtccttt

SEQ ID NO: 22366 - DNA, 1421 bp, Heterodera glycines
  unsure (1)..(1421): unsure at all n locations
actccgtctggccactccgtctcagcaatgttcaaaaagctataacttttttctttgttggccaaacttcacaatcatggtatcatttgaaagccctagatgtttagaagatatttataagctatttctcagtgattagtcagctctcaaaaaagttgtcagttgaaaaccgcaaaaaaggcagaattttcaaagttttttatttctatctttttttatagttcgaaattttctgtaatttttagtaggctaatagagcctgtgaagagctttcgaatgatatcaagattgtttgattcggtcaataacttcaagagttatattgactcaaagttgtctcagacggagttggccagacggagttggcccgttccgtcctgcgatgccgataggcttcgcctgggtaaattttgtaatttttaatgcgatttgttaacagttgaggaatttaggacccggcggcacctataggcaccgattccccaaaaaattcgaaaagaattcgttataccttgtctaaaattgttgaatttgaataaatattacattggctttaaaaatgtttgttctgcagagtctgattaccggtaccatctcgaaggcatcggctaaacaaagagctgaaagagcggggcgcacgcaggacggagtgtgctatcggttgtacagcgaacttgcatttgccaatcaaatgcttgagcacacaccgcccgaggtaaaaggaaaaggccaatacggtggtgaattgttggaagaagttctgctcaattgtctagaattgaagatcgagtaaagaaagatccgggcttttggacttcgcgagtcttgattctcatatttcataatttttctctaaatgttttgggcaaatgagatcaaaaattaaaattacattatcaaattggccagagctttactttcatgaacatttaaaaaatgcggtcgataatacagttcagtttagtgaggcatacatttgagaaatttccgtatatttatatatatatatatatatatatatatataaatttatgtctgaatcgggttaacgactaattttcacccaaaaattttattttggaattcactttacaaagtagttaaaattgaatccagaataactgggttgtatgccgacttatatttaataagctgaaatgctttttagattctttggtccgatctgacttcaatggtccttaaaatgaagtccattcccagtatttctgagcaccttggcgacctccgcttccgcgatcagccaccgaaagcggctattgtaagcgcattanaaaatctttattttctgggagcaatcgatggtaaatattttttttttttttgggcgaaatttatttttaattttttataanataaaaatttttcagtccggtcatttcccacaaaaaattttcaaaagg

SEQ ID NO: 22367 - DNA, 1176 bp, Heterodera glycines
tggcccatccctatggcattttttccaaataaagatggtgtccgaattggcccagtgcagtgatcagttgcgctcaaacggcgcttccactgcaatgtcagtggaggagtcggtgatggctgtcggcaacgaacttctcgtggccgcaaattccgtggaggccgtttcttacaaattggcacaaatgcgtccaagggaaattcatgcaagtttttggcttggaatttatttcaattttaattgataaattgctactggactgataattaacgacgcttttgcggcggaggagggcccggctctgatatgtcttgtattcttgggtcggtgcttccacgaggaacccatcgtgcagggcatatcagagtcggcacccttcgcatgttccgttgcccccgtcaaatgccgtgccattcctgcgcttctattccttcgacacttcaacattttaaatgaaattttttttgcaataatattgaaataaatacaataattttgctttttcaattttatcatttttcttttcagaaacctgatgagaacctaacgtacgatgagcaaattctttcgtccgctaagtcaatcactcaggccgtccaaacactcgtcaaagtaatctttggtttgtctaaatttgtttttcattcccatcggaaaaggccgcttcgtctgcgcagcaggaattggtggcccaggggcgagtggccgacccgggcccagcaaatggcagcgaagagcagcaatggactgcaggtggagaagccaaaactccgcagcataagctaacaaataagctaatcactcttttgccttaggtttggtctccgccgctaaactcgtcgccgctgcgactaaccaactttgtgaagctgccaacggattggttcagggccattcgacggaggaaaagctaatcgcagcggcgaaacaggtgaagaagacaaaggaggaaaatcaggggatttatcacggcaattattggacaaattatcgccataaatccggtacttttaatgcattgccttgttggcccatttgaggttgcttcttccaccgcccatctgttggtagcgtgcaaagtcaaatgcgacttgaacagccgagcaatgcaacgactccaaagtgccggtcagaaaataattaacaaaacgcaaaaatgggaagttatttttggat

SEQ ID NO: 22368 - DNA, 818 bp, Heterodera glycines
  unsure (1)..(818): unsure at all n locations
aaacaaaaaaatngattttttggagtgtccgttttggggtactcaaagaattatgaggagcaaaaatccaangnagaattaaagtagagggtatagggaaggtatttttgaaggattaggtatngatataaatttgggtggattggtttggggggagtggtatgaaaaaaaaaaaatagatttttttaagtgtaagtttggggtagttaaaaaattatggggaggaaaaattgaaagtagaattaaagtaaagggtatagggaaggtattttggaaggattgggtatttttataaatgtggggggattggttgggggggagtggtgagaaaaaaaaaaaatagatttttttaagtgtatgtttggggtagtgaaaaaattatggggagtaaaaatgtaagggagaattaaagtataggttatagggaagatatttaggaaggatttggtttttttataaatgtgggtgaattggttaggggggagtgaatagaaaaaaaaaaaatagatttttttaagtgtatgtttggggtagtaaaanaattatggggagnaaaaatagaangnagaattaaagtagagggtatagggaagntattntngaaggattnggtgtnttcataaatntgggtgnattggttnggggggaatgtgtagaaanaaaaaataaatagatttttttaagtgtgtgtttggggtactcaaacaattatggggagcaaaaatccaacgcagaattaaagtacaggctatagtgaagctattccggaaggattcggtctccccataaatctgggcgcatcggctcggggggactgc

SEQ ID NO: 22369 - DNA, 963 bp, Heterodera glycines
atgttcctttccatctgatcagtttccccccttctcttgtgcctctcccccgtctttcgtgtctctccccccttataatctgcgtcctccccctctctcctcccattcgctcccttcgcctgtcttttcctattcctcttctatctcttctgttcccttttaccaaataaccccaaattattaaagcaaaaattcccaattttaatgacatattttgttttttgacctaaatttgatcataaattattaagcaaataaaagtgatcaatttccgctttcatattcattgtgttttgcattttccctgcctttttggtttcctgctgtttccccccccccattttcagtggcttccctcatcaaaatgccattctctgcccggattcccatcaatgccaaaatgtgcaccaaaatattttagatggaaagcaaattgatgaagcaaatacagagagaggcggggggggggggtaaagggaggggggagggaaggaaaggggtgccctcagcgaatgtccaaattaataattaaagcgaggacattgcacgaatagagcaagcagatcattttccattttccaaagcccaccacacaaatgtacccatttggctgaggatctagctcatttagcaacatgaatatttcattattgatttttgacctacaaaaattaaaaaatacaatttttgaattgaatgcttttttgtcaaccaaattggacaatcttgctttcattcaaaagttcttgataaaaaaaagatttttctaaacaaatgctaagcaattgatgaactacaaaaaaaaataagcgttcgattataaaatctgtctgagaaaaaaagctatgatgatctaaaaaaattcaaattttctctattaacagagacaaacaaataatacgcccaaaccagaaatgctttttttctctacactctcttttcaaatctactagccttactttt

SEQ ID NO: 22370 - DNA, 608 bp, Heterodera glycines
gtgaattatgattaagaggggggggggggggggcacatgaggatgacaatttaataggaaatggcaaataaatacaataatttggaagagagggagggcaacgaagtttagggacaacaaaaggggacggggatggtaggggaagggcgtggtgaaaaggagggggggggggagaagcagttcggcttcttctcctctttcgtcgcctcctcctttgtcacattttctttcgctgcgcttttctctgctgattgatgtggctaatgattgattgtgccgttcgactcaaatcgttgccgatgttgcccattgtcgttatttgcatattcaaagtccgcccggggatgaaatgaaatggcattgagcgaaggcagggaattaaaaaactgtttaaagggttgtcttaggattgtcatatttgaccaggattttcttgctttctttaaactaaaaaatcggcaatttccgtcctcccaccccacccaaacgttccattcgctttacacaatccttggcacaaattaccccccccccccaatatattctcaattgaccagctcatcttcctaatgtccacctcaatattggccctcacaattattctcgcg

SEQ ID NO: 22371 - DNA, 1306 bp, Heterodera glycines
  unsure (1)..(1306): unsure at all n locations
taattagtttgncgtgagaagtgaatgaatggaatggtccggtcgtgacttctcatggtgcttcgagccttccttttgttgtcagtgcacattaagggcacaccgaacgagcaaaacaagcaattaacggagcacgctcacgagaagcacacgcccggaccatcccccgaggggcaaacattcgcaatttgtgcagcattcagaaaattttttaaatattggtgcgcaaaaatttacgcaaaaatttttgctattttgtctactgaaattggtagtgtttacatgtattaaagccttgaagcttctttcatcatggtattggaacaattaaaatttaaaaatttgactaaatattcacccggtgaccatttgaacaccaaaaaagcactataacggcatgaaaaagcggcaaagtcgggaaaagaatccaattttgttaagaagattgcaaagagttctttctttttaaaataattataataattagctattcaaacattatcatcatcatcgtctcagactgacagtgaaaaacgaagagaaaaaacccctgaggggttggcattggcaccggtgggtggacaaatgatgtgccaaggatgacatattaaatattgcgccccgggggctgtgcctgcggtgaaaagcccaccaaaagcgacggtcggttgcccttgggtggcgcgtcgtatctcttcggcacggttgttatggttcccccccccccccacccgacccgacattcaacaacggtaccaataagtacattgtgccaacaacggacagaccgaccaacggatggacggacaaaatcttatgctttctttttgctttgccgtcgtttggtataatttttaatgaaatttctttaatattgccgcggtcggcggcgcctttgtcctagcaaaaggcgcccgcgggggggtgagagagttaattaaaaggtggaaaattaaattaaaaaaagagcggacaacatttaaaatgagcttaatgctcacttaaaatgtgaaaattcagaggtttgcacttttggattcagtcatttgaaacccaaaaaggtgaaatttttgattattttatcatttccggacacatttggcatcgttttgctagtgatgcttcccagtgcgtcttgaatgttgggagaatcactcaaattgcaattcgtcgtaatggcactttggctaaatgaagaaggaaactgtagctttagctgtgagaagcctctactgctgctgctttcgcctccacatattaataacagcgcattacaagcacaaggcacacaaaatcctttaagtga

SEQ ID NO: 22372 - DNA, 2111 bp, Heterodera glycines
atctgagtctttcgtttttatttattttttgcaaatctcactttgaatattttttcagaaagggttctgaaacgcaccaaattttatttacatgttagtttaggcactctgatgctttttctatcaaaaagggagatgaataaaatttttaaaaatttttaattcctttttaaacaggccaaaaagtttaggcttaacttttttttcagaaactgatcagaagcgcaccaaactttgcagggatactgaaaggaagagaaataacctattttaaatattatctagtcagttcatttaaataatttttatccaaaaaatttttttttgggttttcggggcagtccccctgaaccgatgcgcccagatttatggggagaccgaatccttcgggaatagcttccctatagtctgtactttaattctgcgttggatttttgctccccataaatgtttgagtaccccaaacggacacttgaaaaaatcgatttttttgttttcggggcagtccccccgaaccgatgcgcccagatttatggggagaccgaatccttccggaatagcttccctatagcctgtactttaattctgcgttggatttttgctccccataattgtttgagtaccccaaacggacacttgaaaaaatcgatttttttgttttcggggcagtccccccgaaccgatgcgcccagatttatggggagaccgaatccttcgggaatagcttccctatagcctgtactttaattctgcgttggatttttgctccccataaatgtttgagtaccccaaacggacacttgaaaaaatcgatttttttgtttcataaatatttttttcagaaagtcatgcgcacccgtccgatctggcaagttaagcaacgattgctgactagccaaaaggttcggtgccgtgatgaaacgaaccagcactgcttaccccgcggcacccggcacggtcccccgaaggaatggatttaattaaattctctccttcggggatttttttccattaggtcgtccgttagcgttcgattgctctagtcaatttttcaaaatttttgttgaaatatttgtcgtgctctgaagggcgtgggagggggggggggcgaaggcccaccacgaggccgcgaagaggccgagtgagtaccttcggtgcaggaaaattattaaattttaaaattttttaattgctttttaaatatgccaaaaaatgtaggcttaactttttttatgaaaaattcgatcactcatattttttgctaattgagcagaagcgtaccaaactatgcagggatactccccggtaaaggactaacttacactgaaatgagcgccgagctagctggctcaaaaaaaattttcgaaaatctgagtctttcgtttttatttattttttgcaaaattaattcataaatattttttcagaaagggttctgaaacgcaccaaattttatttacaagttaataaggctctctgatgctttttctatcaataatggaggtgaataaaattttaaaaattttttaattgctttttaaatatgccaaaaaatttaggcttaactttttagtgaaagtttgatcactcatattttttgctaattgagcagaagcataccaaactttgcagggatactccccggtaaaggactaacttacactgaaatgagcgccgagctagcttgctctaaaaaatttttcgaaaatctgagtctttcgtttttatttattttttgcaaaattaattcttaaatattttttcagaaagggttctgaaacgcaccaaattttatttacatgttagtttaggcactctgatgctttttctatcaaaaagggagatgaataaaatttttaaaaatttttaattcctttttaaacaggccaaaaagtttaggcttaacttttttttcagaaactgatcagaagcgcaccaaactttgcagggatactgaaaggaagagaaataacctattttaaatattatctagtcagttcatttaaataatttttatccaaaaaatttttttttgggttttcggggcagtccccctgaaccgatgcgaaaaaagatatggggagaccgaatccttccggaatagcttcact

SEQ ID NO: 22373 - DNA, 2357 bp, Heterodera glycines
acacgaaattggcattgacatctccaattttgccgcctaaagtgcactttgtgccgcattttgccgttacttttgggccaaatttcaccattttgccacacaaccaaaaaattaaagaataaatttttgtcactttcatgcccacaaaaaaaagttatcgtaatgacaccatcactcaacataattacccaactgatcaatcatcccattttgatcactacactgtttcctctgctgataattgtggcgatcagtggtgtgtcggtgcttgaagatgcacagaattgtgatgggaattgcattcaggaaatggagagggtaaaaaagatttaattggttgaaaaatgcttttcagtagttaaagtttaatggaaattattttatttttaatttatttgattctttatttattgccgaattacgggagcggaaaaaaggaacgctcaatttttaattttctcgttttccgtcaagcaaatttttttaaagggctataaaaagataattacagtatattctcaaattaattaaatttatttattattttggccgctctcagtaaaatacgtcatttcaattaagctaattgaggcaacgccctcctcaacggggctaagtgtgaacccatttgtgtacagtgcaggccaaaacttcatgcacaaattcttttcacgagtgtgcgagtcagtttcatgaattttatcatttacacaactgaatatttaaaaaaaaatacattatttggaatgataaaacagaaattttaaaagtgatcacgataaatatcttcttagaattttattttaattggaaaatatttaccgctaatagatttaccccatttaaattagtttaagctttgccggtatcaattcaaagctctactgtagaattgctgcacaaatcaaatgattcgtgcagctgcaaaagtttcttcatgaggtgcataaaagccataaagatgagtttttgagtacttttggcagtaattttttttgaattttgcttgctaaaattgttttcaagtgctttggatgagataaactttataaaaattgggctttttgtttaaaatcagtgcttatcgcggggtggacgagtgcatggtccgctgcgagtcgcgcagcaaacaggtgtccgagttgaaggcggcctactcgggactgcaatttgtgtgcaaagagcagcgcgagggtaatgaaaatgaacaaggattggatgattttattgggggaaaatcagaaaaataattaatgaatagacgcttaattaaataattgatggagatttttgcgaattaagtgcattattttcacttcagtgaaggaaatgcaagaaaaatttcattttaggtatttttgagactgaaaaatggcaattcgtaaaaacgaaagttgtggaaaaattgaaaataatttataatttagtgcttttaaaggcaaaatatagaaaaaaaatcggaaaattctaaagttacgggtataaagtatttttattgtgacaggtatcgaccggcttttaatcataaaacgtgacaattaaattattcttccattctgaaaattttgaactcataaatttttgtgctcaaaagtatatgctcaaaatattaatttttttttttctaagagctaagcttgaaatgagtttttcatgattcttagcttgttcaaagttcgcaaaaatttaagcatttgcttcaaaatccaattcctagtgctaggaacagatttagaaataatcagaacgatattcaattcttaaacttaattgccttaaggtcttattaatgtccaagccccccccccaaaaaaaaccgaatatatacaaaagtatgaataataatgtttacacttttagcgcttaatttccccattcccgaaaacactgacaccctaaaaatttatttgtaactgattcatcagatacggcattaattgacagttgtaaacataaaattaaactaatttaaaaatcatttagaattcttcagctctttgccctgcttgtcagagtaagtttttggaagagaattttaaaaatgcccatttttgaaaggaatgagtcgaagggcgctcaaagatgttctcttcaaattaaccaatcgcagtaagcatttttaggtgcttaatgaataatcaaataaaaatttttatagctagattatcctaaaaatatcggtaaaatcgcaattaaataatttattaattccaaaaataattatgtataaggtgtgaacagcgacaaataataatgtccacaaataccttatatgtaacaagaaaaaagagggctaaaaaagcgaaaaactaatggaattccgagactaaaatgcattcttctcctccgttccctaa

SEQ ID NO: 22374 - DNA, 2687 bp, Heterodera glycines
ttacacctgaatggcttggatcagccaaacggagtactgttgatcgtacagtgcccagaacattggcagcggagcgaacatgacgagaatacggatgagtgagcgaatgtcgtccaaaaagcgttccttcaaaaataataaatttgaaaacaaagtaaattttaattaattttctgaccctctcacaaagcgtttggtccattttacgctttttcaacatcatgcatttctcatttttggcacaaatgtgtgtgtccaaataatagtccaaccaattcgaacgctcttttctcgaccgttttttgtttttcagagcgacctaaaggaaaatttaaacctttaaaatgaacttttgaatttttaataatgttcaaatccttttaaaaaataaagattttcttttcaaaataaatacacgtaaaatgctatataaatccaaaaaacttataaattttgagattaattatttctttttgaggattttgaaagttttttcatgctcctttagatttttaattcaaaattatataaaattatttttgcatttctttcgacattaggaaataaaattaagtaaataaaatatatttttaatttattttaattaatatttaatttaattgtcaaagaatgctaccacaacagtgtcataaacatcagcaaacacattgccttttggtggatttttattgtacctaaaaaagataaatattttaaaatttattaaaaattaatgccatttaccgtccactcccagcgaagaaaattactgaaaaaatgtaaataaattgaatttttagaatttttgttacccgttgcgactaacatgaaaacagcggaaacggcaaatgacagaggataacctggagaaatcaaaatcaaaattaacaataaaattaatttattaaataagtcttgctcacatgaatcttggccaaggcaaggctttgagcgtaaaatcggcaacaaaaaagtggaaatgagtgcactgaaaaacaaacaattttttttaatgattatttgttttatgagcatttttgtagtttttaaatgcttaccattgacaagaattaatgtatttgattgcttctaatgaaaatatttatgcaaaatttatttttattttgcattttttaattcatttattatttgttcaataaaaaacaaaaagaaaaatactatcaatcgaaaataatatatttaaaaaaaaattattcaattagtcgcacattttgggcatttttcaattattacgacttgattaattaggcgaaggaattgcgggtagcgctgccaaatataatttagtttaaacttttttataaatagatttttaaagaaatggcgaggtcacacagagcacagagaaatattgttttaaaaatactattttatttttaaagatatatttttttctttttttttctcaccccgcattaatggcagcgtaaaaaatggagaaaaacacggagatcatccgctcctggtgcggctcgaactgatcgccgccaaacgaagcgacgcacggcacgatgaaaccgttgccgaccaaaatgatcagaatgccaatataatccaactgggaaagtgcaaaggaaaaaacaaattataacaaattaaaatttaaaaacagggcttggaattcagtaattagcgaatagaaagaatccgaagagcacatttttctcatccgctcagaaattttttttgtccaaaattataatttttgaaattttttgcctaacaaaaaatgtaaaaagttttcaagaatttaatcctctcttttaaaaatctttttcaacctatccaaaaaccagaaaaaaaggataaacttaagaattctgagccgtgcttaaataaccctgagcccgacaattcccaactgatgcctaattgtaaatataaacaatattttgcggcatacccacggatggaaaaaggccgattcaccgccaggctcaaatgcgacagctaattaagcaaaaatgattaagcaaattgaaatgttttttaatcgtaccgctgagaatgattttgccaactccgtaaataatggtgccataaagaattgtcctgaaaatggaaaataatttaaaaattgcacaaagtatacgatatttactcttcacttttttgatccttctctctaatgaaggcattaatttaaacaattaattaaaaattgtaaaaattttctccctgcggcctaacggcagtgccgcgtcgcctaatgttccccgaatttattttgaaattagcgaggaaaaaatttgttctccattaaattgtaaatttgatttgtctaattcagatgattagaaacatatgtatgaataaaaaattttgagaacaagcctgaatttgccaatgtaaccatccgccaccgccgagccgagcaaagcgaaaaaggcgccaatgattttcttcacattgatcagcaccgttgtctgaccgctgctcaacttcagcacgttcaaaaaataaaggcccatcacagctgaaaatgcggggaaaggggggatttaattttcgtgataaataaattaaatgtcaaattaaattgagaacgtgataacagattatccgatgcctcttggagtccaccacaaataagtccttcccggcaaataataaaaaatacactctaattattcttcatttattaataatgctcttagcgagccttt

SEQ ID NO: 22375 - DNA, 2558 bp, Heterodera glycines
  unsure (1)..(2558): unsure at all n locations
tttttaaaaatttaggcaaaaatgaaaataacaacataaaatattttcaaaaacgtgtggattttattgaaattaacttattaaaataataataaatgattgtcaaaaaaattttttaaacttcgtccacatgagcgctggtggtttcagcataggatggaatgcggaggcacgaaaattttttaatttatatttttggtcgtatcttaggaaatgacatcatttcagaagctgttcgtgaattttaatgccatgcttcaataatcgcttaatcgaaaattcgtcgcaaaaacgcagttccgtttatttaatttaagaaaaatttatgattctctccttaaaatctatttctcgctttttgtatataactttttccattatatgcaaaatgtatataccatactttttaaactaattttaaaaactgtttatcttgcttaggacagggttcgtatccgtccttggtgccagggacgtccttgaaattgggcaaaataaaaaatgtccttggatgccaaggacttctttggaaatgtgcatttggaaaagttttaaaaaaattcaaagaaatttgaaaaattttgtaattttcaacaatattttgattaaattatggcattatctaaataaaatgcaaattttttctcatgattgagaatttttgaaattttatggcataaagtcactatttttcttaaaaaattagccaaaatcgcaaattttggtcatttttggacaaaaatctgtaaacaaatcgcattaaaaattacaaatttttcccggcagcgcctatcggcgccgccggacctcccccccccctctgtcccacaacatttttggaagaagcgcgccgcaaaaaaagcgtttgttttttttcttaataattttctgtcctttctgtttttctgtccaattattcatcatgttttttcctcttttcctaaaaagtgctccacctacgcctcctcccacttattgttccccaaaagtgctcctcccacgtttctttttctgctataagaagggaccaaaatccctcaatcatcactcacctttgtgcctttcattttcaataaatatttaaattggatattcgtctcgcccttcttcaccatgcccatattcggtgccgttccctctgctccttttgtccattcttagtccaaattcccgtggtcaccctttgcccgcccctttgtcctaacagcttaagcgacaagtggtgccgctagcaaatcaaaatcagatgtcttccgctaagctgcgcatgaccatcagccccgcggtgaccaggcttcgtcagcatgcgaccactgccgaaaatgccctggacgaagatgaaatggaccaggaagcgttggacacgctcagacaggagcaccaacacatcactcggattctcactcgcttggaatacgatctcaacgaatggaacgaggtcatacatcgactccaggggcctgcgcgagatgcagaagaagccatcttcacagccttcatcagagatgaccggcatttcacggaatggatggaagatgcccgagaagtgctggcgcatattgaagacgagctcaatggtccgcccgtcgccgcacaagcacatttggccgggggaggacaactgccaggagccagttgcaatgcacatattccgttgcctgcggccaaccagcaatttcagccagtcatagccgctaatgcacaaggagtcgtaaatgtcccaccacctccagccctgaatcagtttggcgcttggcgcgctgccagcctttgcagctaggcttcctcaactaagtcttccgaactttgatggagaccctcttgagtggcccgcattttggcagagtttcgagagtgctgttgaccgcctaccactcgaaccggttgacaagttcaattacttgcatgtatgcctacgaggaaaagcagctcgtgccgtaacctcctatcgtggcggagagaattatgcccatgccgttgctgctctcaaacgacttttcggtgatccatggaaaattgccgaagcgctccaatcagagttgatgaatctacggccagtggatgacgatgtccgatcactccaggattttctggagacatttgaacgagtgtgccggcaactctcaaatttggaaatgcctgacgatagcccattaatgtaccaagtcgtccgtagtaaattgcccgcaactgtgctctcagaattggtcaagatggagcgaagtgccggtgtcaaattgcacaccccacaactcagaactgggcttgccaaagtcataagcatacgtgaagaggttgagcggtgcctgcgcgaggccaagcctgaaggactgctacaactgaggcatgaacaccggccgaaccgacctcaacgacacgaacggagcgaacatgcgcgagttttttcggctgcgcaatcaggcaaaaaccaagtggacagacgcgtgccatcgtgccttttctgttctggtgaacattggattgcggactggtcataaagtaacagagcctgaggaacganagaggaacctaatgcacanaaccgatgtctgaattgc

SEQ ID NO: 22376 - DNA, 1435 bp, Heterodera glycines
ttattaccagggattctttttttatgtaaatacatgtttttttctggattcttcatagcctaattagtttgaaaaacactttcttttttgtgtttgttaacaaaagttggaactttttttacatatttttacatatttcgggatttttctacatattacatatgtacatattttggactttttcgcattttttcgaatatattttgaaatttttgaggattttttaaggaaattttcattaaatgttcccaaaaaaaacccaaaatttcacaattttttgtacatatttttaggatttttgagaagtgatagaaatttcatatgaaaaatttaattttttttttgaaaatatacccttaaaaatcgttttttcaaaaaagagataataaaaagggtgctgcttctaagcctattaggttatttttagggcattttgtacttatttcacccctttacgaagattttttttccaaaaaacaccatttaaaaaattttatttacatattttaagtacatatttggttctttttgtacatatttcatacatatttaagcattttttatacatattttatttacatattttgcgatttttcttacataaaaaaagaatccctgtttattacatataaaagccggattttttgaattaaatgcacaaatcagttccttaatgagtctctaatttttcctttctaattagtcgggaatactcctacattttatgagagaattttattttcaattacagagaataatgaacacattaatgaaaatggcaattcattcaattaagtcaatttcggatgcattttgtaattttccaaaacatttctgaatttctccagtttttaccaggctaacctaaacctgtagaatgaaatttgggtatccagtttagcgaatattttcgaattaatcgaaaggaatcgcagaaaggatttatgataaatattcaaaaaataaaatttcagaaatagtgaaagactgaataaattcactgaaaatttgagaatttattaccaaggcttcaaatttttatgtaagaaaaatcgcgaaatatgtaaataaaatatgtataaaaatgctaaattatgtatgaaatatgtacaaaaagcccaaaatatgtactaaaatatgtaaataaaaattttttaaaggttattttttggaaaaaaattcttcgtaaaaattggaacagaggcataaaatgccataaaaatgaccaaaataggtttagaatcacattttagtatttcaaaattaatttttgatatacatatcattttttgaaaaaaaaattcgatttttagggatacattttcaaaaaatttttttttaactttttacaaaaaattctataaattctcaaaaatcctcaaatatattaaaaaaatgaaatatagacgaaaaattgcgaaatatatatgaaaaa

SEQ ID NO: 22377 - DNA, 2223 bp, Heterodera glycines
gaaatggttttataaaaaaatataatttaaaatcgaatgtgttaataatttttttaaaaattataaaataaattccttcttttatttaaaaataaataagaaattaattttacattaaaacatttaattaaacaaacaatattaaattaattaaaataaataaataattaattttaaaacaaaacatttatttataaaaaaaatttaattcaaataaaaaaatataatttattattaataaaataaaaaatattttaaataaataaaacaatgaaaaaaatggtagttattaattaaaaacaacgttggaaattatttattgaatattcacttaatttgaaatgatattattttttacagataaaaaataataatgaaattatttattaaaaaaaaatttaaaatttacaaccaatcttcaaattaattaaaagcattgaaaaaaaactcaaaaataaatagaaaaataatgtacaccgtccggatccgaacctgccccctcccccctcagaatgatatctcagaatccccaatcacacagggattctgaggtcttgactatgtcaaaagtaaaatctgatcacgtattcgtgatcagcggcccaaataacccctaaagacatgtttttggaagatttttgttgaaaaaaatttttcactcaaaaatcctggtcacccccctttggtcccgactgccaaaatcacttttatttttgtatctttattttaaaagatgataaaaaggtcaaataaaatttatataatagagcaaaaaattgcggattttttaagtatttaaaatttcaaaaacacctttacagaaccgagttctgaatttttttctgaaaaatcgaaaatttccagaatttctggaataactttttttgtttttgcggtataaatttcaaataaatctcataaaattctcccgattttttgctattttttatgctttaaatgagctgaattggaccattttgaggcgagttatgaatttttatactttaggttgaattttcaagggccaaaaattattgatttttcaaaatttttttacctccctccaaaaaatccaaaacgcaatataaagtgcatattcgtgttcagcacctcaaattagcccagaaaagtattttttggcaattttaggagcaaaattatttttcataaaatgcaaaaccatggggtcccccctttggttttgcatttaaaaattcatttttgttttatatctttttttatattaaagataaaaataccggataaagcacattagatagagcttaaaattctctacaaaaatgctctaagacaatttttcgctaaaatcaacccctgacgagttataggcccgggactgaaatgtcccggtcaggccaaaaaatttttctatttccggaaaattttgaaattttttcaaaaatgccaccaatcgatagagctcgaaaaacggttgcttgaaagtggtctccgttttcctgggaaaaatcggcaaaaaataataaaattcaaaaacaaaaaattttcgagggggcctagctcgaaaaattctgaaaattttcaaaatctgaaaacgccatcggatgcagctttaaaaactgcacaaatgctcaagcggcgccaacccgctccgcttaacccccagcgagttattcccgaaaaacggaaaatgccgaaattgggtgccaaattttgccattttctgcagcattggcatttacagatagaacccccaaaccaacggcatgctgtgccaaacactccaacttgatttcctacctccaaacattttccgctcccgcttcttcccgcaaagttacaggccaccaaagacggacaaaaaaaatttcacgccgtttcagcgccgccggcgctgaaccgtccaccggagcggaaaacccatatttttcccagatgcgcctcaaaaagttgtaagacccttccactactttcagggcgctcccggccttcggccgggagattttgtttttgaagacgaaaccccctttttctctatgtatatataaactagggtggacagttggctatggtgtgcatgcgtggcttggtaatatatggccctcatttgttattttaaaacatacaaaacattatcaattgagttctgttgctgtggggaaagcgcttcgcgctcagggacgcggcttcaccgcgtcgctagaaattgatgtaatttagcaattcatcgcagcctcaggacgg

SEQ ID NO: 22378 - DNA, 1142 bp, Heterodera glycines
cagaaaaacacgatcctgaggatattgtggaatcggaagaagttcaccatgaagttgaagcagtaccggctccaattccaacagaaagacatgaactggatgacactgtggaaacggaagaagttgtacaagaagttgaagcagtatcggcaccaattccatctgaaagacgggaatctgatgatattgtggaatcagaagaagtccggcatgaaattgaaggagtaccggcatcaattccaacagaaatacatgaatctgatgatattgtggaatcggaagaagttcgccatgaagttgaagcagtaccggcgtcaattccaacagaaagacacgagcctgaggatattgtggaatcggaagaagttcgccatgaagttgaagcagtaccggctccaattccaacagaaagacatgaactggatgacactgtggaaacggaagaagttgtacaagaagttgaagcagtatcggcaccagaaacaatggcatcagaagaatgggctcgaccagcagcagcggaagaagttattgaatttggtgatttgtcaccaaaaagtgatcattttggtgatcagaaggatgaggaggaggcattggtcgagtcggaagacgtaaagccagacgaacaccgagataaagccgttgatgatcattttaaaactgctcaagaaactgatcagcaacgacctgattctttaatggtgcgctgggccggggatgagcagcgcgacgcggaagaaactcgcgcactttacaccgtcacggaacaacaagcaaatcagctggtcgaagaagcgctggagcgagtgctcagcgatgagtcatcgttgcggtaagtaattaaattttaataatttatattaatttttctaaattttatttatttgaattggctaattattttgcctttttaaattttgtatctccttaaaagtgttttcaaaaagtttatcaaaaaatcgctatttttatttcttgaaattttctaaaaaaaattttttttgaaaattttccaagtttgaaatttaaaaaatcggaggggagcgggaaggcgaggagggagggaacgtagtgcatcccatttaatcactcgttaagggagtagctataaaaaaatgccaaattctcaaattaattaa

SEQ ID NO: 22379 - DNA, 2169 bp, Heterodera glycines
  unsure (1)..(2169): unsure at all n locations
gatcagggttgaaaaaacgggtgatcaaaaatattatatttttatgttctaaaccatttccatttcattgacatttttagtgacgaaatcccgtaaatacaggggtaggtaccgtaaaaagttccaggggatgggaaattttttttttaaatgggctcaaaatcgtaaaattttgtcattttttgaacaaaatcgttaagaaatcgcattaaaaattacaaatttttcgccgagccactgtccccaaaattttttggaagcgtgccgcaaaaaaaagcatttttaaaagcaaaagaagaattgcaaaatttggtaaatttttggacacaatttgttagcaattcgcattaaaaattacaaattttttccggcggcgcctagcggcaccgccggactctcttccctcacacattctcaaaaagttttttggaaaaagtgcaaaaaaaaaatcaaaaagttttttacgaaaatttcaagattaaatttttgaaaaaattttcagcgattttttctaaatgttttcgaaaaactattaattcctataaaaaattgaaaatccgtttcaaaattttttcaactttttttttacaagtacaaattaaaataattttttttggtgtgattaaatctattatttcaactgaccgatgttttttcaagttttcaaaaaatgcttaaatggttttaaaatacattcttattataaattagatatttttagacgttcacaagcaattaattgattttttcaagcatttgtttgttttttaaaacaaatttaaaaaaatccaggtccaggcctggatccaggtctcgaggagcctggatttttcctggacctggattttcctagatttttgtccagaaaatccaggtccaggtccaacatggaatccaggtccaggcttttttcaaaatgtcgatctctaaaaataattaatgattcctaattacgaacaatactattaaaatgagaatgtctaggctaaaaatgagtttttcgcgcatttctcagcgaaacaaagcagcaaaaatgttaaatattgtaactaaaatgcaatcccttctgtaagcatagctatttggccttataaattaattttcattgatattttcattcctcccatccttgagtcaaagattgtgccaccccaacattttgctttctttcccctctcttttctctcattttcgctcctttttttattatgtttgcaatttttgcatcgctaatttttaggtttctttctttgattttaaaatattttttcatcttttttaatttgtcctcatttgaatgtttaacttgtacttaaaaataaagataaactaattaaaaaacaaattctctcacttttatgatattttggcatcaattcttttttccatcttcgtaatgtttctttagaaatgcccaattccttcgcaaattctttttgtttgcctttatacaaccttttaaattcatcaaatcgttcaatgaattctttctttttctcttcataaaaaactatgtttcattattttgaatttaattttatttaaatttaattcatttttccatttgtatattttttcgcgatatatgcctaaaattcatccaatttttctttaattacttcaaattttcgaatgatttctcttttttgttgatcatttgggtctgtccccatttcttcacccatttgatcaactgatgctgattgtgagttatcatttcgctcatttcgttcagtttttatcaaaatttcttcacattcatttttgtcccattcttcgccgaatatttcattaaaatttgttcggattttgccggattcaattccaaaatcaaagaaaattgtaaaaaatatcattaaatgccacataatcttaggatatttattaatatatatataaaaaaatttatgaatttattccttcaaatgaatatatttaatgttaatattcattttaangttacttttcccgtttttggggccaaaattattttatttatttatttatttttttaatcacagagggcgcggagaattgctanagctactcaccaaattatttctgaggcataaatgccataatttgagttatatctcttcgaatggatctgcattctattagcttgctgttgatttaaaaaaaataatcagctttgccccaaaacgaaaa

SEQ ID NO: 22380 - DNA, 1865 bp, Heterodera glycines
  unsure (1)..(1865): unsure at all n locations
gaggaacacgtcgcggcgagtgataaacacgcgccgacccgcaatttgcaagataaagtcggacgactggtgcgcaacgcaaactccgtgctgtacaagcaattcgcgcagcgcaacttgtacgacatcctccgatgtcatttccaacgcattccgaatgtgcacacagtgtttgaactgctccgcaacggtggccggcggttcagccgaactccgcggcgcattcttcggctcattttcgggcgctttgtccaaaagtgttccgtaccaaacctggcaaaattatggattttgtattatggttgttattctaatggtgccatgcctccaaatatgcatcagagaattgcactttccgtctaagtttttccatcgcgcgttgctcaacctctccgggctgttccgggaattgggcatagtccaaatccgtctcgttaatttctataggtcctaaacttaattgacctcataaatgtcggtttcgtcatgttgtgtcaccgctcaccgaattggccgtggctgacgaccgtcgcgccattcattgagacggggtgaaccatcaaaagtgggttttctgggaatgcataatggccaaatgagcaagtgccccgctgtcgttctgcctcacgacatgtttcgaacaattgaagtctgaaaatggttgatgaatgttaacaaattgggtgttaaattttctaattgggtctttttctcgcctgtactgatgcaactcttcgctcatcgacagttccaattcgttcagcgaaatgcccatgaccaatccgatgctttggtttaattccttctccgttttgtttccgcttggctctatcagaataagcaaagggaggaacagaaattgcaaactcgcgatgggtttgcgttcgtcataaagcttaaaaaagtgaatggcaaattaataaacgcagcactcagagaaagcgcttttccaaccaacttcgacatgcgttccgtcaagtccaatggtggaaaaaatgtaattggaaatgtcgttaagttgataggcgagagggtacctaatggccaatttgaaacccattaaaacaatgccaacaatcaccgcctccactcacttcctggcctggatgaacacgtcctgcttgagcagtgcgagtgccctctgtgccgggcattgaattggcagcagcacaccgttgggcaggtaaatgtcgaggaacatgggacgaatgaccgtggagtggtcggaagggacggcattttttgtttctccgcttccgattgaggtggtgttctgaaggatcagcagttcgccctccggtgaggtctcccaaattcggtgcaactgacgatgctgagcatcatcgatgttattgtaattgcattggtagttaagggcggtggttgagggaggcggaagggaagttgggtgaatttcggaattggacgaagaagggccgggctcactcgggtgcattgactggtgttataatacacaaacggcaaagaatacaaattgagttcaacttcacatgacataaaataatcaaagacaatttttcaatattgtttttggccagtaaaaagcaattacctaattttaaatttggcacttttttcgtttaattgaccaaatgctttttttgaaaaaaaaaaatcaaaggcggcgtttctttgttttgtgcccagcgattcttttgcaattcaaaaggttcccttaatccactaaataagaaaagtgcctgaaacttgatgtattaaatatgatatttatttagaaatattatgaaacgacacgaaaaaataacatacatagacacaacagatggtcaaataacatttacatattacttntttgtcaccattctcgtcccatttatttctct

SEQ ID NO: 22381 - DNA, 1770 bp, Heterodera glycines
  unsure (1)..(1770): unsure at all n locations
cagcagttttttaaatttttccgtttttttctgtatttaaatgtgtcagatcaccatgaaggattaatctgatcatgttaatgcaaatgtaatctgcataaaaagtgaaattagagcatttttcagagctttttggcccataaatgaattgaattttcgtacataggcttaggctaggcctgagttttaggctaggtgttttttaaaatattccataaactattttcttacttttgcttcatttgaaaattagcaaaaattaattttacgatataattaagtttttgcatttaaaatacttatacctatattgatatttccaaatattttactttaatctaataattagattaaaatcaagtgcatgaatcaagtgcttgatttttgcacttttcgtcgatcgacatagcaccaaaaaaagttagaaatcgagacgaagagaaaatacagtcaatacggggcttatcccttcccaagccattgagtctaggaccaataaactaaatgtggcaaagtgccaaaatgccgtgttcaaagtgccgaacaaatcacccgcacaaccaactcactcgacatcgaatgagagaatgtcgagcagcagcacattcgggcccaacggcttcagcgttagtgagcgaggctttggaaggacgaaatgcgaaaagtgtgcaggtgaaaacagccctcggcaaagcattgcttttgaggccgaatttggacatgttgggcctcgtggttgaacacattgactaaagggagagagggcgaatagacggacggaaagcattcatttgatcactgatcagaggctaatgaatgctaatgagttttgagtcaaaagttttaaatatttgttagttagcaagtagcaagtaagaaaactgttgtattttgaaattaaaggctgttcaaaactcgtacagaatagccgagacgtctcctcaaagattggtggattgaatcgggcctgttcaaaaagtcaaataaatttagaaaattcataattaattatttataatttaagcaaataaagcttagaattggactcggatcctatcagaattttcacaggattctacttcttactcagcttttttttgaaaagtgcaccaagattaggtagggtccagaaaaaaattcgagaaaggcaaccgaagagctttttttgcatctccagtgttattgtttttaatttttcagcccaggggcgaaaaagcaggattttgtaggggtcaaattttcaaaaaattattgtttcaataggttttggcgggtgccgacaggcgccgtcgggaaaaatttttttgaattttaattgaatatgagaagaaaattagcaaaattttcaaaaattttgctcataggagtccagaaaaatcctgaacattttataataaaagttttcatatatttgctatattaaaaccactctttgctgtgctcactctgatcccaacaaattgtgccgtgtttggcattctgtccgtttcactgtcgtttttcccttcccttcgctcttttccctcaggcgtgatgtcggcttgcctttgatgttgatcgtcccgtttcgtcagaagtgccagaggggaaaatggtggcacaattaaattgttgttgttgctgttttcaagtgtggagacggcgatggcggggaaaagcgttggcaaagtgagcaaagcgccaacaaatggcaaatggggagatttncattatggcatttttccanaaatttctcaccaacggntggcggcgattccaacgtggtccatt

SEQ ID NO: 22382 - DNA, 1793 bp, Heterodera glycines
  unsure (1)..(1793): unsure at all n locations
ctccccctctcacgtgttattaaagtcttcccttctcccccttcctagtttttcccaacttcattcaaaatatttggtcgtatggacttcttccctttgcttgacatttaatgataattgtttgctccaaataaaattatatataaactgttgtcggacacaacaccctcggattgacagtgttaaatgatctgtgtatttggggagacatcatccccacagactcatttctgttgttgggtcgccaatgaccctgacgaaattggttgggagagaaatttgttcctctcccttggaaattgttcctctgcatttgaggaggaaaatttcggggtttttcttccccacggaagacttgtgtacatctttgtacttcttccttcacttcaacaatggaagtgtttgccttgtgtaggtcggaacaatcaaatgttccacctgaacgcatttccttctccaccacttgagtgaggagatggtatggcaatttggactttatcgtggaggccatgaacttattttgttcattttctccaaaatctgacagctgctgacaaatcctttcaatggactctgagaactgcctcagagattgaaccgaatctgaaggttttggaagatggagcaactctgattggagtgtctccacaattgacttctcatccccaaatcttttcttgaggatttctaccactcgcgggtagttttcatctgaaggcgggtacaaatcaattgctctacgagcaactgacttctcgggaagacatcccaagagataaatgtgttttttgaagtcttcaatttgaagactttcaactgaagtctcaaacaacttccaaaacaaaggccattctcggggctcacccgagaactttggaagggaaatgggcggcagcatcacttcatgacgctgcggagccacaacaacttgtggctgaatgttttgagcaggttgttgaacctgagcatggtgaacgacatcgtccccttgctctgagaggcctaaagccctatcaatggtatcgacaagccctcgggcttggtcggcccattccatgaaggcttttccttcaggtttgtagtccttgtagttctgctcttcctcctgaagagcaggacctttaactctgtggaagactgcctcccacttgtcattgtttttctccaacaatgacactgctctacagagattttgtctctctgcgagcaaatctgttttgatttcctcagtcaaatcttttgtcagattttcctgagccgtctcaatgtacaacttgagacgcttcacaatcggcgcgattgtgattcgcaagagttcactcatctcttacgaatgttggacaagctttgttcaaagcttggacttctctcagttgagggggtaagctacgactggagcttgaccccaacggggctccaatttttgtcgcggaatggacaaaaaatcactggaaaggaaatctttccctctaagggaattctttcctttaggcttttccttcaggtttgtagtccttgtagttctgctcttcctcctgaagagcaggacctttaactcggtggaagactgcctcccacttgtcattgtttttctccaacaatgacactgctctacagagattttgtctctctgcgagcaaatctgttttgatttcctcagtcaaatcttttgtcagattttactgagccgtctcaatgtacaacttgagacgcttcacaatctgcgcgattgtgattcgcanagagttcactcatctcttacgaatgttggacaagctttgttcaaagctgga

SEQ ID NO: 22383 - DNA, 1349 bp, Heterodera glycines
  unsure (1)..(1349): unsure at all n locations
ttcttttcatatcgaattacaatttacttttttatttacattgtttttttaaagagtcgattacggtatcccctttggtaattactgtatttttcgattatccaattttccaggcgggtgacgaccttcgccaggatgctgttgtgctgcagttggtccgcgcgatgagcgatatttggctgagtgagcagctcgaccttcgcatggtgctcttccgctgcttgccaaccggcagcaaaaagggattggttggtcacggcaatttgcctaattattgcaactattttgatatactggtttccattttagctgtttataattaaattaaaattagtctttttgaatgtttttctaatatttttaatttttcttctggcgctttaaaataatttttaaactttgtctcgtcaatttaaatgactatcataacatttttaacagattgagcttgtgcccagctgtaaaacattgcgcgagattcaaattgtcagctcgggtgccgctggcgtgttcaaagacgaagtgctcaacgaatggttggcccggcagaatccgtccgaattccaatataaggcggtcagtaattaagcaattttttcaggttttcaaattgattttcaaggctttggaaaatttccggcgttcgtgtgccggttggtgtgtggccacttatgtcctgggcattggcgaccggcacaacgacaacattttggtcactaccaatggccacgtgttccacatcgactttggcaaatacatgggcgactggcaaatggctgccggcttcaaacggtgtgcaatcattgtgattaaaatccattctctcaaatttaagaattcgaaaatggaactaatctattctattggattataaaatgaattgaaatttcaacgaaattttctttaaatcttgctggggaacagaatttggtagcctaatagaagacctaattttggttagatttctcttggtttatgtggtaattgttgtcaaaaatgtgaaaaattttataggccctaaaaatgcctaatttcttcgccattcccttaaagtgctcttttaaacgctgtttcacccttcagctaattaattaccaccccctccctaaattcgcttgcagagaccgtgtcccatttgtgttcactcccgaaatggcctatgtgatcaatgggggccaaagctcgancgaacacttccagcgatttgtggatgagtngtgccatgcgctgaatctcttgcgaaaaagtgcgccgaccgtactgaacataatgcgctttctgagctgctcggacatccggggaatgtccatggaatcagtagtaagctgaattataataataataaacta

SEQ ID NO: 22384 - DNA, 1480 bp, Heterodera glycines
gagcgacgcacaagccacaatgcttttcacccaaatgatcatggattcgctgcagagcaaattccctcggctgaatttcctcgcccacacattggcccaatttcggggaaatcccctcgggggccgaagcgaggacatgaacaggctcagcttcatctccgaactttacaagtgagccaggaaagtgatatcaatcagcagcataaggcacagcaagattcaaggacacaaaattgattaataacttaaaaggacattgaaacaatgcccaatcgggattcgggatttgagatggggttgccaattgaaatccaatgccaatgacgatcattagagctttgaccaaattgcatttgaagtgcacgactttgtcctaaataattcactccctctccaattactttaaatttaattgctaaattttaaatttttagcgaaaagaatgaaggtcgtcttgagtcggtgcatgtcaattcgtacgaaaaatggaaaaacccggagaaaatttatgtaagttttgttcatccgccatattccttaagcttaagcaatgacataagataaacggataataatggctcattttgcccccgccctttctcagatgtacaaattgttggtgaaacggcagcaggaaaatgtgaccacggtgatattccggtaataattaaaaccggaggaatgcagtaaaacaacccgtaatcagtgacttggaaatcaaaaatttaaaatcccgaaaattcttttccttacacaatgcccatgtgcgcaggtcctttgccgagttccaagagttgcactggaagctgtgctaccgcttctccagccgtgccattccccaactgtgccaaacggtgaccttcggccgcacaaacattcgcacggtcgccgtgcggcgtcaggtggacctgcagtacttcttgcagcgcttgttcgccctgtccgacgaggtggcacactcagagttggtctacacgttcatgcactccatctaccgcgacacggagcccgaggcacacaaacagagcggtaattattaattaattagttaattggcctataaatatagaaatttcataagccagtcactttccaggattgaacattagaaaaaattaattgaatgataattaattattaatttatcaccgtttaaactgtttggcagatttattttctatcaatttcatttttaaaaaattaaaattatccatttaaaagcgatttccgaaatttgtacggacggcgctttgtccacccaatgccaacttttgctgcgcttggcctgggaagaggcgcagaataagctacgcatttttgttgggcatgccaaaaacttgccgttggttggccgtgagcaggcgccagacagttacgtgaagagttacctcagatggacgggcaccttccgcggcacaggcgcgccaatggaagcgcaaaaacgcacgtggtgcgcaatgcgcagaatcccacgtacaac

SEQ ID NO: 22385 - DNA, 2141 bp, Heterodera glycines
caataggcgattggaataaatggacaaaaaagcaaagtcaaagacaaaaccttaaagcaataggcgattggaataaatggacaaaaagtcaaagacaaaaccttaaagcactaggcgattggaataaatggacaaaaaagcaaagtcaaagacaaaaccttaaagcaataggcgattggaataaatggacaaaaaagcaaagtcaagaacttatcctacctaatttcatggtggcaacgaggcatttgactcccttaagagagccttccttctcatgtacttgtacctaaaatgttgttggcacaaaaagtaaagggggaaaaagaagacaaatcatccgatcaaaggctaagtctcaacagatcgcagtgtaaaagctgctctactgctaacaaccccctgaccagtagtcaagtcgtatacaagtgattttgcgccccgacgttccaccatggcacacgagtgctacggctttggcaatgtgcgagcaattaagcacgcacatcgggccagatgctggggcatttgtgctgcaccgcaagcggcgcataagtagtgcctcccgacaccggggagcaagaatattgctatcttgcctaggcgggattctgacttagaggcgttcagtcataatccctcagatggtagcttcgcaccattggtctatcgaccaagcacatgaaccaaatgtctgaacctgcggttcctctcgtactaagcaggattactatcatagcaacaggtctttagtagggtaaaactaacctgtctcacgacggtctaaacccagctcacgttccctattggtgggtgaacaatccaacgcttggcgaattctgcttcgcaatgataggaagagccgacatcgaaggatcaaaaagcgacgtcgctatggacgcttggccgccacaagccagttatccctgtggtaacttttctgacacctcttgctggaaactttacacattcaaaaggatcgataagccacgctttcgcggtccgtattcgtactgaaaatcaggatcaagtaagcatttgcctttttgctctacgagaggtttccgtcctctctgagcttgccttaggacacctgcgttacgctttgacagatgtaccgccccagtcaaactccccgcctgacactgtcatcggcgcgggtcgccgggccaccgggtggcccgacttaacaccaaaatggacaccctttcgggcgcactcccgttttaccgattaagtaaggaatcgatgaaagtagtggtatttcactggcgccttgcggctcccacttatgctacacctctcatgattcttcacaaagtcagactagagtcaagctcaacagggtcttctttccccgctaaatttgccaagcccgttcccttggctgtggtttcgctagatagtagatagggacagtgggaatctcgttgatccattcgtgcgcgtcggtagttagccgacgaggcatttggctaccttaagagagtcatagttactcccgccgtttacccgcgcttaatcaagtttccttggcttaacattcagagcactgggcagaaatcagacacggtccccctccacaagtttcatcctcctcctctcttctatttagacctccccctctctctatctctctcttccccccctccaccctctctcttcccctccccctctctctctctcgtcccctccccctctctctctctatttccctctctctctctctctctcttccccatctccgcattccgcgcattccatcgagcgaacacggcgaaagagtttgaaggatatgtatgggcggatgataatacgaccaattaacagatagggaagcggggggggggggggggggcggcagcggcgactcattcatccgcccgttttcaaagcgccttcagtcattcatagacggacactggaaggaatacaatgcatgatattccttgattctcttcccatctgttgcatccgatggggaaattgacggactgtattttttagcggtttttaaaaaattttaattaaaatttttgggaagagcgatgccgaagcgccgccagaattttttttttttatggaatttgttaacaaatttatttatttcaaattgtcaattgaggttttcttaaaaaccatca

SEQ ID NO: 22386 - DNA, 2602 bp, Heterodera glycines
agaatttcaaaatcgacaaaaaatgcatttaaatattaaattgctcaaatttcacaatattaagatttgacgcagaaatgctaaaaccctcactcgtctcaatgccattcatggccaagtgagcgcggagtgccgtccgttccgcgctcgaccggcacagcaaacagaacagccatggcgtgtctcgtggtccacagcgtggcatttgaaccaacaagcgtttggcgaacagttgagccatgccaacccggtaccaagtgctgagcacgcttcgatgcccaattatctcaggcaatttgtccaatacgccgcatgccatggcggcaccaagcccattgattttgccattaatcgccgactaaataattcacaaaaatgtgtaagaatttaaattgtttcttttaatttaaattttgtatagccaaacattcattgactgattaatgatgacctcaaaatgtataaactgtaagctccttgtgtacccatggtttgccaaactttgcagatgtgaaccaacgcaagagtctcgtgcaagtacaaatccaccatcgccagcatggacaatcggaaaaaggatttatttgttttggtaggacttggatttaattatttaattaatatttaagaattatttgattttttttttattaaaccttatttgagtttaagctagcgcaagtgtaatcaccaaatgtaccgagcaatttttcttcaccaactgatgatagtgtggtaatgccaacacattccgagatgtcttctatctaatttattatttttaatgtttaaaatttgaaaaaaattttgcatgggtctaagattataattgaaagtgtgctaaaccgaacccgaatttctggatccaggaagactgaaaatgggagttctcgtctttattttactaaaatcccggactcggatcaggaataattcttgtatctaaaaactctaatattcacgaattccctacgggctaaatttatgtttgaaaatattactaatatccatccatgctttttgcatccggccgcaattaattcaatgtcaccagctgggcatccatatgaatgtgtgacaatcactgctctgtacaaatagccaaaataattatttaataattatttattattaattatttattgttttaattatcactgaaaataatcggtcgtaattaatgataattctgattcagctttataaattttatatttgtttaaaattaaatgttttatgaaaaagtttattttgataacaaaaaatgcataattaaaggggcataaattaaaatggaaaattcattttccaatttgtaccctccaaaatcattgaaaatctacaaaattcttttgcaatttttctctcaatttttgaattgtttttcacttgatattttcctttttcttctttttttaattgcttcaaatgttctaattattctcttttttgttcagtatttggtcccatttttgtgttttgatcacttttggtaatattttgatcattttgcatttgatcaattaattcggttccattttctgtattttctttgccgaatattttattaaaatttggtcggattttgcaggattcaatttcaaaagcaaagaaaatattgtataaaaaatattatatgtcataaattcattttggaatatcgaatttattgcattaaatgaatttgtttaattttttgtccgctttttaatactaatattaattttatttgtattttctcttcaataaatcgtttccaattttaaaattgtcacgtaattccggcggtaaaatcaatttttcgctcagatgaaaaaagacttgccgtaaaaaaaaattaatttgttataaattttatattttaattcatttgaatttactcaaagcttcggtgagatgtaaattatttttgaattttattagatcagttgtataaattctaagacattgttgcaaaattgtggaccattagttaaaatttaataactcatttatatttatggcaattgaaattaattatttgagaggttaaaacaaaacggacaaaaaaattaactggaagaattagacgattatctacctctaaaagtcggtgttttttttatttttctattttttaatataatttttaggtgtagtttttttttaaaaaagcaatattatttttttagtaaaggttacttcttaatagggcgcaaaattacataaagttaaatttatttatttattaaataaaataaattcgtaaacttcctttttttaaaaaagactttcataacattttcccccttaatatggacatagataatttacatagaagcttcaagccaagataaaatatatttttgtccgtttaagacagtccatgaaaaaaatggaatttcattataattttacgccccagtcaaaacttttccaagatttttccgtgcctggttttctgagttgccgctcgtaacagcagagaccaacttggattatagtcccattcatcagcagagtcaacaaacacgggattggcaccaacattgaggacggcatttgagacagcaacaaatgttatggacggcatcaaaacatcggcacccggtccaatgttagc

SEQ ID NO: 22387 - DNA, 1804 bp, Heterodera glycines
gccgtgatgagacatttgcgccgcgccatttgcgccgcacagcaaaagtggacacttgcgccgcgccacttgcgccgcgccacttgcgccgcacagttgcgccgcggatattttcgccgcccagcaaaaatggacttttgcgccgcgctgtcaaaaatattatattcataaaaattccactattatcaataagttttactaaaactataagccatcgacaaaaataactaattgaaaattcgaaaaaattactagtcacataggttcatcaaagatatgaaaaaatgattaagaatacaaactaacaaaaaactgaaaaaaaaagaattttctgtagaaaccccaattatttttttgcttcgaaaaaagaatgaaattcaattcctttgtaattaattttctcaataagttattttcatcgattttattttaatttcattgaaaaaacgcactgattttcaaattttcgctcctattttaccatttttcgcattatttcgaaatttttatgcccttatttatttacctatttttttcgtttaaaatccgccgcttaatgatcaggcaatacgaaggcttgttatcgcatatggtcccaatgaaaaccaaaatgatcaagatttgatcaatcattacatgcacttcaatatggaattgacatgaaaggcttcgaaaaaggaattaataatgaatatctatcattattctattaagcacataaatttattttaatcagagcgcaaatgtcttttttcgctgtacggcgcaaatgtcgcggcgcaaaagtcggctaaccattctgaaaagctcgcatgaattctattctataaattttttatgaatttttaaatgtatgcatatttttagcgccttttttgatggctttttttataacgacatagcaccggggcagggctgcacgaaaactctaaaaaaaaattttcgtatacgaaaacgaaacgaaaaataaaattttgaaaaccgaaaacgaaaccaaaaaattttggcggacgaaaacgaaaacgaaaaaataaccattttcgtacgaaacgaaaaaaccgaaaattttttaacttatttcattcataattaagaaacgtaaatctttaaaattatatcctcaaactgagtgtatgcagatcatagtaggtggaaaagcggatatggctctagtacaggggtgtgtgattgaaaatttttcgaaaaaataacaccaaggaaaaaataaaattttgagtcaaaaataaggaatttttcaaaattgcttcagctcagttatttttataactgatccatcaaaatgcacataatattatattttcacatcccattatccattttaaacaattttggggaagaaattaacaaataatacatttcagagcaatagggttaaatcagattttaaacaattttttgttgcggcgcattttttcagaaaacttgaggaacgtggtgggcccggcggtgccgataggcgccgctggggaaaattttgagaatttaagtgtaatttgttaacagatttagtaattaaaatagtaaattaaatgaaaaaaaacggtaaaataaagtgcgggcatatgggatcgaacccatattaaaaaaacaacaaaaatctgaaggtgcacgactaaactacaacggttcgatgaaaccacttattttttactaaaaaagtcgttcttaagggtgtaaatattttcgtctttttcgtcgaaattctgtctgacgaaaacgaaaagaaacgaaaatttaaaaggtgaaaccacgaaaacgaaacacgaaacgaaaaatgaaattt

SEQ ID NO: 22388 - DNA, 1064 bp, Heterodera glycines
cgcaaaaaaagagtttttaaaagcaaaaaaggccgtcactttgatgatgagactcctacgcaaaagttcggtttgcgctacccctttttatgtgtttatgatcttaaaaaaatacacttgaattaatttcattaagatttctcgattcccgagtcgagaaataccgtttcccgggatcatttctcggttctcgtatcgtttctcggggtcatttctcggttctcgtatcatttctcggggtcatttctcggttcccggtaaaaatcacttctcgcacagccctattgtttagtaaacaatgttctgcttcggatgatttaaaagcagtctttcagttttactttagatgtcacttggttttggtttcgattcgtttatttcagttaattggtttgctaaacccatttattcggtttagatttagttaaatcattctgtagatttcagttcaggtttgcatcgtttaaacctgtcactcggttttgttctgttaaccaattcacttataaattagttcaacgatttaaccgctttttattggttagtcgcggtcccacgaaatgtccaaaagagtaaaaagctgaaatttccaaattctataagctcataaaaacccggaaaatgagtctaatttaggattttcggggtcgcgaaatacaaatatgacctttaattgcccaattcctactgttaagccaagtatgaatataaaatagcaaagattaatctgatagcttctacaccgtagggtgaccagaattcgaacaagttcatggttcctaggtgatcagaattctatctctatacacactctcaacttcatgtctagaaaataaatttattaaaatttccataaaattcatcatagaacaatgaaaatcgaagcatcagattttttcgaaaactcggtcaaggcgccttgaattttgacttttctgtttaaaatttttgaaatcaaatgcaactataccattcgatacctcgtaaaaaatgctacaaaatacaaccatatatttaggctttaattgcaatttacagttacaatgacaagaaaaacaaataaa

SEQ ID NO: 22389 - DNA, 1304 bp, Heterodera glycines
aaaaattagcgctttactttaaataagtctgttcaatatttattagtgtcggggttgtatgaatcgttttccttggttctgtctgcatttggcttgctaacgaaaattcgaatttttgaaaattctcactattccataaaattgattaaaaagggctaaaagtagtcacaaatcattgaaacatcaaaaaaatgatcttatcatattcgtgatcggcgacctcgaaaacccccgggtacttggtttcaggactttttaaagcgaaaaaaattgaaaaaaaatttaaaccaaaaaaaagtgcaaaaaatttttttgagctctctttttaaatagcgccattatccctttcttgtcaagaaaacaaataaatacattttggaaaaaattggtaaaacctaaaaatgtcatccaaaattatgagacacaatatgatatttttgattggtttcttacagtttttttctgaaaaaagattccattaataaagagacaatttttttatatggtagtcgactaagagccacataaattggccattaacacaccgtttcagtttttgcctcccagttccaaaaagatttgaatttttgtctcagtggtatatgtgctagtcaccaaaaggggggttccaggttcgaatccgatgcatgttaacggacgtttttggtgattttaagcaaaaaacgacttataaaatgacaaataaatattctgaaaaataaacaaaaatgataaaacattttgtttcttcactttttttttgaaaatcatcctttaatccaaatttgttaaattacatcaatttggcattcgtcatcaatttcttccgccacttcttcatccgtgtcatcctcgcccttcctttcttcataattctaaagatagtacgccaaaaggagacaaaaaattagagaaaaaaagataatgtttttctctggcactctctatttattggtacacatctcgttttttgaaacggtgtgtaaaatatgtataaaaaacactaaaatatgtatgaaatatgtacaaaaatccagaaatatgtactaaaatatgtaaataaaattttttaaattgtgatttttttgggaaaaaattcctactaaagggtgaaacaggcacaaattgccataaaaatgacctaaataggcttagaatcaatcatcttttagtatttaaaaaaaagttagtttttgatatcccatttcaaaaaaaaaaaaaattatttttttggagcacactttcaaaaaatttttacttttcacaaaaaattctataaattctcaaatttttgaaaaaattgc

SEQ ID NO: 22390 - DNA, 2411 bp, Heterodera glycines
  unsure (1)..(2411): unsure at all n locations
gttaacaaaantttgtcaaaaaattatcgaaattttttgttaaatttgcggttttaggctgtttaaaaaaagagaaaaaaataatttttaaattgaaatattttttattaattacaatttcaattgaaaaataatttaaagaaattataaaaaaaattctgtaccgttgaggaattgaacccaagagaaaaataatgaaaggcaaaaggtttagccaccagaccatatttgaattggagctatataaaaatagagaagacattaactaggagagaaagagatttatgattttcgcgtaaatttgaaaatttttctgactgctcaaaagttcaatctttagggggtgtattttcaactctcgcctctcgtcccaaaaaacgagagacgagaggcgagagtaccaaaaatggcgagagttggcgagagacgagaggcgagagttgtcccacccctgttgtgtacctacctattttggaattttttaaagcctaaaaatgccatatacgcggacccggttattgtacaaatagccgggcctaacctaccctaaaaactaaaatagttcaattgcttaaataaatgaaattcttaagaaaacgtggaaataagaaaaaaaatatacaaaaaataaatgaaaaatatatttttatacaaagtaattaattaaaattaaagaaattataatcggtctacaataaataattagtagtataatgcgtataaattcaaaaattttaattggactttataaaaatgatcaattaatctaaaaaataaaaataaaagtaataataattattatcttatgcgaatgaatcgccgctagagataacttaaacgatatagttaaaaagtaaattacctacttaatatgctgattgcacgcaatgaactctttttcctaatggaaaaatgagaaaattagaaatattcgaaattataaaaaattttctgatcaaaaatgttacacatattttatcacttttataaattttttaaatatataaaaaatttaatgaaaatccatttgatcaaataattaaaaaaatacaaaaaaaacaaatagttaactttacccttataaaaaataaagacaactattattgaaaattaatattaatttctataaaataaaaattaaaattcgaaatgaatgaatatgttatattttaagcaaaaagaaatttataacgtacttaaaaaataaatatactcaaacatataaactaatttgaagaacctatttcttttagttaaagaactaatttatatcttgaaaaaattagcttaaccacgacacgaaatccaaaataaaatgccaaatgtaagaaaaaaactcaaaaagaattgaaataaataaataaaattattgatacaaataaacacttcatgccataaattccacatacactcgagcatctaatatttatggggagcatgatgaaaaagccaaattggacgtgaaatttttaatattcaattatcttactatttaattattccaaaaaagtaaattttagcaaattattcaataaaaaataaaaccggtaaaataaagaatgaaaatttataaacatatcggcataaataaaataatacttaaaacaaaatgacttaactttatttcaaaaattagaaagcagacaattaacgttaaaacagataattgaattaaacatcattttaatatgagactgcgatttttaaacattaaaacatttgaaaaagtattaaaatattcaaaaagaaagtaaatataatactatcgataagaattgatgataaaaatataaaaagtgtaaaaatccaattaattcttaataaaacaaggagaaagataaccgtggaatttgaattaaggagccgatgaacattcccgaaagcttatcatgtaaaaacataaaaaagtaataatcaataattcaaattcaattaaaaaaattaatgaattattttagtgttgaatataatatttttgctggctttgtatgcgaagcgtaaacttaaacctgtattatatgatcaaaaaaataaaattaaacaaacataaattaaaacaaagtagattttgaacttttacatatattttcatttttatccaaaacctcaaaaatgactaaatttgctattaaaaataacattaaaattaaatattacaaaattatatcattttttttgttatcaggaaaataatacaactaaaaaataataattttggtatcggaaaaattaatccatttttaaaacaacaatcaaccttttcatgatcagtttatcatattctttaaattaaaaataataaataattcaataatttccaataaaaaaatttttgattgctcaaataaaaaaacataatttcgcaataaatagaagaaaaataaaaattttaatttttttttatttagcca

SEQ ID NO: 22391 - DNA, 1566 bp, Heterodera glycines
ttctgttgaaatgtgcgatatttacgctctcaattcgtaggtttttagggttttgcttatttgtcaccctttgattttttacagaagcggtctttcatcggtttcaaattccccagtcgcaatgtgtttttcttgacaatggattcttatcaaagcgttatcgtgcttcgacggattcgttcaataagtcatccgaatgggtgtgagttttaacttttgttcattttttttttgcgatttgtccacttgcttagaaaagcactaagacgtttattattttttgatcataagttttttagcgcttaattgattggtttttataaacgaataaccgaatttattttgcaaggcgaaagtacgggcatttgtcttttctggagcttaacataccatgtgaagaatatgatgaagacgaggaaaatgaaatcgaacaaacagaaagtatataaatgtcattaaaaagtgccaaaaaggtatgattaattagccgaaagttaaaaaaaaaacctttgtaaacaaaatttataaaacaattaattttgcttagaaaaagtaaaatattttttgtcatttttgatcaacaaaaattttttttgttagattcctagccttagtgatcagaatatgaatgagttcaaacgaaatcataacaatttttattgtacataaatgaaaagaaaacaaaatgagtgaaaaagatgaagtggctttggtttgaatgtgtccttttcactacgaaatgaatgtctcttttttggtgatttgtctgtccttcgtaatgctcctcctcctcttccctttgctctccccttcccttcatattttatcctttggcacttgcttcggaagcgcaattccatgtgatttttccatctgaaacgttcatttcagcagaaattcaatttttttttttcatacctttctggccagcgattggagggtcacacaaacagagaaaaggtcccgaccttcaagcaaatccacggattggaaagtctcttggtcgatgactcccattttacgggcctcgcttacctaagaaaaaagcctctctcaaaataggacaaaacttatgccgacccattaattgaattatgggttaaagaaatataaataaagagaaagctgacaaattggttgatgttctccatacaactgaacgggagggaattgagcaaagggagggaaatgaccagcaaaatcacttgaaatttgaaatcggcttcataactttcttcacaattccgggctccactgcattcaaaaacctgccaaattttcaatgtccgctggtcactgccattccattcacctgcacagcaaagtcccatctttcaattgctcccaaaaattcgtgcgctgtccggcagtggaaatctgcgagtctttcaccttttcgtttatccactcgagcagatattgcccttctaactcgttgtatttggacttctgcttgtccagcactgctcctgccatcccttaaaccatcggtcggttgcctctgtctgataagcgaatcgaattcccaccactaacctccggggcggggacgatgcgtgtaacttg

SEQ ID NO: 22392 - DNA, 1008 bp, Heterodera glycines
  unsure (1)..(1008): unsure at all n locations
ttagcgtgtcccggtgggaatattagccgattaacccccccccccccatcgtcaattagcaataatttgattcccttcaatttcagctgaactttgtcttctgtcaatcgaccgcgggtcgtgcggggggcgtcaaacgcgttatgcttttgaccggcaaaaagtggcgtaaattaaaattcgaaattaaagtgtcaattcagtcccaatgcgtgccatttgagtacagcggatgcgggggaaacctcaacaattttctgacaatgcaagaatgccagcaaatttgtgggaatgtgcggagctgaaatcacggctaaacggccattgttcaaatttttctcagaaaaaatttataaaataatgaaaatatttttccgaatgttttttcggaattcactgaccaaaaccggggatcacagaaacaatttgaaaagtaaaggcaaaaaatgtccgttcttttcctccgttccgtcggtcacctgagtgagcacccgtcgtagtgggacacaaattcgaattccttttccggaaagtgcacaattgtgcgccatgaaagctgaattgttttgtttttgtttgcgttggcattctgttggctttcgccaaatcctccgacctttgccgcctttgccattcgcattttcgcaactttgcaatgaataccttcgattttgggcaacgcgcatttgaccgggccaggacagaagttgggctttctgttcttctgtgaatagaaaattcggttgtaacagtcgaccatcatcggcaggtaattctgcgcggtgggcaatcgtcggaacgtttcgccgtgggcggagagcattcgaacgaacgcggactgaacacgcgcgagctgacgcgcgtttatgaggtcggacagacgcgagagggggccgaaagactgtcgaaggattgnngcaaaagtgngagagaacggaagggcgtcgaatggcatccgattcatttcgatatgccccattaatctccgtttatcccccctcaccaatt

SEQ ID NO: 22393 - DNA, 1597 bp, Heterodera glycines
agaaatgctctggatgtagaaaatttgaagctgaactccgaaaatttcggtaaatttcgagagtgctcaacacaatttgccaccgctccatgtaaaagagcggactgaaacaggcggcgacgccaaaacgccgcgaggaaaaggccaatcggaaggggatctgaacaagcaatcggagagaaatgaatctccccaaaataataatgttatggtggtacatcgacggagtgcgaattgaccgtcgtgtcggagagcgacagccgtaaaaggttcggcagagtttggcaaatgccaacgtacgccgtccatttgcaaatgcccaccggctgatatgcccaacggatctgtgctcgactgactctgaaaggcaaaatcgaccaatcccaaagcttcgcactttgcttctcactttgtgtgcgttccatttttggccgtgcaaatcaaagctcgtctcagccttagaatctttgttaaaattttatggtaaaattccttaataattgaaacagattaaaatgcgcgagaggtaattgaagcggatgattggccttcgccggtccccccccccccccggccattcttcgcttttgccctttgcttctcaaatttcccacctcagcggggctcttccccatccgtagtcttctgcgttgatcagactgactgccgtgtgtggttcatatcttcagttgttttggtggagaataaccttacaattatcataaaaaatttgggttaattacatcgccgaattttgatagacagtggtggagatgaacaccaaatgatgttcgatgcggtcgaagaagaagttgagggaggtgaccaggagcagaaagtacaaagtgagctgagcatttggcggagggtcggcgcgcattttgacactgtcaaaggcaattaaggaaaattaattaataaaattaattaattaacgtggcgagatccatttggcaaaacttaggcaattagcggcgaataagaaaggatgtgcttgggagtgcccaaagcgataagaaaaggcccctcgggggctttcccccctttccccccattcaccgccgttcaatcgcgcggattgtccatgcaaaagttcgccagaagagccgaaaaacgataagctcaagcgaacagcaaaaaaagcggaggaatcggagccgacggatgggaaaacgcattttcaatgaatggggcggagggattggcggggggcgggagggaagggcaaaccgacgccctcgacggaatgggcgcttaaactcgtccctcccagcccacccaagtgaggagccggttctcgacttgagtaagtgtcccgtatttccaagaaaaattgaaaaaaacagaaaaagcatttgtcattcaattgtgccattgtatgaaatttttataataaatccaacaatattattaatattgatgcactttctaaattgggaacagaattaaatgaatgccaaaattagccaatggaagagggccaattgtttgccaattgctgcgccgcttttgccgttgcaatttacatccatcaccacaccaactttggctcttttttgcgaaatcccaccccaccactctaaattgcccatctttc

SEQ ID NO: 22394 - DNA, 1303 bp, Heterodera glycines
  unsure (1)..(1303): unsure at all n locations
gggtggggaggaggcagtgacgttttaacccccccccccatccctcggggaggaaatcaatctgagcggacaaaaagaagcaaaagggacagaattggacaggggcgtgttgccagagggcggctaatttgaaaggggaaaatggggggaggataagcaaattatgcacttaaattagcaatgcttttctatttggtaaacctatcaaattaaaggaaaataaaatcataaagtaatcagaagaattatcaaagtgttaaaatgcaattgatctctgcccgaagttggcatttccttccgatcagttccaattggttccattggtcctctgtaagaccaattaatcgctttccgttcattttgtccccatttccctcctttcgctcacctttcggcttccgtccgtctccctatatttgtttgggtcgtggtaaattgtcgcgatgggatgccatgcaatttcttcttccagatccttaaaattcctccgcacgcaattcgtttctctttttttgttttactttttctgcttcgtcccatccgtgcccataagccacgagcggatacgcttcttccccgtgcttccaaatgtcgattcccttctgctcaatttcgggcgcaactcgaaatttgccaattattttgaggagtccaaagacggggagaacgacggcggaggaccaaacgataatggccaaggaggagagaatgttccagccgagttgcttcatcggcggagggtaattaggcgggggaaaagcattcgattaccgccagagaacgaacgatggccaatccatcgccggtggccaaagacggcacgacgccacggccagnggaagtgctgaccaaacagacggaaaccaatccccagagaccgcctcccgaatggnacgcgaacgcgtccaatggatcatcgatgcgcaatctgagcggacaaatgaaagaaaaaagagacaaagtgtaaaaatgagagagagaaactcaagagaaaaaagagagataatgagagaaagggaaagagagagggagaaaagagagagagagagagagacggagcaaagagatataaaaagtcattattttgatgtttttgcatttacttgccttagcataagtcctgaaagtgccatgtaaataagcccggcgccgacccccgtcacaattgtgccccacgcgtccatctgattgcatcctgcacatgcggcaatctgaacaatgtttctgaccgtaagtgccgggtcatttggatgccattcattcgaccaatggctttggcatttattcgatgctttcccccccc

SEQ ID NO: 22395 - DNA, 1202 bp, Heterodera glycines
aaaaaatgccaataataattttcaacaaatattcgcatggataattggcaaacatgcacccgattttaaaaccaaaataattaaaaacaaagtgaacacaaacaagacatctttctatgcatttgaatcattttctttttggcacatttaaagttttattctaatttggtgcaggttcgcatcgggtcgagaatgtagggatttgaatcgggtcagaaaaataaattttttatgaaattagatttggcccagcagggtcgttgcgaatgttcgggtgatgaggtctccgatttcgtaaaagcgactcattttgtatcaactcgataggtgccgccaggaagaattttataatttttagtgcaatttgttaacagactttgtccaaaaaaaaacgactccgtgccatccccgacctccatattcgaacatttggtccaaaattaaaaattctcaaactaaatgaatatgatcaacaatgtgtcaaaattagagcaattaattttcgcatggacaaatttttttacgtcgatctgatgatacatattctaccgaaatggaccaattaaataatttcattgcttaaaaacttcaagaaaaggttttaatagatagaaaaataggaaataaaattttttatttactatttttttgtggaaaaaagcaaacaaaagggaaaattttggttcgatttctgtgtaaacgaataattattattttgaatattttcttagaaaatattgacattttaaattaaaaattttgttaataaaaaaaataaataaatttttggtcgattcttatgggtatattttttggttttattgcatttttgttaataattttttaaaatcttaaaataggtaacaaaaatgccgaaatatgtataaaaggggtacctaggtaataggtagaaaaactctaaaatagctaaagatagatattataaatgtcatcgtagacaccagggatgacccaaatcggaaaataaaatgcgaaacccgaaacgcgaaatttgcgaaagtaaaaaatgcgaatgcgaaattttttctacaacttttttaatagtcaaaatcataaagcaaaaatcatttttttgtatttattacaaattttaaaaatcaataaaaagcttttttgaggcgcgctttttccaaaaaatttttggaaacaaggggcaggcggcgccggtatgtggcgccggg

SEQ ID NO: 22396 - DNA, 1393 bp, Heterodera glycines
gaccagatttactttttgaaatcccggagaacgggtggttcccccactgcaccgttagcaaagcgtattttcgattaaccaatttgggttacttacacaacttgttttagcgtgcaaaaagtccattttcgggcagaatggccgcggaattggagtgttccaagttcaactttcatgggaaaacgttccacgtcgaatgctcaaaactcgcgaatgacaaagtgtgattgtcaagatctctattgtgttatttccgtcataataatgtttatgtacctctctctccctgtgttttctttaatacccaagtgctaattattggtccgaaattcttcaatttgtatgcgtttcgtgccaactgtttaattttaacgctgcgtttttgatttaaatttttggcattagtttcaatttttcacttaggtatgtttggtcagtcattaatttaggtaaccgattcgaaaatttggacaatctaccgtagtataatggtccaattaaaattcacattgaaatagatttttttcgtgcatccattcagcatataaatttttacaatttgaaagtgcggccccaaaagcacccaaaaagcgctgatttagaagacaattttgtggttttcactaacagccaaaaccaattcactaaaactcaaaataaatttgtgccaaccaaaggcatccaaaacaaagatcctttgctccatttctcattttaaataaagagagatttcatgtgtattcgccaaaattaggaacaaacaaaaaaaaaatgcaaaaatgtagcagaaggggggggggacctttcactcaacggatttctctcgttccatcgcttttcgttgcaaaattatgaaaaatgaaacagcagcaaaatttgcatttttccgccgatctttagcaaattttggagggattccgaagaaattgaatttggcaacttttctgcttttgttggtcgtcctatgccggcaaaaactttttgaaattcaagtgagaattgttatgagattttgcactaaaattgcctttttctatggggatccatccctaattctaaaattgtaaaatgttgccaaaatttttttgtatctaaattctctgttggataagtttaatgaaaacatttaaattaaattctttcttgacaagcaaacgataaatttagtcactttttgtgctaatttttgaaaatggcaaacaaaaactgacaaatttcaacaacatttggccaacaaaactgacagattcaacaaatttataaaagaagagagagaaaacgaaaataaaatttgaaataaaaaatgaatttttgaaatttttaaggaaattgggggggggggggggggaattttggaaaaatgagagggaagaaaaggccaaaaattcaacaa

SEQ ID NO: 22397 - DNA, 952 bp, Heterodera glycines
aatccaacttgtcattgaaaactaaacatttttggggattttcatacgaatatccgctgaatttactcactttggacgacaaccccaaaaagaacaacgacgatggcgacatctgaaggcaattggtcatctccgtttctttcccccgactcgctaataagccccgcagagagtttatgggggggggggtgaagggattggtgacccaatttgggcgggggcgggaaagagtcgtcgtgtttccccctcccctcattagccgtctccgtcgtcgctagccgccgccgttcctttctcttttcccacccatccgtcccttcccttcccttctctccctttgttttatgagtatccatcagtcggtggttgtcttctttatcgctctgatttaatttgatttgatttgatctaattcgcgcggtaccaagcaggaaaattgtttgattttatcttcaacggaatgtgaaaagaaaaaaaaatcaatttaaaaaaaaattgagtaatttagtagaggggactaacaatttaatttagggttttaaaatttaaaaaacgaaaaaaaatggatgtgtaaatttatttaaaattctaaatttggcttaggaatgcgctgtcggatcagaagagttcgctcgagttattggacttgagcttcaattgtttttcgcaagtgccttccgccactctgcgcaactgtgccgagctcaaatggctgagtttggccggcaattccatcgaaggcattgtgaagatgcagttcatgtcgttgcccaatttgatggaacttcgactgcactctaacggactgaaacgaattgctgctaatgggttcattaatgtgccggcgttgcgtcatttgttcctgcagaacaacaagttgggctcgctggaccagggaacgctgcaggcgttcaacaacttcaattggtcgaccttagcaacaacaattttc

SEQ ID NO: 22398 - DNA, 1273 bp, Heterodera glycines
ttatttatttgatctatttatatgttcatagggaacatgtttcgcgcatttggggcatagccagaaatcatcaaaaaatgatgtaccgaaatgcaaaagactgtggcttttacatctcttacaaatctcgtaatgacaaggacagtaatgacaacatttaattttatgcgggcagttcatttttcaattttgttttatttttgtttgctatttatagaaggggtatataaaggggatgaaaggaccatttgattggtacattgtatcaaaaatgcaaaaaccgataatcgtaaatataattgctctcgctaatctcggtaccggtattaaactaaactctctgacgatcaccgaatgcgaatttaagtataaccctagaaaattcaatgccgcagttataaaatgcacagttcccatcaaagccacggcattattatgggaatccgggaaaatgatatgtctggggacgaaaagtctgatagactgtgaaaatgctattaaaaaatttatagaaataattaagggctcggggtgtccggggcttcttacaccggacacacggttgaaaatattgtttcgacctttaaattcggacgtgaaattgaactgaacgagtttcgaaaaaatcgtcgtgcattttatgaaccggaaatattttgcggtttaaatttcaagcggagtaaaagcatgacagcgttaattttctggaccggtaaagtcgtaattacgggaactaaaaacaattctgaaattgaggaaatgtatcattatatgcttccctatctgaaaatggctcaaaagaagttagggagacgataaaaaaattttcatttattgggacggtcccccaatttatagttctgttgggtatttattttgttatcgattacttcgcgcggcgccggcatcgcggcgcaccggcggggcggagaggaaatgcatggttttggcaaattttcaaaattcataaaaatcatcataaaaaaatctcaggatttgagaaaataaaaccgccccaaaagaaagatacgggatttgggatttattttgcaaaataaaaaattgaatttccttcacctgccacatttgtgacaggtggatgattgatgacggcgctgcgcggcggcggaatcgcggcgcaggaagggaggggagggagggggcatgataaaaaaccgcacggttttggcaattttcaaaatgagttgatttcaggtaaaaattatgataaaaaatcttaggatttgagaaaataccccaaaaggtttgggat

SEQ ID NO: 22399 - DNA, 2337 bp, Heterodera glycines
cccctggctacgggccggtgcgtatgctgtttatgctcaagacacatagatgaaagaaaaaaactttaaaaattttttttgaaatgttcgaatccgggttcggggttcagaatcggtcaaaaataaggtcggattcgtgctcagcacagtaaaatagccctaaaaaatttttccatgatttttaaagaaaaaaaaaaacgggaccagtaaactccatgattgcccataagacaacaacggttatttccgaatatgttcacactaatcaacatacataaatacaacacaatgttatgcaatttcaattttgttcgccttttcccccttttctgctgctgcatcatttcgacctttctccgtgcatccattctttggccttctcaatgcatctgatcacttcttcgtcggtggtttggcaaaatttgacgtaaaaggacccgacggcgttgaaagtgggcggcgtcgccacacaaatcacttcgaatccttcggcacgaagctggtctggatgtaatgacaagaatcattcgtctcgcagttttgcttttattcccaccaaaagtgtagagcgacccaacgggaacgcccaaaataattctgacaatatcatccaaaagagaaatggacagaatccccgatcaaaatcgcattcaacaaaacagctcgtaataatttaccattatactgtagttggacaaatgttttaaagtgccagaaagttatgaccactgctgggataatgccaatttgtaaaataatacataattaattgtttagtgccaaaggacgggtaccaaaaatggaaggatgcgatagaaagtggtgccgctttgataatgtgagaatgatctttttaagtttagttgattttcggagcgattgtcgtagtttcagccgagttttttatacaaaaaaaaaatgggggcgggtggaagccgtaaatccgtaaatggaagccggagttatggggaagcgcaaatccgaaggcaaaagtacaagaataaaggggacgacagaatgttaattttaaaattttattttttttccaaaaagcaaaaaaacaaatttttttaaattcattttcttactgtgacagggaggtcacctgtgttcgatttgaatttgtcgatgaaatggtggaaggacagaatggcattgcgattgcagatgatgagtttggcggtagtgccagtttcattcataaaatttggcatattttttaaaatttattttaccccaatttgtagcctgcggcgtgtccccagtgggccgtggcggaggatggcaattccttcagctggcaatgaatgaccaacggtgcacgaatgtaattttggcagtatttaaaatatttgcattcattttgcctctgtttccccatttttttgccaatgttttttttttgcaattctttcccctcgggatttgctaagtcttgtgattgggtattgggtataagaggttttttgaaaaattggcatcggcttggcaaaagtcgggattagtgggatcccggatacttttggtcgtccaactcaatcattagtgaatttattttgaaaatgattaagaattttaacatgtccgtcattgcttgccatgaattgatgcacgcgcttggctttcatcatgagcaaagccgaagtgatgcccggaattacatcattttatgggaaaaggacggagtaattaacaaatattttcaataatttttcatctggttctttatatgtaaagcaatcggaaattgacccatacacccaaaactttggcttcccttacgatttcggttcggtaatgcattatccatctgggggcgatcatgaagagtaagaaaaaatttaattttaatgaagtaaaattggaattaaagaggcttatacgacctgatcactttgccacggttttaccaacaaacgattggccaaaatgaacgaatctctttcaaagacgcggccataattaaccaaatttattgcaaaggcacataaatttaaataaatttcagaaaattatcatttgttcagactcatgcaaaggccatgaggacaagtgccaaaacgggggctatttgaatccgaatgattgcacaaaatgccattgtccggacggatacggtggcaaatactgtaaagaactcgaagagagtgagcaattaatcaattcaattaaaaataaattataaataaataaatttgaagatttgaattgcgaggatttgagtggaattccgagagaattggtggccaatcattcagcagtgttattgaagacgaaggccaaatgtggggggaatgagccgtgccggtgccattggcgaattaaggcaataaataa

SEQ ID NO: 22400 - DNA, 1745 bp, Heterodera glycines
taaatcccccctttgttacaccaaaagcgcccccccctcccccctttttttgggttaacctcgctgattttggattgttccaccaagggtcattctgatcccattttgtgaagttcatttcaagccgaatgcatgaatataagtcattatttgagcgttttggcggtatctttatcaaggtagtacgacaggccattcttatcaatgcacatcagttccccaatataattcaagacagtgtttggccttacgcatatttcaatgggacaaattaggcggaattaaaaaacaaatgatagtggtgactctaatgatgagaagcatgctctagaagatttctataaaattattatttttttaataagtgaaatgggtaatcactgagtaaaccgtgagtaaaaaagaaactatagatttattattctctaaaagaatgaaactaaaaattttcataaagcaattttcgaaaatatttaaaaaaattttttgaagtttatctttcttaggttttcgaaaaaacattcaaagatgtttgattgcatggagcattcttttggaattgtttaatataaacacaaattttagacattttaatttccaattggtaaatttcttgcgaaatgccccccctcccctctcgcacttcgcccaacacccaagccaacaccaccaccacgcacacacacacctacagcaacagtcatgtcatgaatgagcatggggacgaaagtgaaacgaactgcctgacggtatggggcaaaggaaggaagtagggaagggaagggaagggaaaggaagggaagggaaaggaaaggaagggaaaggaagggaagggaaaggaagggaaaggaagggaagggaatggaagggaagggaaaggaaaggaagggaagggaatggaagggaagggaaaggaaaggaaaggaagggaatggaagggaaaggaagggaaagaaaaggaagggaagggaagggaatggaagggaagggaaaggaaaggaagggaaagaaaaggaagggaatggaaaggaagggaaaggaaaggaagggaaaggaagggaagggaagggaagggaagggaatggaaaggaagggaaaggaaaggaagggaaagggaagggaaaggaagggaagggaaaaaaaagaaaaggaagggaagggaatggaaaggaagggaaaggaaaggaagggaagggaagggaaaggaaaggaaaggaagggaaaggaagggaaaggaaaggaagggaagggaagggaaaggaaaggaagggaaaggaagggaacggaaaggaagggaaaggaaaggaagggaagggaagggaagggaagggaaaggaaaggaagggaatggaagggaagggaaggagcgagtttcaaaacaacccgcctgtagagaataaaacgtaaaatgatgctgggaggaagaggatcatctgtgagaacgaagaaaatatttttagggtctgtttttgggttttgattgaagcataagggcggctttttcttttttggacggcttaaaagagaaaaagcgattaaaaagaaattatttgctgtatttttgagtgatccgaaatatccgatccttctcttttttggggaatgaggtcactaaatggcgcaaagaatcagcagaagaaagaaaaatctgaattgttgagggaaggcggtgaataaatgtgcgcagaagaggcgacaaatataatttgtacgcgttttacttggtgtgcgatgggagcggaggg

SEQ ID NO: 22401 - DNA, 2027 bp, Heterodera glycines
cccccgcccttcagagcacgacaaatatttcaacaagaatttttaaaaattgactagagcaatcgaacgctaacggacgacctaatggaaaaaaatccccgaaggagagaatttaattaaatccattccttcgggggaccgtgccgggtgccgcggggtaagcagtgctggttcgtttcatcacggcaccgaaccttttggctagtcagcaatcgttgcttaacttgccagatcggacgggtgcgcatgattccactgttccaagcaccccaccaaaagcaaaacgatataaccaaaatataaggaaaaattttttctccatcttcctttttgatactaaagcatcagagtgctaaaattaagttgtaaataaaattttggtgcactttagagcactttctgaaaaaaatatttatgaaacaaaaaaatcgattttttcaagtgtccgtttggggtactcaaacaattatggggagcaaaaatccaacgcagaattaaagtacaggctatagggaagctattcccgaaggattcggtctccccataaatctgggcgcatcggttcgggggtactgccccgaaaacaaaaaaatcgatttattcaagtgtccgtttggggtactcaaacaattatggggagcaaaaatccaacgcagaattaaagtacaggctatagggaaggtattccggaaggattcggtctccccataaatctgggcgcatcggttcggggggactgccccgaaaacaaaaaaatcgattttttcaagtgtccgtttggggtactcaaacaattatggggagcaaaaatccaacgcagaattaaagtacagactatagggaagctattcccgaaggattcggtctccccataaatctgggcgcatcggttcggggggactgccccgaaaacaaaaaaatcgattttttcaagtgtccgtttggggtactcaaacaattatggggagcaaaaatccaacgcagaattaaagtacaggctatagggaagctattccggaaggattcggtctccccataaatctgggcgcatcggttcagggggactgccccgaaaacccaaaaaaaaattttttggataaaaattatttaaatgaactgactagataatatttaaaataggttatttctcttcctttcagtatccctgcaaagtttggtgcgcttctgatcagtttctgaaaaaaaagttaagcctaaactttttggcctgtttaaaaaggaattaaaaatttttaaaaattttattcatctccctttttgatagaaaaagcatcagagtgcctaaactaacatgtaaataaaatttggtgcgtttcagaaccctttctgaaaaaatatttaagaattaattttgcaaaaaataaataaaaacgaaagactcagattttcgaaaaattttttagagcaagctagctcggcgctcatttcagtgtaagttagtcctttaccggggagtatccctgcaaagtttggtatgcttctgctcaattagcaaaaaatatgagtgatcaaactttcactaaaaagttaagcctaaattttttggcatatttaaaaagcaattaaaaaatttttaaaattttattcacctccattattgatagaaaaagcatcagagagccttattaacttgtaaataaaatttggtgcgtttcagaaccctttctgaaaaaatatttatgaattaattttgcaaaaaataaataaaaacgaaagactcagattttcgaaaattttttttgagccagctagctcggcgctcatttcagtgtaagttagtcctttaccggggagtatccctgcatagtttggtacgcttctgctcaattagcaaaaaatatgagtgatcgaattttcactaaaaaagttaagcctacattttttggcatatttaaaaagcaattaaaaaattttaaaatttaataattttcctgcacccgaaggtactcactccgcctcttcgcggcctcggggagggccttcgcccccccccctcccccgccctt

SEQ ID NO: 22402 - DNA, 1401 bp, Heterodera glycines
  unsure (1)..(1401): unsure at all n locations
ttagtgatgctcgagagtctcggtctcgagtctcgactcgagaaaagtctcgggtttttttggtctcggtctcgagtctcgatctcgggttttcaagtctcggtctcgattttcgagactcgagaccgagaccgagacttttttacacccctaatgattgttggcctttggtaacttctatttttataaattttaggttcttttttgttcaaatttgttaatatatgcgtggtccagcgggttgtgttcttggttttgttccttatttttgcgttggatcagttcccctccaagtattattttttcttctcatttttcaaaattaatgtttttttcgatgggagttcaaacacaattttaacaattaaatcgtaaaaatgtcatttttggactaaatctatcaacaaagtgcactaaaaatttcaaaattttctccggcggcgcctaacggcaccgccggcacccaaaactcttacttttattttaaaaaagtagctcaaagacgcaaaatttggtcattttttggacaaaatccgttaacaaattgcagtaaaattaaaaaaaattttcccggcggcgcctatcggcaccgccggaccctgttcccgaaacatttttttgaaaaagagcaccacaaaaaatggtgtaaaaaagtcaatcatatgaaaaggaaaaatgtatggtagcttaaataaggaaaaaaaacaaaaatttttgagaaaaaagctcaaaagattgattttttcgatttttaagtgtgtaagaaaaaatttttgaaaaaagtctagggtttttttggtctcggtctcggggttttgggtctcggtctcgagtctcggggtcgagtcccggtctcggggtcgagtctcggtctcggtctcgagtctcgagtctcgggaaatttttggtctcgagcatcactacaatttttctgcttctgctgttgtgttcattcatcattcagttctatgaagtcacaaaaatgtttttttttgttaaattatttttttacaaaaatccaaattttctcattatcagcacaattatttatcaaattattaattatacacaaaatgaatttgcttggtttttgctgatttcacatttcatcgttattattttcatatttttttttcaagttttacgacctccaaaaatgtgttcactccgttcgcaatgacaaaaatatttttgtgatgatattatgccctcgcaaaatgttccaccccatcaccatcctaatcatttaatcaccacactaatcaaccacatcccacaattttttttttatcatttggtggcctttttgagngggggggggggttggtgtcccgtgacaaaattttgagaggaaaaaccttttattggagtgctcccccccccccccccccctcggagact

SEQ ID NO: 22403 - DNA, 1638 bp, Heterodera glycines
taacgatagagtagctcgcgacggggcccagtcgggaattcccgaaccttcaggcttgtgtccaggtttttgaaaaagtagaacccggccaacggaagggcagccgagaccagtgctggacataattacggactatggcatttttagacctccgtaatagcgaattatggatctccgtaattaaaaaacgccgtaatgacggattgcttagttccgtaattgaaaatcagttacgttcagccatggccgagaccaaccgggaaaatgacatcattgttaaggatttgggaaaattttcgggttttctcggtcgcaggtcaatgccggcccggttttcccaaaaatcgcgaaccgagccactctatttaacatcaagaacattcgaaaattaaattgctttaaatgatgtaatgtatgcattgtttctaaatattaattattaaaaaaatattcagcagttgagatggctaatcaaattatacaaaggtattgattataaaaaattgggcaagaaactatcattaatatcatagaaaacaattaataaattaaattgttccaatacatttatccaattcataataataaaaataatcataattaattttatttttaaatatgcgaaaacttgataacaaatggtaaaaatgcttaatttgcaatctcttctttttttcctcttattttttggctaaaatttttgtaacatgcttcgtttttatcagattttttaatttttcaaaataattgaccaaattcatagggttttggaaatgcgcttgcagtcaaaaacaattgttttacaaaatttggtgttcaaaaagtcttgcactattatttcctctctgaattcattcaagaatgcgccagattgcattgccagattaattttataagacgagctttcattgacttgcttactggtgaagacgccatcaaagccgaaacttgaaattattgggatcaaatttttcaaattagagcttgagggggcggtacttaccgtaaatactctaattacccccccccccccctccccgcccccacgtgtgggtaatggggaataatcataccggaagtaaaattttggattctctaggtggattattctttaaactaattagaaaacccaaatcgtacttccggtaggatcccactctttctgaggaggtcgcaaaatcatccactcgggtggagataattagagagtatttacggtatgcgggattcccgaacggggctcccgtttacgggtttcttaataatatttggttttttgattttctttttaagaaattcttgccttgattcaaagttgaattttccatccgccgctgcttttgaaatatttaatccgtgccattctctgtcgcccatcacttcggcacattccgtgaaattctttttcccattttttcttaatcctgcaccaaaaccccgtccaacttttgcatttggattacccaatgggctttggtagcagacgagaatcctcaaaaaacatttttatgttaatacataataaaaaacatgctactgtcggcaagctttttcaaacaggatcagtccttttttcagtcctttgttgttataacatggtctccaataagcaccgactgatgtcaatgaaattactta

SEQ ID NO: 22404 - DNA, 937 bp, Heterodera glycines
tttttttgaggcgcttttcccaaaaaacttttggggcgcaaggggggccggcggtgccgaaaggcgccgccgggaaaaattttgtaattttcaatgcgatttgttaacagattttgtccgaaaaatgaccaaattttgcgattttgagcaaatttttgcttgtagggaaaaattaagaattttaaccatatttttagcatattttcattaaaaaattctttaaattgccaaacattatgccaatttatcaaaatttaaaatcttctgaggattttccccaaaagcctcaaaaatcctcaaaatttctcaaaaagccacaaaatgaggataaatcctcagatctggcaaccctgcctaaaacgcatgaaaaaagttccaaatttttcaatattaatttaatttgtaggttgtttttttagaaattaataaattttaaattctatttttttctcaaatggtttactaacattttcagccatttatagatttttgtttatatgtatattaatttttaatgaaattgaagaaattttagaaaatttaccctttaatttgggaaagaaaacggatgcccctatttttgtaattttatctccaaatttcactatttttgttccctattttatggccaaatttcgtaattatttgtaaattcatataattacaagcccaaaagcgtacggagtgtgaagagagttagtccgaatgagaatcagaaaagccaaaataaagaaggcgaacaaaatgcaaaaacggacgcaaaaagtgtgcaaattcctgtaaaagtacaaaacaatcaaacaatgttcatctccaatttggatttacatatgacaaaggcgcgaatttttagttacggaaaatcccaaaaagttaattaattactaattaataattagtagggatgcaaattataggggacccacccgtttgggcg

SEQ ID NO: 22405 - DNA, 2636 bp, Heterodera glycines
  unsure (1)..(2636): unsure at all n locations
tgggatttcgattaacgcaattaggtaattagatgcatttatttcncattaatatcaataaaataatttaataaccaaaaaatagacgacgacaaagaaggagaagacaaagaaaaaggaggaaaaggaaagggaggagatgaaaatgaaaatggaaatggaggtggcggtgtgccgcaaccgccaagcgcaggaggaggtggcacttgcacggacaaaggcaccggatgtgagccaggcttttgtagcagcacagactttgctcgggcgcactgtgccggcacatgcaaacacgttttgcaagagtgcagtcatttggcttcggtgcccgacccaggtgggtgatgaaattttaagcatagaaatctggtttctgttatatttttttgtccccgaaaagcaaattcaaaaacaaaaaagaataaatatatatatatatatatgtcgagaattgcgattgagggacagaaaagtctcgaacttggtggtattttacaaaaatattaattaattaattaatttttgacatagtaatgttcttgcctattcagccaaatcatgcaccgaaacggccgagaactgtggcactataccggacatttgcaccgtatgttttttgtcgtttttttaatttattggtttagtcagctagactatgttccctggtctctcttgaaaattaaaaaaacgacaaaatctcgcccggtgggactcgaacccacggcctttcctcaccttggaatgctctaacagactgagctacgggcgctcccttttttaggatgacactttggccgtttgtggttgtgctcacacgtgcaatcgttgccatcaccaggcttcatatatggcacaaggaaggtgcaagaatgtgcagtaatgggatcaattggcacacagattacagtaatggtctgaaagcattggccctatcgtttcccatcatgtaattctaccggacatacaacaaaaataattcatttttaaatctatttttctccaagcttgtcattagggtgtttatttataaagacatattttataaaatatgaaaagatttctaagtaacagaatcatataaaattcaagcccagaagcttattaaaaggcgattagacattaacaataaaattgattaaacaattaatattacttttcgtccccactacagttgggtatcatcatttgccgaaaggtcttccaattatcgcaaaacaataaaagcagcctttgtcacaagccatggatcttcatcccccaattgtccataaactttgtcatgaatttttttgaatgccccataagagaagcaattgctttgccgatcaattcattatttgacgtccccacagggaagcgtttctccgttaccgtaatgcaatttctgattgagtaaagggtgaacgggattttctcaagagattcctctcaaaaaggcgcctaattattaattaatattagatttaaatttataataaaaatgtaccactatttcacgattaatcattttcagttgagaattttttcggcccccgcaaacaaaaaatgtccatcttccaaactttgttgttcatattcttttctcattgataaatacaattgaatgtcacgggttatttccttaaaaataataaaatttaatgaataaaaatttgataaattactcatctaaaatcaaagactgatatattgctccacttttgttacaaggaaaaaacatagcagaaagaccgtccccacagtttacacgtttccgaaacatccaaatacgcgcctttttaatcacgtccccacgttgaccattgcaagcctaatatggtatacaaaaattttttaaaattacataaaataaacaactaatttaccacaagacgtagcatagcaacgtttctgaccaaaaccaaattttttaggcaagttgcctctcctttttaaaaaataaagaatactagaagaatcattacttttttaatcacaccagtatagttttcaattgaagctattgaaattgtccccacactatcatgcacacttgctattcttttaacataagtttgtcccgtaaatgaaagccgcgccgccgctctgttatgcttttgacaaatggccttataaatttgtttttttcgctctggtaataaatatgggccattgttctcgtccccacgaatggtgattgagctttttgctattttaagttttttccgcaaatgtccgtccgcaaatgtccgtccgcaaatgtccgtccgcaaatgtctggtagccaaaacttcttgcccataaaaataataataaatgtattgaaacctcattcaaaaaaattataaaaagacctttgcaatttaatggttgagcggctgagaaagtctcgagggtgggagcaaaaataaaataaatttaaaataatttgagcggcataatgatttccgtgacagtcggtcggcctctgtgcgcgcagggcaaagttcatcaaaaattgtgcgccaaatactagggcagatttttatgtaagagagaaaaaaacgctaattataagtattaaataattatacattgaatagccaaaagatcagttttaaaaaaaatttattaacacagaaatcttagccctttaaaatatgcccaaaaaaaataaa

SEQ ID NO: 22406 - DNA, 979 bp, Heterodera glycines
ccataatttggtttgagtaccccaaacggacacttgaaaaaatgatttttttgttttcggggcagtccccccgaaccgatgcgcccagatttatggggagaccgaatccttccggaatagcttccctatagcctgtactttaattctgcgttggatttttgctccccataattgtttgagtaccccaaacggacacttgaaaaaatcgatttttttgttttcggggcagtccccccgaaccgatgcgcccagatttatggggagaccgaatccttccggaatagcttccctatagcctgtactttaattctgcgttggatttttgctccccataattgtttgagtaccccaaacggacacttgaaaaaatcgatttttttgttttcggggcagtccccccgaaccgatgcgcccagatttatggggagaccgaatccttcgggaatagcttccctatagcctgtactttaattctgcgttggatttttgctccccataattgtttgagtaccccaaacggacacttgaaaaaatcgatttttttgttttcggggcagtccccccgaaccgatgcgcccagatttatggggagaccgaatccttcgggaatagcttccctatagcctgtactttaattctgcgttggatttttgctccccataaatgtttgagtaccccaaacggacacttgaaaaaatcgatttttttgtttcataaatatttttttcagaaagtgctctaaagcgcaccaaattttatttacaacttaattttagcactctgatgctttagtatcaaaaaggaagatggagaaaaaattttttaaaaaatttttccttatattttggttatatcgttttgcttttggtggggtgcttggaacagtggaatcatgcgcacccgtccgatctggcaagtaagcaacgattgctgactagccaaaaggttcggtgccgtgatgaaacgaaccagcactgct

SEQ ID NO: 22407 - DNA, 1510 bp, Heterodera glycines
aagcagtacctgaagctgaactcagaaaagcggcaacgactcggagaaaccgggcaatttggtccccggagcggtatgaaccacgaaagcgaggcgcaattcgaccaagaatggggatggcactgttgatcatgctcatcaaccttgccggaacgatcagcggccaaccacccattcgagcatcgggaatggacccgaaccttccatttcgagagggcccaagagtcccatgcaccaaggagtgtgcagaacgagttcaacacaacgaggcgcaatgccaatcggaaaacgggttcgaaaacccgttgctacaactcatggacacacgcttcggagcttcaactgtcaaggggcgccgcgggcaatgtcgccaattttttcattggcgacgagaaggcgggtcaatccccgcctattgcacaaatgaacgggacgggactcaatcgaagcaaaaagaatgagggatgttcttggagaagatcggggcgagtcccgattcatcaattcattcaaaattgatcattcctaatttttgccccttttccatccaatttctcatatgcatttctccatttcgtaccattcacattttgcccgttcctttgtcccatttttgccccatcgcatcccttcacaattcaaatcttttctcatcggttggctcatcttcggccaactttgtgctcagcaaatttcctttcacaatttctcacttttcacatctgccaattcacattcaatttttgtgcacccatttcctttgttcgcaattcgcttctagaattttctgtccattttttgtccctctcacaatttgtccacgtgcattgccttttgcccgcccccttcgaaaattgtctatttaagcgcccccggccaaggggtcgctctcctctcttctcttctcttgcttccactccccttcgcttcatattcggtctgcctgtgaccaattcctccaattcccccgtcccatcgcccaattcgatcaattcgtcgcttttattcattattcgttttgctttaataaattcgtgctgaaacggcttggaggactcggaaaggagggaaaagcaccctccacactccatcacattcggcaaattctcgtgcggggccaaacggaggcgcccattcacgtcttgaccccttcctttcctggcagccctcgtcgttctcccccaatcctcccgatcccagttcctttccctttggcattggagaatccgggagttggcccggagcgtcagcgaatttcaagcagttcagactcccgcagccggagtctcgcggatcggtgtcagtctcccgccagccggagcagccgtagggacgggggcgaattcccgtcgtcgacgaaaccaagcaggggcagagagggaaggaagagccgagcggtgccaaacccgtccaccgaaaggggcaggccccgttcgtcgccgctaatcccaccagcccggaaaagcgcgcatcgccgggagtcagtctcccgccagccggaacatccaca

SEQ ID NO: 22408 - DNA, 1323 bp, Heterodera glycines
  unsure (1)..(1323): unsure at all n locations
taatcagtagttattaataaccaaaaagtgatttcattgatcagagtaaaagcgaagaaaatgctttgataattgactcattagttgaaagataaattaaaaatggcttatgaccagttacagagattctaatcaatagggctgagatttttaggcatcgcaaaataagtaaaaaggcaaaaaaaaaaatcccgctaattaggcaattaattaaaagcctcgaataggcactaaaacatgcaaataacatttttattaacacttttaggataacaaaacaaataaaaatttaaataaaaaacttcattttggtcaattgtaaatgaaattattaaatattttaaaattttttcgaaaatggataaaaaaatatattttatgagaacattttcaattcttagggtatttttttgattgtatttttaaaggattttctcgaaaattctgaaataagcactaaaaatgaagaaaaaggcataaaaatggccccctaggcattaaacacaaaaaaagaagcaaaaaataggcatcataagattgatcatagaagcctcaaaccaagcttaaaattcattttttttttgttcttttctcaatgcacgcaaattttaggaatttgcctaagaatcccagccctactaatcaatgttcattaacatattggatcactttttaggatggaaaatctatgagcaatgataatttatcacgcatatcataacagtcctgctcatttgtcaagctcatgtgattagaaccccaaatctattctataaaacagcaagaatttgaacatccgtgcggcgtttgtgcacgttttgggcgacctcgtccaatcgctgggcgttctgatcgctgctctgatcatcaaattcaccggctatgccatagccgaccccatctgcacgttcatgttctccattttggttctcgtcaccactgtgcccgtctttggcgacactttgacaattttggtaattaattttttcttagattctattttaattttaaataaacatatttaaatagtcattttgatattcattttgtttaccgaagtatgttttgcaaattcataatcattcatcttttgagtacataaaatctgaacttaattttctaataattaaatcatttcttaacatttttcaatttaaaattaattaaattttaatttatgtttattgatgtcgaacttttgttttttaaatgatttgtgatttaaaactgaatttgaaatcatttcagaataattntcagatggaaagcacccccccgccagatgatctcccaaaagtgtacatgatctgatcggcttgcccg

SEQ ID NO: 22409 - DNA, 3401 bp, Heterodera glycines
aattactgagttagcaccattttttctgatctttttctttcgtcaaattaattttgatcttaatctccaaaataaattttgcttgatcatttttagattttatccgtcaaaaattcacagttctgaaaaattgaatgaattgcagcagtcaatctttacaaaattgatcacttgcactgtgaacaaagccaacaaacaccatggcacaacaaatgatgactttttgtccaaattgcattttgacgttttggcacaaatctgtgaagcggatgatcaaatgaaagaaaatgtgttgaaaaacagtaagccgcaaaaaatttaaaaataaaaatttagtaatttagaaattcatttgaaggattttttaaacgcaaattggtacaaaaaatttttggatttacttgagaaggtaagaattattttttcttcatttgttaatttgttgttacattttggcaaatgctttttccaaaaatacttattttgaatagcaacgaaaatgccaatagaaaagtctaaattttcgcgatttatgttaaaacgttatggccaaaaactatcaaaaaaattataaaaatcctcaaacgtaataaagaataaaaaaatttatcttttttatttaggaggatgaatatttttctgtatccgaaagttttaacgaatctgacggttcagaaaatgaaatatttgatgacccatcagaaacaatcattgaggaaaatgaaaattcaaagaatttaatggaaaaacattcaattaaaaatatgaattttgaatttggtgaaaaaagtgcagaaaaatgtgaaaacaaaaatttcaaaaacaatttaacaacaacaaaaatggatgaaaaaaacagtgacgacgaatttttggcattaaatacagaaaatgaagaacaatggacaaagaaaaaagagcagcagaacaaaaaagcaaaaaatattaatgtaagaaaaaataaaaataataataattcggagaaagaaatgacggaacaaaaaaggaaaggaaaaaatggcaaaaataaattggaagaaaatgatgagaatttaaatttaaataaaaaaaattatggtaaaaagaaaatgatggaaaattttaatgctgaaaatgaacagttaattgagaagaaaaatggaaaaatttgcaagaaaatttttagtgaaattggcgtcaataaattaggaggcaatatttttttcaatttatttttcgtttttttaaattttttattttgtttcaattttaggtataaatttttcaattattaacgctaaattttcttggggtttttgggaaagaaattgtcaaaataaatttttgtttttgcagaaaataaaagtgtcgcttatttttatatttttaacgcttattgcttttttcaatgatttaaaattaaaataatttttattttttaaagaaacatattttaatttatttttttagatttgctggatgaatcaattttcaaaaagatttttcaaaattttttggaaaaacattgggaacctcaaagcatggagaagcaatgcttggaatatttaggcacaattgcattatttgccagagcaattcaagcaaaaatgaattttattgaacaaatgtcgaaacattgggcaaataaatcggtgaatggaattgccaaaaaatgggaacattttatttttaatgaagaaattatattcgaattacaacagcaaaatcaatttgtacaaatcaaattgtattttctgcacaatcagcttgatgaatatgcttttgagtaaatatattactaattcacaaattaattcataaatttgttgcacataaaaaaatggcatttttcgtttccttttagataatagttttgaaattttaatttaataagcacctgtaacacgaaatttgatattttttaacaattaattagcgggaaaatttttaatttgaaagcgtcttttgagggttttcataaagcatcgatgaagaattgttatttattatttgaaactcattatgaaaatatatttaaaaaaattaatttagtctaatatttgtttcaggcaattaataaattttcttgaaaaattttttcatttttcattttgttgggtagggcggggaattcctcccaatttcccccttgacttcgggcctgattataataatttattttagtctattctaaatttttatttatttatttattttattcaggcaatcaataaattttcttgaaaattttattcaaataattgatgaaaatgagacagacaaaatcaaaaattatgggaattattcacctcaatcaccaaataatcaccaaacaacccaatttggcacatataattctgatgaattcaatgcaatttttgccacattggaaatgcatgaatgttcgatgctaattgcaaaaggagtgatcaattttgaaatgatcaaacaaataaaattggcccattatttaaacggtgaaacattttcaaatgcgggaaatccgccgtcaaaaaaatgcttatgtgttgatgctaaaattgagcagcaatatgtcgacaagctaaagaaaatgctaaatcagaaaaaattgggtattttttttaagtttcactaatttaatgttttttgatagttattcaaaatcaaaatttttatattataacttttgtggcaaataattgccaattatgtaattactcgaaactttttattattcatttttaaagtatctatttttagatttatatttacaaacccaaaatttttctgatcccgaatttggtcattacagtatgataagaacaaagatgaaaaatcgcgaaatagaaaaacaaatttctaaggaggttaatttaaattgaaaataataatttttaaatatttgcatttttagattcaaaattttgtgtcacccaaaattaatccgattaaaaaagaagcaataaatatattaaaactaaatatcaaaacatcagtagagaagtggacagctcaatttacagcaattagtaataattattaattaaaattaactaattgatatttcaatttattatttgttttagaacctcgattgcttgttggtggttcacttttaatgaatggctttgtggatggatctgacatggatttgctctgtgttttaccagacgaaattaaatttgaccaattatttaatgaagaggataattgcttatacaaatttcttaaaaaagtaaatttaaaaaaatattataaaaacactacagaaataaattaatttaaatttttaaatatattggctaaaaataatttgaaaattatatttaaataaatttattctttaatcttttgaaaagaaatatattgagtgatttacttttgttttccacactaaaatgcatctaattaattttgaaaagaataataaataattattt

SEQ ID NO: 22410 - DNA, 1207 bp, Heterodera glycines
agaagggtcttcagggcggccccccccccccccaaaaatttttctagatacgccctgccgcccgataagaaaaacttcgaaaatggaaacaaaaaagagcttcccagactcggataaatttcatggttaatccggcaccttttctttaaaaaacataacaaaaaaatcgctgaaaatcttttcaaatttctaaaaatcgctgaaaatcttttcaaaaatttctaattgtaaaactttttttaaaatttctatagctacgggcttgagtgtatcaccgtttttttctgcaggtcctcgccggcgaggaaatagcagagaaccgtctgcggctgagccaacgcgtcaatttccgcaatgtccgcgtcttctacatggaggacctcaagtcgttggtcagccaagggctgtcgccggaaatgcgcgacgccgtgcgaaaagtgagtcagggtgtcctactgattgtgcatatttttttacaaatttacccaatggcgtcgccgcggaaaattttggaaatttttttttttgctttttagaaaaagacaaaaagttcaatataatgggcgggcgggcatcaagacgaaaacccaaaactttcattacattttttttcaaaagaaattaaaaattatttttttactggaaaacatcccactaattgtaagaaatttcatttcgaacaattaaaaaatttcaattttaagggggagggaatgaaattcccccgggtgcttttgtgatgcaatttccaattttttttaactgcagaccgccaagtatttcgagaagaagtacgatttgtgcgcccatcggttggatttgccggtggtccatcgggcgttcgagattttcttggccagcatgaacgaggaggagcacgacaacctgggcaaggccatgtccaacttcgcggtccgtttttggcattttcacatcggaatgggacaacacacaaattgttttttggatttcccataaaattattcacttagaaatgttcggaaaaatccatcaaaaatggaaaaaaaacgaaaattttttagacgaaaggggaaacattttaaataaaacaaaatatgtaagaaatattagaaaaaccccaaaatatttaaacaaaatttttttttatggttttctgaacaaaaatttaggcgagtgaataagcgcaaaatattttaagaatttccataaattcgaaactctttaa

SEQ ID NO: 22411 - DNA, 1567 bp, Heterodera glycines
  unsure (1)..(1567): unsure at all n locations
ccattttgccaatttttattaaataaagaaaattntgcctttaattatgacatgtattgtggtgtattggttagtgcatcactctgacattactgtctttcataagttcgataaccattgacgttctcatttttaatttatttttttgtgattaatactagagttcgggtacggaccggatccgtatacggatttttacggatccgtagtccgtattttttgggccgatacggatttttacggactacggatttttagtccgtaatccgtatgggtgcctagtccgtactcttggtccttatccgtattttctcaaaataccgatctctaattaatacattttttaaacaaaattatcaataaaaatagaccattcttggcataattgttaacagactaaacccaaattttcaaaaaatttttactttcgttgaaatttaaaattcaattttcatgactaaataaatcatgaaaacaatatatttcaaaatattgacaaaatatcgaaacaattaaatttcaaaattcgcttggccgagtccaaaaattcgtaaatcttattaaaaaaattggctcaaaatcgaaaatattcagcactttttgggcaaaatctgttaacagacccatgcaaattttcaaaaattttcccggcggcgcctatcggcaccgccggacccctttctcctgaaaagtctttagaaaaagcgcgccgagaaaaaaagatggtttgaaaaagaaaaaagtaatcagaaatttttgatcattttttgaataagattcacttttttcaaattgccggatccgaaaccggtttccggattgggaaaaatttaaattttcacatgttaattaatatttgtaaaaaccggcaaaatttcatttattaatatagaaattcgatgcaccagaaatgtcgccgccaaaaagacataatgttgccgacaaaataaaaaattttaaaattttcaagatattaaagcatacaaaaatatttatgataaaaaataaataaataaatataaacaaataaaactttattatggaaattataaaaaattttgactatatggcataaggtaaaaatttaaaaaccccgaaccccgaccccgacccgaacaatttggtcgaccccgaccccgaacgattttgttaaccccgaccccgaccccgaacttgctgactccgacaaccccgaaccccgacttttctaaccccgacgttcgggggtgcaaccctaaaataaagaaaggggctcaaaaatagcatttctgcgttaaaattttttggtttgctgaaggtttttagtccatataaatccatattttgggggttttcgggaataaatccatatttagccatttttgtgtttttagtccatatttcgtccatttttggcaaattttctcaagagaatgcaagaaacagggaaaaatagcaccccctaaagattgattttttggaaattttaaaaattacatcccttaaaaggaanaaaaaaaaaannaaaaaaannannangacctggtagagggaggaggaggcaaaagtgaactgagggacggagaag

SEQ ID NO: 22412 - DNA, 2156 bp, Heterodera glycines
cccacacagctataatgtgctttttcaagcaaacaaattgtttttttcaatgcctttttctttgagttatacgggtgctaattaatttttttcaccgtcaaaagcacggactctccgatggcttatttttttttgtttgaaaaaaattttccaaatttttaaaattaattttaactgttaaaggaattttgtttcctcgaaaaaagcaaatatcatatcgtgtcccgacatttgcggccccgacatttgcgcctttgtccaaaatctggttcaaaactaagttttttcaatcactgatcgcataaatagctttaaataagcgattaaaagtgattgtacatgatcatttgatcttcaaaaaaatgttgaaaaaataataaaattttcaaacaaaaaattattgatcataatgaaccataaaaccgtgttttcttaattttaatgcttattaggctatcaggggttgaaaaaattcaactttgagtccgattttggacataggcgcaaatgtcggggccgcaaaagtcggaccgcaaatgtcggggccgcaaatgtcggggctccgttagaaacctgttttcaatacaaatttaaaccaaaaaattcttttgtcttttttcagcgtctcatacaaacagcggtgtactgtgagggcggttcggtgggctttttccgtggcgacatccgtttgcttgctgacgacatcaaaacattgcgccccactgtgttgccggtggtcccccgtgtgctcaaccgaatctatgacaaagtgttcggcgaagcaaacaaatccgtcttcacgcgactgctctttgacgccgctgttgggctgaaaacgcgcgagctgaacaagtgggttggggtttttttaattttaatgagtgttttttcgttttctgaaattaatgcccccggacatttccagtcccataaccatggggcagaagggtcgtgtaagtagttaacatcccgtacttgtcgtcagtgcgcgaaatgtttttcgcgcacaaacgccagggtgtcgggcggttttgtgtttgaagttgccgcttttggcatgtgttcgggattggtgggggcgggattctctttgaaggggccgacatcccgagggtattggcgggtttcgggaagtgattgattgattgatttatggtcgggagagggggagggggtgctaattgcgcgaaattttgattgatttatggactcgaaaaagggagggtggtggtagggggaatggggaatgcagcgcgagttatcgcaatgcgcgaaaacaatagggaagaaattaaagagggggaggggggggggattaattaatgaaatttgatggtgactgtacgatggattagaaagaatggaaataagcaattctctcattttttttgctcaaacaatttctttttctggggggggggatagattttgaggtcaatgagtgaccattggacgcctttaactattctccaattgattttcgttgcgtaatgccgtccaatggtcatccattggagtcaaaaatctcaccaaaaactttatttatttttttgcttcttttttgttttttgattctcacataattaattgaaataaaaaatttttttcttttacagacaaattgtcggtggcttcaaaacggacctgcgcttccaaccaaatgcgacaacaattttttctacaacgactggggcgggaaattacaccgccaggcgatttgccagcaccaaaaagaaggaagacaacggcatcgcaacggggctgttccgattacatctgcattggtctcagaccaaattgttcaacgaagatcggcaattgtataataaactttacgacaaccgcaccaccgaatatgacgacatcgaaccaacaaatctgcggcgccgttgtccaacatgtcaccaaacataccgatttgtcctggcccgcttctcttccttccgcttccaaacaccttggttgccgaagatgcagaaacaccagtcccgaaaagccggctggattttgttggatgtgtcttttttggtgggttcgattattattattatttgtttttgaaaatttcatgaaataaaggtaaattttgaaaaataaataaatgcttaaacgcataaccatttgttaacccaatttttaaaaattttaaaatttag

SEQ ID NO: 22413 - DNA, 2140 bp, Heterodera glycines
atccgatgagagtaaatttttagcacacacttctttctttgctagcgctagtttaggcaatttttatgattcccaccaaaccgccgccgacactaaaaatcccagaagaatggagcgaaatgtttcaagaattcattgcaatttgcttggtgaagaacccagatgatcgggcagatgccgattcccttttaaaggttcgagtaagaaagacttttctagcgagttttacattttagcacctatttatccaaagcgctaaaggcccaaaagttgtgcgggaaatgatagcaaatgctcaggacattgcggcacagtatttgctgcaaaacgcggtgagcatttgtatattgtaaatttgacgagaaaagattttcagcattatgccaaggcagctaaaggcattgattattacgcgcaactgaacgaggcggcggagggccaaattgagcgggacgcggaggagagaacaatttcgacaaagacgggcctaatgacttatgacggagggacactaatccaacacggagaacagtcgctgaaggcaacggcaggtcgaataacgaataaaataaaaccaaaaaggcaattcagaaaattgtggggtttcggtctctcaaaaggcattccatccgtcggcactctctcagccaattgatgacaatgttagtccaatgaaatcgcattcaaacagaagttaaatgttcattcaggcagaaatgactcaaacggaagccgcaaaaatgaacgttttgtcggcggaattgtcaatggttaaattaacggtggaccaaaagataccaaacactttggacagtcgtcacggagacggcacagttgaattttgggaccagtcgccaagcgcaacatgggaaacgagcggttataacagtgccatggacacggcgtttagacgggcgatgaacggccaaagcgactacagttttgtgagtgttcattatttgggcgggaggggttaatggacgagtttactattgtggggtaactttttaaaaggaagcccccctttccctgagaaagaaaaaacgcgtaattagcaacccgaaacctctgggaatactatgtttattagtttcaaaacaaaattgtcgatgatattaccatctttttatgattgtaaaatttaagctgagggacctttcaacagaagaattggtgaaacggaaggagattttggagaaagagatggagacagaactgaacgagttgcaagcacggtaccacgccaaacgcaaggcgattctcgacgcgatagcactcaaaaggaatgggactgttcagttctgactgcagtataacgcctaggcattttgataacctaccgaatgctattctgtttctttgtcctcctcttggtgagtgtgggatgattataaataatttatggtgtcattaaaattacagcttgctccgtcgttcatttgtaatttataactctctcgatttgatgttatttattaatacagtttcaatcattggccataattactctttgtttatagttctcttcagtttaaattattgtacaaatttatttttcattatttaaatgcatttattagtaatacataaaacaatggtgtgaaataaatgaagcatatctagcgatccaactcacttattaattagcacacgcgatgtgaatgagcaagacgaaaacaaaaagcatggactattctaattaatttcaatcaattgcaaagcaattggacaaaaggttaaggccctatagcccatttggggatggcgccacaatatttttcctacgcgtgtcctccaaacactcgaactgttcagtaaatccctgaggaaagaataaaggtgcaaaaaacaattattgcccgaatatattgaaaatttctcatgagagggggggggggggaacccgcgaagtacgaccaatcattttgctgttaaaaatgaatggcaacggaagagttcagtccgccaatggtcagttgggagcctcgcagaagcgaatggagctgaagtcggctcgcgacttcgtcttttctttgctgccataaaagcacagtgttttccaagtcttttgggctaatagcgtaaggaagacaggcgaagacggctgaatggaaggaaagcataaggaactggaagaaat

SEQ ID NO: 22414 - DNA, 1313 bp, Heterodera glycines
attactgtcaatgggatcatggacaaaaacagggtaagcctccatttttggcattggcaattttcccatggatgatatcatgcttaaaatccgctctcggctgtcatttagcactgaaaatcaattcttgacaggattttgagcattttttgaggaatattttgttaaaattttttctatgaagtataactgatatagaaattttcaatagtttaaaagataataactgccgtatttctcaaaaaatacaaccctccataaataattccccctaagtggtaatgaaaattaagcgccccgccccaaaaaacataaataatttttgatttagcggtgttatatgcatttcattccattttaaatgataatttttccttgttattattaacccgttttttattagaattattcaaatttaatcgattaacaatttgggtaactacaaggcagaattattaatccgaaagtgcctttgacatgctattcaaaccccgtttttcttgccatggtgattacctaaacatttgggatactgtgggacaaatgccgtgccacgaagcgcaaattaaaacccgccggggactaagacgtggaaataaaaggcccatttaaggacgccagtgcgaccatattcgcggcaccaatgtacttctgggaaaaggtaatgctaaaaaaggatataattagtctttttgttttaggtaggcaaaagctcaaaactgaaaaatggcgtacaatttggcattatgtcactatttttgacatttaatttaaaattgttgctatgtagtagagttgagcgggaccgggaccggggcgggaaatcccgggtttttcaggtcccggtcccgtgaaccaaagaaggagtttgggggccgaggagtcggctgcatcagacgccataaaaggtgctggttgatatagagagcaggacggcggccatggaagtcggaatccgctaaggagtgtgtaacaactcacctgccgaatcaactagccctgaaaatggatggcgctggagcgggccacctatactccaccgtcattggcttgtacacgtgcttgtcgcgtagtctggccatgacgtgtaggagggtcgtggtggttgcgttgaaggctttgggcgtgggcccggccggagcttccaccagtgcagatcttggtggtagtagcaaatattcaagtgagatccttgaagactgaagtggagaagggttccacgtgaacagcagttgaatgtgggtcagccgatcctaaggcaccggctagcgccgtaacacactacggatgacgacttttctgtgcttgcgcag

SEQ ID NO: 22415 - DNA, 2849 bp, Heterodera glycines
cggcagaatttgcttctgttttggatcccaagcgactacctaaacgaacggaaaacaaaataaagcattttcagtttcatttgcttccacctctccgtcggcaatgaaatcagtcacttcaccccttttcagtgcgtccggaaagcgtcgcgcaacatccgggaatttgccggtgtggtcctcctggtttctactgaatattttaaaggtgccatccgacaaaagatgaatctgcaactttttaaatgcaatagtgatataaatttcactattccccagcatttcaaagggttcacctgacaccgttcgccgtcatatttccattcgcatgcaaattcagcagtgccaaaacggtccaacaactcttgaatgcctttggtcgggtgcgccaacattggcttcagcggaatgccaggggtcagacggcattcatccgccaatgaagaaatgccggaacggagagccacctcaatgatacggtcgaagttgggacactcactgaaaaaagagaacgattcgaaaacagggatataaaaaatgtaatattttacgaaaactgagactatagaaaattcagaaaacatgagctatgcttaaatctttaggaaaacagtgcctcaactcgctgagattaacgaaacggacgtacccatgacaaatcccgaaaaaaatatattcaactctcccacctgtaaactgttttcaatgtttgcgcatcttcagccatccgatctttgagtttttcgtcgcttaattttttctctggaaattgaactttgtgcatttcatttgactcaataaatcacttttttctctaagttctgtcttagtaaatgcattggccaacgcgacgatcaaagactgttcggccaatccgatgcgcagtttggcttgcaaacagcggacgaggaagcgcgcctcgcattcgatgcacgggacgagcaaagcttggattgccttcactttcttgtccatagactaagtaagcgcaaaacgaaggattcggtccattgactttttaatttaaaggatcataaaaatggggatggtaatactggcacattttcttgaaatcgaaattttaaaatttcgactatttgttggatttcagattcatatttagtcaaaatttcatatttgtaatcagggaatccggaaacttaagaaagttttgaatttgcttattaacctgaactactcttcaaattaccgaccgaaatgccagccattttggcaatttcacgcaaccgattgaagacaagcggcacagtcagtggcggcggtttggccaacattcgctgcgtggaccgactttgttgggccacaatgccaaggtcacccttcactttgaggtcctttttgatcatgtctacctaaaactcattcaaattgataacaatattgaaaatctaaggaatttgaactaattttttttaatagcgataaatcgccaaagtctatgcatttgaccactaaccgttcgcccggtggccccggccaacgctttgataaggtacgcctcggcgatacccagctcaagtccctcatagctcggcccgagtttgttgagacataaatgaactgcgggactcaaatcggacggagaaaggcgaatagcagcgccgaaaaaaccactgagaatgcgaatctgaagatgagaagaaagtaaaaagggtgcgcccggacgaaagattcaagaataaattattcagggcaatttctatcgataaaagcttgacttaaacacaacagacattttccaaccgagaggaggtcgcctcaatgcgctccaatgttttagcaagtgcaagataaggaattctggaagaagagaaagtcatgagcagaaattggcatgaatgcaaatgcccaattggtaacaatatgaaattctaaaaaccaacttctgtccgtccttccatttggtcgtctcaataatctcttcaatggatgccattctgttaatttttataaattgaaagcgtcgaaaattcggcaaaaaagggacgccgcgagcaaatgcaaaggcaagggatgaaaaattgttgacgaatatattgaagacgacaaacgacaaaacaaacaattgattttcagaagaattcaagcgaagtcgttatcctttctagaattcgggtttttggagtgagtgggaaaaagggagagtaaatggcaaaggaaaagaaacgagagtaaaagaaagggaagggagatacagagggaaatttgtctcgcatccctcccttttttacatcccattttttattgcctagtactatctcccgttttctttttctttataattttttctgactttagcgtactatctctttataatagaaagacagcatttgcttcgtgacgtttaaatttttttctgcatgttattgggttggcgcataattattgtcgtttttttgtttaaaccaaaaaaaacttaaagtttagctgagaaaaattttttttttgtatcattttaataaatttatctgttttctacaaaatagcatcaaaaaattttggccaactttcaggagtgtggagaaaaaaattcttgaaccggtttgggtcgaaacggccaaaacttgtttttccagttttaaaccggtctgtggcccagaaacccattgttttttagaactgtcgtattgctgagcttttttcacgtcgaacccaaaaaaccggattcgaatcgatcaatcattcgggtttttatgattttttttttacatttacttgaaaagcacgaaaaattgttttgaaaagttataagataaaactagagtgccacgggaccgggccgggaattcccggtcatccgaggtcccggttcccggtcccgggttttg

SEQ ID NO: 22416 - DNA, 1705 bp, Heterodera glycines
  unsure (1)..(1705): unsure at all n locations
gtgacagacgatccaacatctcaagcagcaccctttattcatcttccacaaactcattgcgctcttgtgccagcctgtacggtccatcgagtacaggtggctgcgagttttcgtcacggttttggctcatgatttgtttttgtgtctaaaattttaaaaattaattctttaaatttgaacaaatatttattttgttgaaaaaacacaaaatggtaaaaattgggacaataaaaaaaaaattttaacaaaatttggagtgatagatgcaaaataattcttaataaatggacaaataataaataaattttggcgaaattattatcagactggtgtcaaattacataaatgaatggcacagcggtgtggcgcaagacaaattccagacaatctttttaatttttaacgaaaagataaaagaaacggtgtcaaattacacaaatgagcaggtgtgagggggggcaaagtaaagatgtgaaattaaaaattattggtcaaataaacaaacgcccaacacctgaaagggtgctgtaattatttttaaggagataaaaaattaacagacaaatcaataattaaacttaaatgtatttgttaattcactgaaaaatatttatattattttagaagtaataaaaaatttattttaggaaaataattaattaattaaccttttaattattttaatttctaaattatattttattatacggtcccccatttctttttgcttttaaaagagaaaattgtgaattcaataattgatttttttacttgacccctcccgccttctcgccgcccgctctcgccccccccctgcccccgctgatgacgtcaaattttccctttatgagagcaaattaatgtttattatccattgccaatgtggccgagtggttagtgcgtcagtctggccgcccccctggggttcggatccgcttggtgcggggaatttttggagaattttaaatgaatttaaattcaacgtctttgacctttaagacatttaaaataatttaaaattaaataaatttaattaaaataatttgcataaagtcgcgcagtcaaaaaagtcgcgcaccccccctgcaataggtttgggtttgcaagaaaaaagtcgcgcaataggtttgggtttcaagaaaaagtcgcgcaataggttttggcttcagtactgaaaagtctggcgctcagatggcccgcgctcacctggcggcgctcaaatggctggcgctcagttggccatacacccctcccacacctatggggggctaccgtaatccggtgaaatggtcgcctctaactactcgcagttatcaaatgtacaagcccgatcaaagccaccgcattattatgggaatccgggaaaatgatatgtctggggacaaaaagtctgatagactgtgaaaatgctataaaaatttttatagaaataattaagggttcggggtgcccgggggcttcttacaccggacacactgttgaaaatattgtttcgacctttaaattcggtcatgaaattgaactgaacgaatttagaaaaaatcgtcgtgccttttacgaacccgaaatattttgcggtttaaatttcaagcggggtaaaagcatgacagcgttaattttctggaccggtaaagtcgtaattacgggaactanaaacaattctgaaattgatgaaatgtatcattatatgcttccctatctgaaa

SEQ ID NO: 22417 - DNA, 2034 bp, Heterodera glycines
aaaaaattctggaaatgaacccatgattcaaatttataaatttgcaatatttcttatagccggtattgtaaacaaaccagttttggcacttcccaccaatttgggttcggcaccaattgacggcaccgcagaaggatccattatgagaggatgctgatgcgcgacacgaagagatggactaaattgatgaatgaaaaatgaatgactgtttgttatttagaagaaggggcaaataaagcgggaaaatgccaaaatattgtttttggcattgtcattttagtctaggcggattatgggcaggaatccctttgaacatggcacaaattgccgacgtcggcacgcgccgtttcggatttgaagccgtaccattaccaaatttccagcaattgtaattaattttcaatgcttggccaaatgccccggtgaaaaccttcacgaaatatgccaaaaaaaaaaacaaatttcacttgtaaacaacggattaattaatggcaaattaataatttgggacaaatcaactattaatcatgtatgattcatcagactcatatctgttgtgaaattcaaaaataaaagcatcagaagtcgagcaagtttttttgtaatccttgacttcttttagtacgagaatatttataaaaatggtttttagaaaatatttattttataaaaatggttttataaaatatttattttttcattttaaagaaagtttataaaaattattttgaaaactttcatttttatgattttttcggaaatttttaataaaaattttacataaagaaattatgtgatatttggattaatgagtcaattttcatttgctacagtaatcgccggcacacttaccgtagctcggcttgtcgaaccagcaaaatgatgatggtaacagcgatatataggcatttcaatcaacggaaagcttgtgaaaattgaaattaaatgggaataaatgggaaacccgagacgaattaatgcggtggtggtgttggcgaaacgcccacataaaacacaattttttaaaacaattagccacgagaatgggcccaaaaaacggaacggcacgccgacggggcacggcacttgttgttaattatgttgaattggtgcagctgctgttgctgttaccataccaacacaaaggaaaagccgccccgaagcaatgtgccaaatttcagccggtcgcagccagttgaacgccgccgtttgggcgccgtataaatttgaaaagagaaagctgagttgggcggttaaaatgccgacaaatttgctggactgggtacgacccattgaagaaacaaagagttgttagtgagctttggtttttaaccttgtttgaatcaacttttgaacaataattatcgagaattagggcgaaagggctgcaatttaacggtaggggtcaactccgtctggccaactccgtcacagcaatgttcaaaaagctataacttttttctttgttggccaaactttacaatcataatatcattcgaaagccctagatgtttagaagatatttataagctatttttcagtgattaatcagctctcaaaaaagttgtcagtttaaaaccgcaaaaaaggcagaattttcaaagttttttatttctatctttttttatagttcgaaattttctgtaatttttagtaggctaatagagcctgtgaagagctttcgaatgatatcaagattgtttgattcggtcaataacttcaagagttatattgactcaaagttggctcagacggagttggccagacggagttggcccgttccggcaatttaaggcgcccgagaaattttttcaaatttatgtatttatatgttgtagagtgtttgaggccggaaatttgcgtaaaagtcgggacctgtagcatggcctgaaccgagttttgtttttcatttaaaaaacaattaatttttgttcaatcagaaaattttgcaaactcatcctcacacaaatcaaatccatcattttttgaccggtactttctttttttggggccccaattcacataaaaaaatca

SEQ ID NO: 22418 - DNA, 1414 bp, Heterodera glycines
  unsure (1)..(1414): unsure at all n locations
gaacaaaaagcagtgtcaacaaagcgcagtgaaacgcaaattgaaggcagcagcagaacaacttancagcgcaaagcccacgacaaacaactcacaatggcaagcctaatccagaagggcatcacattcacactcaaggcgctggataatgccagaacaaccacggcactttcactacatccagacgccgacctctcaaactgggaaaacgcagtcaaattggaggctcaatgcacacgcgtcagcagagaagtccaaacaattgaagcacaactggacaatctacgcgacctctccaacaattggattgacctactaaaccgcctcgaaggatcagaaaaagacaaaggcgagaaagaatacgtcaaattcgacacgtatgagaaaattgctgaacgccatgacgcagccacaaccaaacttcgggatctgcgggatctcgaagcaacgctcagtgccgatgccaaactttaccgaggcagagcagaaagagaagcaagagcggatcagcaagcaaatccgccaccacaaattgcaacgccaccaatggcagctcctacattcacggcaccgctctatcaattccagccaatccagctggacaaattcttcggtcaaaagcgaaaatggcccgaattctacgagtccttcaaatcggccatcggcagccaatcaatcagcaaagcacagaagctgaacttgctccgcaatcttctgggcggagaagcacgggaactcatcgctgggttccgcctggaggaccaaaactacgagacggtccttcagttgctgaaggacacttacggcgcacctgaagagcacatcagggcgctacactttgagctggccaatctcaagacgtgccgaagtctccgagacacaaaagacttcctgcttcagctcgaacgactgacaagagagctgaacaatgccggagaggacatcgagggaccgcaggtgttcctcatgttggagaaaaagctgactccagcattcctacgcaacatcctcaacaaaaagggagaggatccggcaaattggacaacaacaaaattccgggacgtacttaacgaagcagtccgcaaggaagtccaaattcaagaggtgatgggtgagtacggacaccaccatcagcaactcaatcgaccagcaaggccgcaaacacaagcacatcaaactcagcgagcacgcataccgacagcaaatttccggaacagaaatgcatctcccgccaatcgggaacgcactttcatgtcctcaacaattgaggaggttcagcaacgaatgaaccacagaccgcaactgcgaaagtcccaacagaggggatcaaggccaactcaagtgccttacaacgtgccaatccggaatggcacagcagaagcagggtcaaggaatccgccttcaccctgcatct

SEQ ID NO: 22419 - DNA, 1366 bp, Heterodera glycines
ttatttttataaaatactttttcagaacagagttctgaatttttttctgaaaaatcgaatttttccagaaattctggaataacttatttattttggaagatagcaattccaaatgaatctcataaaattctcctaattttttgctatttttcaaactttattccactaaatttgatcaaaaacgaagagagttatgaattttcgaaatttcactggattttccggggctcaaattttgacgatttttcaaaatttgtaaccaccttccaaaaagtctgaaaccaaaaataaagtatatattcgtcttcagcaccataaattaggccataaaaatgcattttggctaatttaggagcaaaaaaatttttcatgaaatgcaaaaccatggggtcccccctttggttttgaatttcaaaattcatttttattttataactttttttaaattcaagataaaaacatgagataaagcacattatattgggctttaaattctctacaaaaatgctcttagacgattttttgataaaatcaactcctgacaagttattgcgccagaactgaaattgaggcctagcaaccaaatttttctatttccaaaaaaattttgaaaaatttttctgaaaatcacactaatcgatagagcatgaaaaacggttgcttgaaagtggtcttggtttttccgagaaaaatcagcaaaaaatactaaaattcaaaaaccccaaaagtgacaagggggcctagctggaaaatttctgaaaattttcagaatttaaaaaattcacaagatagagctcggcgagctgtacaataagttcgctggtgacgacccgctcagcgtaacccccagcgagttattcccgaaaaccgaaaatccggtttttggcttttcaatttttagccacgcgtaccgggaatacggtaggtcgtagagaaaaatgtttgctggcgaacttgtagggcacacttcaacttaaaatcctcccagcaagcattttttgatcagagcaaaacccatcgtttcacaggctcttgaaaaaacgaaaaagccatttcagcgccgctggcgctcagttggccaccggaccggaatgcccctatttttcccggatgcgccgtcaaaagttacccctgcctgcaaaatttcagatccccccgattagccgttcccgagatttttgttttagcaatgagttgcactgttgttctaaggtatataaactagcgtgttggaattgacgggggcggcgtaggcaattggcttttggatgaagagaaaatggacatgctcatttgttattttaaaacatacaaaacattaattgcattagtgtgctgttttaaagcgctatcgcgctatgggacg

SEQ ID NO: 22420 - DNA, 2712 bp, Heterodera glycines
  unsure (1)..(2712): unsure at all n locations
tgagcagcccgtactgcttgaagtgctctgctgctgggaacgccgtcgcctgtggcaacggtgggcaaatttggccacgccgttgcgccgctgccatctgctgggcctcggatggcaatgcctcagcagacggagtacggtatcgcgcaaaagggcacggtagcgacgggagacgagacagtacaggcagaaattgagggaagcgttcagaaacaccaactgctgactgatgcacgtgtagaggacggcgcccgtgtcataataatggccatgccttgggttgaaattcaatagtgatcgaatgatttaaaaatttggcattccgtcccaccattcgtaaaggaggcgagccggcacttgtgggccaatgcagacaaacagcagaagcacaaccgcaaaaagcatcgcatttgcgttcagtctttgctgctgctgctgggcatggccatcctcgagaataatctgaaggaaaagccggggaaagtgacgaagcgaatgggaaagaaggaaggacgacgcaagggggcaatgctcctccccatttgtacgttgaattgaaactcggaaaattgacggaggattaactgccggcaccgctggctacacacgaagaaaaaatggcatgaaaattcaatgatgggggggagtgcccggaagcgaactcaatgcncaaggngggatttctttacgaaatcattcatgggttgaaaaagtacatttgtaacgacgactccgccgctccgttcttccgcaactgcgactgttgttgcagtgccagcggaggcggaagagtcgcgccgaacgatgcgacggagggtgaaaacgagctgaaagttganggnnacggagaggagaaggatggggagccaagttgaacagcacaagggacaaccaatccatcagacggtaataagcctttaaccgggggaaaacagagnggggtaattaagggagaagtaattagagggagggacaattcacaaggggagaattgtgggccataagggaattgaaatgccatcaaaatggaagggtttcagcatagtcaatagatggagtattggtcattcacaatgcactcgtttgggatgccgtggcactttcggcacaatttcaaaacaatcgttagccttttaattttccacttccattcgccccttttcaatcgaccttcctcccttcactgacttggagtgtttgcgactgtcgaatggttaccaccttatagaagaagggaattgaattgaattgttccgacatcaacaagttctgtccgtttcgcttttcagtctcaccgaaaagtgctgctgctgctcttcccccggctgctcattcccttcgccctcacattggaccacagtccatgccaatggccaaaagcatttaaaattgaatttcaattcaaaatcactctctccactctcttaccattgcacactgcaaatcattcccaaggccaatgccccgccgacgacggccaacgcttttccccctcccaccaaaatgcgcgcgcggtgggcccaaagcggacgacaaacgcacagatagcgctccacattaaaagcgaccacaattctgacgaggaaagtgaattattattaggcaatttatttcattttttaatttgaaattggacggacaaaatggacgccttgtaaaaagtggaggcgaacattcgaatgatcagaacgacacgcgtgtggacggcgatcaaatggggcgaaagagtgggcaaaagggaggtcggagtgagctcgaggacggcgaagagcagaaaaagtgagtcgaacaaagccaaagagaccaacagatgcctaaaggggcgatgattggcggaactgattattgccatggcatggacaaagaaagaagtgatcagctgatcagaagcaaactcatggcaccgactgaccaggacggcatccgccgagcctccgacgtagccaaaaccaaaaggttgagtccgttgcaaaggaggccgacagtggcgataacccaaaggaatggacaatgactttaaatgcaaatatttgcactgaattgataccggaagtgacaccgaattggtccaccaaagcacagaaaggacggcactctgatgatttaaaatgcaattggaccaccatttgaaaagtgatcggacagttcattcacctcgtgcaacgacgggtcgtccgccatttcgttgtcccccgcctcatcggaatgaatggcacaagcggagggcaaagacaactctgatcggtggtgccttccgccgaccattgaactgatcgaaaaggacaaagtgcgcgagagagggggggggggggggggaattgttgagaaagtgggaggggccgagtgaatcaacaaacgaatgagtgaacagcaaatgcagtgccccccccctgtgtctgtcccccctttctttcgcccgccccgtcgttgtccattcttccgtccaatttttgtttgaacagtcccttccccaccccttttatccattgcgcttttgaagaatgaataaatttggtgagcagggaaaagcgttgatgctggtgacggagatgaacatgacagaatgacagagaatgaatgaatgatcgcattgtgctgatgatccgcaaacgaaaacaaagtgtaaagcatttgccacgattcatttgttgtttttgagcggattgatcgctttttgaatttgaatttaaagtgatggaaagcaatcaatga

SEQ ID NO: 22421 - DNA, 1245 bp, Heterodera glycines
  unsure (1)..(1245): unsure at all n locations
ccagcaaatgtcgcaccacgataaaatccagtatataactttttaaatttactttcttattcttttctatcaaaaattnggcgtaaaagatttgttttacgcaaaatttatcccaaataattaatattcaaaaatttttaatttttcaaataaaaaactaaaaatataattgctaaaatccagtaccaacggcgggcgaaagcgtcgtgaatgaaccattgtgtcgtaattaataatgacctcattttatttttgattttatgatatttttggcattttgttttaatgtttgtgatttcgtttttgttttcttttttgtcctcggactttaatttggaattgcctgacataaaataataaggctttattctgtgtgcttcaattgtgtgtaagtgctgaactgttcgacgtgctgctgagtaaaatcaaattatttgtacgtggcgctcctgcaaaaaggtgtggtcgacgcgggttttatacggggaattgtagaagtaggaaattctacaaagtcttcaactactgcggcgacaaaaaagtaaaaagtgaaaagaaattcaccaacgatttgtcagctcggtaaagtaattccgtctacaaagctgattcgacaaaaagggtaaagtaattcccatcgacatttcatcttctacagaacggaaattttgtgaaattcatcagttttcttctcaccgaattcgacaagtgaaattttgtggaaaagggcgaagtaatgcctaatcttcggtcgcctccgcttactcgtcaaagagcactcaacctcggcattcgtctaaataacaacgcaaaccagcagggggggcaacaaattgtagaaccacagcacctagcagaccgacgtttggaaaacgaggctcgccataattctgtctcttcagttgcttcatcacttttggacccaactgaaattcgccgacgcctgctcatgtctggaattggagaaaatgctgctggagttgagaacggaccgcaagatgagcaacaattcgacgcactgctgaaccagcatggtaacgacttgtttcaaaatgaaaatcggggagaaaattttgagagggacgtttttcaaccggtggtcagagaaccgccgttgcaattttcggaaaattttgaaaatggtccgaggcaatatgagttagttggggtacggcctgttgtgacttcgacgccccatgccgtgcaaccacaaagggcgacaaactctgaaaccctaaacccggg

SEQ ID NO: 22422 - DNA, 1405 bp, Heterodera glycines
  unsure (1)..(1405): unsure at all n locations
tggaggctgtaattttctgtagtcatttgatatgcatctgctatttttctagtcacaaccaccaatatttttcggcccgaattttataggcgtgaaaaagtactgatttccaacttctttctattcggatacacccaaaattgaaaaagcatctgtaattcagcctcttttaaatcttaatttttctgaaacccgaatttagaaaatatgaatgtatttctgcgacgctttctatacttaattcatccataatgggccaaaaatcataggttaagaccaaaagagggattttagtttcagccggaatttctataaaaatgttcgtgtgtaacctatctttgtctattcggataagtaagaaattgaaatattcgtattactttgcctcccttaaagctttataatgaaagcgtcgttgtctatttaggatttgccgtcgcaattctgtaattccactttggaatccaaaggaatttgattcgcttttacaaaatagacagtgccgaaatttgtagatcggctaaaccttaactgaaacataccatatcagcgagacgccatgctgatttgttgtaatcataataaaaaggcccctattgtttaattctgcctttcctataagcacaatgtgtttgatgggctctacaaaatattgcttgtgcaaagcaattattttcttggaggctgtaattttctgtagtcatttgatatgcatctgctatttttctagtcacaaacaccaatatttttcggcccgaattttataggcgtgaaaagtactgatttccaacttctttctattcggatacacccaaaatttgaaaagcatctgtaatttagcctcttttaaatcttaattttctgaaacccgaatttagaaaatatgaatgtatttctgcgacgccttctatacttaattcatccataatgggccaaaaatcataggttaagaccaaaagagggattttagtttcagccggaatttctataaaaatgttcgtgtgtaacctatctttgtctattcggataagtaagaaattgaaatattcgtattactttttctcccttaaagctttataatgaaagcgtcgttgtctatttaggatttgccgtcgcaattctgtaattccactttggaatccaaaggaatttgattcgcttttacaaaatagacagtgccgaaatttgtagatcggctaaaccttaactgaacataccatatcagcgagacgccatgctgatttgttgtaatcatataaaaaggcccctatttgttnaaatctgctttcctatatagcacatgtgtttgatgggctctacaaaatattgcttgtgcaaagcaatattttcttggnagggctgtaantttctgagtcatttgatatgcatctgctatttttctagt

SEQ ID NO: 22423 - DNA, 1836 bp, Heterodera glycines
  unsure (1)..(1836): unsure at all n locations
catctcccttttgatagaaaaagcatcagagtgcctaaactaacatgtaaataaaatttggtgcgtttcagaaccctttctgaaaaaatatttaagaattaattttgcaaaaaataaataaaaacgaaagactcagattttcgaaggngggnntagngcaagctagctcggcgctcatttcagtgtaagttagtcctttaccggggagtatccctgcaaagtttggtatgcttctgctcaagtagcaaaaaatatgagtgatcaaactttcactaaaaagttaagcctaaattttttggcatatttaaaaagcaattaaaaaatttttaaaattttattcacctccattattgatagaaaaagcatcagagagccttattaacttgtaaataaaatttggtgcgtttcagaaccctttctgaaaaaatatttatgaattaattttgcaaaaaataaataaaaacgaaagactcagattttcgaaaattttttttgagccagctagctcggcgctcatttcagtgtaagttagtcctttaccggggagtatccctgcatagtttggtacgcttctgctcaattagcaaaaaatatgagtgatcgaattttcactaaaaaagttaagcctacattttttggcatatttaaaaagcaattaaaaaattttaaaatttaataattttcctgcaccgaaggtactcactcggcctcttcgcggcctcgtggtgggccttcgcccccccccctcccacgcccttcagagcacgacaaatatttcaacaaaaattttgaaatcatgtttcccactcccttctcccaggggtattattttgtaaagtctttttttccccaataaacttgtcaaaccccatttttcgcaccgtgaatgttatttttattgaattctgaaccgttttgagtagattagactataaaaaattgaaaattttgaaatcatgtttcccactcccttctcccaggggtattattttgtaaagtcttttttcccaaataaacttttcaaaccccttttttcgcaccgtgaatgttatttttattgaattctgagccggtttgagtagattagactagaaaaaattgaaaattttgaaatcatgtttcccactcccttctcccaggggtattattttgtaaagtctttttttccccaataaacttgtcaaaccccatttttcgcaccgtgaatgttatttttattgaattctgaaccggtttgagtagattagactagaaaaaattgaaaattttgaaatcatgtttcccactcccttctcccaggggtattattttgtaaagtctttttttccccaataaacttttcaaaccccatttttcgcaccgtgaatgttatttttattgaattctgaaccgttttgagtagattatactagaaaaaattgaaaattttgaaatcatgtttcccactcccttctcccaggggtattattttgtaaagtctttttttcccaataaacttttcaaaccccatttttttcaccccgaatgttatttttattgaattctgaaaccgttttgagtagattatactaaaaaaaaatgaaaattttgaaatcatgtttcccactcccctctcccccggggattattttgtgaagctttttttccccataaaattggcaaaccccctttttcgccccgggaatgttattttatttgaattctgaaccgttttgagaaaattaaactataaaaaaattgaaaattttgaaaacatgtttccccctccctttctcccaggggtatatttttgaaaagctttttttccccaaaaaatcttgcaaccccctttttttc

SEQ ID NO: 22424 - DNA, 1409 bp, Heterodera glycines
  unsure (1)..(1409): unsure at all n locations
tttcttggtgcttgattcttttcaatggtgaccaccatcaatcgtctgcgaatgtcttcttcgtccattatttcttctgaaaagtttgaatttccgtgtctttccccaatataaatcccgcgagttcaacaggagagatcggtggaaaattttggatttgctgattttgaaacccgttccctctgtcatttcgttcgtttagttgcgaatcgtgttgccgttcgttatccattgaatttgctcttcttggattcagctgatttccgtctcggtcgacaacaacaccagtattaatgcacgctgacgtgtcaaaattgggcttcttccaaaaaccatctttctctcgttatgaggcaaactaagcaccggcccggtgtcaatagttctttcggtgatgaagacagaaaaagaggttcggcccgaactcaacttttccgacacaagtttattttggtgaacgatgatttttggctttccggcccggaatagccaattctccactccaatttatatcgtccgatccggactgatatttttcacgcaacaaagttaaaccccttttcaaaacaatttctccgatctcaccctaactcttattttgtcaccaccacttttgtacctgttcctcaggagcgccaaattgtaatttttccgggtcttttgggttgagaggcagggataaaaccgaataaggataccggagtcaattcaaatcactttaatcacaacacaaaatttaaaagagaaagagaacaaacaaatttggttgaagtcaatcaaaaagaaaagattgagaagaataaaaagaacaattcttaattgaaaaaaataacgccataacaaaagaaaatacattaagccaagaaatatttaaataattatagtcaattaattatcaaaatacaacatccctcaacaatcaaaaaaaggcgtccccgcctttcagcctttttgaaccgaaaggggtgtccaacaggtagttcaacggcgggtggggcgaaactcgcggtggcgcctattgtttggatcgctgtggtcaatttcataaggccgatagcgagtgtttgaacggtcagcggcacgaatttgcccggagctcgaaacaactcgacgatgatcggcccgatctctcgccgattgtcccaagttcacatttcccgatcggtgatcggcacgatctcccgacggaatgacgacagtggagcggattgtgcggatgtgcatgtcaatgtcacctgnngaaagggggtttgtgacagaatccatgcacgaagtgcgcgacatcctgcatttttcattttcccattctcttccaccatatgcatattgaaatgctctccaaagcgggagatttccaatgccgaacgggcatttggcggcggtacaaatttggaaggattttgaggggg

SEQ ID NO: 22425 - DNA, 1628 bp, Heterodera glycines
ctttatcgagagttccgataaaatgggaccaagtagagttaaagagtaaggaagatgtgccttttttgttaacaattgacgaagatcagagaattgacaagcaaatgttggaaaaggagactgtggtggacccaattttggcccaagttattagtaaagtgaaggataattgggcggaaccagtgaatgaagatttaaatccgtttttcagggaaagagcaaatttatttttggaaggaaatttaatccggaaaaggccgggaatgcaaattgtaattccccacagaatgcaaaaccaaattctaaaattaattcatagggcccattttggtattgtgcgaagcaaggcaagggcaagaggcattgtatggtggccgaatttagcgaatgagatggaaaattatgtaaaaagttgtgaaatttgccaaagaaatgcgccaagcgcaccgagaacagacccggagtacaaatggccagaagccagatatccgttcgagcgggtacatatggaccttgcagggccaatttggggaacgaatttcctaattttggttgactcatattcaaaatatccatttgtatgccaaatgcaatcaactcactcaacatcagtaataaattaccttagggaaatatttggaatgtttggctctcctaaatgtttggtcaccgacaatggtcggcaatttgtgtcagaagagtttgagagttttatgactaatgagggagttaggcatttgacgacagcaacatatcacccagcatcaaatggggaagccgaaagatttgtgagaacatttaaagagagtatggttaaattgctggcagagggaatgaatataaaggtcgcccaattcacgtttttgcaagaatatagagcgaccccgtcggcagtaaatgaaggggaaagtccggcacatcaatttttgggcaaagagttgcgtaccgcgctggataaaataagaatgcctcaaatgcctgaggcgaatagggatggaactcatactggagaaccaatccaaaagggggagcaaatgcaacagcagggaaatttgaaaaattttgaccctggagaccctatatggtacaaggaaccgaatggaaaatgggtacgggctgtacttatacaaccgttgggggagaggatgtgggagatccaaacagaaggaagcaccatgaccagaagggtccatttggaccaaataaaagggaggcgaattggtccggcgcgccatatttgagcattagcatgaaagagcgttgctgactttgtatataaaacaaaaagccccattgctttgtataatttccctatatatataaaaaaaaaaagaaagaaaaacttttttaattaatttaagcatttttctcccatttatcagtaatccttaccaaaaaaaaaaattaataataatgagtgctgaaacaccttccaattcggcggacatttcaaaaatggaaaaggaattattagctaccatgaaaacaaaagggcgtgaacagctgagaaaggacatcggcgccatgtttgaccaactgcaaaatgttgtgggagaggaaattgccggcctatgggctaaaattgagccatgtctgactgagcaggtgggagtcaaaaaaaaaaaaat

SEQ ID NO: 22426 - DNA, 1535 bp, Heterodera glycines
ccccccccccccgaaaacatcaaaaagtaaaaaattttcagtaaattttttgaaattttaagcaatcttcttaacaaaattgcattaaaatactcaaaaattttccaggcgacgcctatcggcaccgccggacccccattttaccatatttttaaaaaattgaggccaaaatggcaaaaaatagtaattttttggcgaaaacggcgaaaatttttgcaaaatataccccctaattcgggattcaaaaaagcaaaaatacacccctaaaaatcgaatttttgtcttcagcctcccccccccgaagccaagggtctggctacgcccttgggtcaaagggatgggccaatcaaagcaatgaatgaacttcccgcgcatgcatattcccatcaatccaaaacatgcgttttttgagcacttttctcaagttttttggttatgctccgaattgacgtctatgggaaaatctgtccgttatatctcatctagagcttttaaatgataccaaattagtcatttttcgatccttttaaaaatcccccctctatataagtcagaagtgccgaaacagccaaaaagtgacaaagtgaaaatttcacattttgattagtttatatatgcgcacacatcaacaataatacatatagatacaattcaaatgatcgggtgtattgacaattacaatatggggcattatgacagtttatgggcacgccgacaaaacaatttcaagtgatcgggggtatagacaattacaatatggggcattatgacagtttatggacacggtgacaacgcaatacattcgcaaatgatcatattccatcctgacgatccctccgtcatcggccggcccggcgacgtcagcagcagctcagccccgtcgcatggtggagttcagtgcctgcacgagggcgttgagcgcgttcacgttgatgttcagctttgacgccttgttttgtgcataactgaaaaaattaaaatttcatttttgttgatgcaaatttgaaaacccaccgaagaatcacgaagtaaatgtagaggtactggtcgagcgtctgtatgctttgcgatcgttggcgccggaggtcacggatgagagcgaagatgttgagaggctggccgaggtgcagcgtttggttggccaagtacaccgccacgagcgttccagtgcgtccgatgcctgcaatgggaaaaatgattaatttttcaatgtttttgtttccgttaactcaccagctgaacagtgcacaaccgctcgggggacgccgatcacatggtacagcaggcgcagtggagcaaggtcgctgtggggcactccgcggtcgggccattgtcgccagtggaagtgttgaacgcgcaagtggccctgtcgcatctgcggtgctccaacgatgaggtccgtcctgtagagcgcgccttccacgtggtattcgcgcccgaatttgacaatgagagggttgttggcgaagcacatgagctaggagggaatcgggggagattaattgttaaattgggtaaaatttcaaaacccacct

SEQ ID NO: 22427 - DNA, 1818 bp, Heterodera glycines
tccctcttctctttttctctctctctctctcttcctctctttagtgtttttctctctctctcttcctctctctccttctctttttctctctctctctctcctcttctctccctcctcttttctctctctctctcctcttttctatctctctcctcttgtctctccttttttctttctctctctctcctcttttctatctctctcctcttctctccctcctcttctctctctctctactccttctatctctctccttttttctttctctctcccccctctctctcgcttctcttatttttatctctctctttctcttatttgtctctgtctcattcactcccatactttctctctcttttttcctgtttctctaatcatttctctctcctttactctccgctctttgttcctaactgtcttcatctctctctcttcttcactctttcttacaatacaacttatctctattatctctgttttttcacttcatttcttccatccaaataaaaacaatcgcgtcaaaactttatttaaattttttgtttaatttgtgacatacattacgaagattttatataggataccctaaaagcggagtaaaataaatttaaaaaaaaatcggtttatgcagtttacgggccacaattttaattcacatttagacaaaaggcgttaaaaaatacagagcaattgaccaagaaccaatcaatatattttaaatggaccgtttcgttttattccgaaatttaatttttaaaaatgtagcccattagctgcataagtgacccaaaagtccttagcgaaatattcgtgagtacatcttataggtatgtcagccttttctggctgttttgttgttttcgatttttccaataatgaagaaatatgtgctcgctcataacacaaaaaagacgtaaacaacaaacagaaaagaaaaaaagactgaactattttccaaaaggaattcgtttcgataaattgtttacttttaaatgtattagttacagcgcaaaattaatatatagatgcgatataattaggagggggcgggggtgggggatggaaaaaaaaattcaaattactatacaaaggatggtaaaaataacaattcaagcatttaatttaaaaaccaaattataatttgacacataggatacgcaaggggggttcatggaaaattattaattctttaattaaaaatgtcagttcaagaaaaggaacataaatttttcgttttttaatattttacgaaaattaattctcaactaatgtttttttttaattttatgaaaggaagtataaagacaaaaatattttaaaaaattagaataaaacaatgattgtggtggtggaaagatgaggaggaggagaaggcttctcgaatgaaaagcgcaacacataatttgttggttgggatgacaactaacaacaaacaagcaaatgtatgtgtgtgtgtgtgtgagatgtgatctctcccgcttggtcgtctctttttggtcaattgagttgccttcccggcgccatgccgcccccgccccgaggggcgactgctgtgtttatcggtgaaaagacacccccacccccacccacccacgccacacgcaaaaggacacaacgacgaggcgcgaaattaacgccaattatgtatcgacctgctgctgcttgaatccaactgttactggttggtggtggtgggtggtagtgcactcactgctcactcacttactcactcaaccgcaagcagtatggaaataaaatttagggtcgaagaaatttccctaattaattaattgttagggtatggaagcgtagggagga

SEQ ID NO: 22428 - DNA, 2312 bp, Heterodera glycines
  unsure (1)..(2312): unsure at all n locations
taaattacaaataaatatttaaatgcacagtgcaccctcttggaacacgaacagngnacgaaaccatgagggaaatatactttattaaatattttataagatgtaatgaataaaaaataactcaagattaatttttcaattaaagaattaaataatttttctcataaaatttttattaattttggaatttttttaaatatcctattaaacattcaaaataataataataattttggcagaagagacattttcacacaatgaatattataattgcttaaaatgttgaattgtacatatttttagagctcgttaaaaaataatttacgggagcgggagccgggagcgtgagttcgaagtcttacgggagcgggagcggcaatcccgtaaactcccgctctcgtgaaaatcccgtcatttttaacgggagtcccgggcgggagtaattcgaaaatttaattaaaaactcacaaaaatatttttaatgcacaaatttgaaggacaatctttttattaaaggaaaaatatgtaagcagaaaactagaaaaatcagattttgggtcgaaaaccagaaaattttttcaaattagttcaaataaattttttttataattattctaacaaaaaaaaattttaactttatattttcgacttcctttcttaatgttaacaactttttacggcgtattttttgaaaaaaaaatttttgtgcatcaggtaggaggtgggagataatgaaattaaaatgataaaaaactaaattatccttaaatataaattgattttatatttagcatagaaatttaaaattttttatttaaggcggaagaagcacatcaaaacaaaattttattaacaagtaaatcattgagaaaagcatcatcaacttacttcagtgaaggaaacaatttaaaaaaataaaaaataaattaatacttattattattataaattaatagagattttgaacaattttttaatcacatcacaaattatactatataaacaattaattcaataataattattagtcttaaacatataaatataagaataaagcttttagttttaaatgattatgttgtaaaccaattgatgacaatctaaaaatgtttaacttctaaaatggtgctgctccaaaaaatattggataaatacaaaagaattttcataaattatctaattattttatggaaaatcagtacaggatgtttaattttgcacattttttccgcattaatttcaaaattttttagggtttctaaattagtatctaaatattgtgatattattgcatttaataatataatgaatgaaaaaatttgtgcaataatttactactatacaaactgaatttcattatttataataagtgatataactgaatatgctaattatcatttaattaaaattactaatgattaaaatctaatttatcaaaattaatttcttaaaatatacattttatgatattagttaaaaccccaaacaaaaattctctgccaaagaagaacgacgaaaactggacatgtatgtgcatgtaatgattttatatcattagaaattgaaaacaatatttttaaaaaagtttattacatatagattattaaaataatacaatgtttattaaattttaccttatgggcaaaaatttttatattacctttttatatttgaaatatctttacattagattaatttgaaccctcaaaagtttattggagatttcttgccaaaaattacattgaagaaatttattaatatattaattgattaatagaaaatattaattaataagtaaaaatctagatttgatattgttgatgaaaaaataattttatttcattaattatttcctaatcaataattaaaaatatgaaatcatcccaacttgaattttaataattcaaaatgaattttttttctgatattaacataaaaaataaaaatcagacttattcaataaaaaatgacgattaaggaaaatttattttttgatcccatattaaaaagttatttgaaaaatttacaatatttaaaaaatattctggactaatttggaaattttctataatgtgccaattcttaagaaaaacataaaaatcaaaaaattaaaatctttgaataataattattatatatacatatatatatatatttttttaatatgtataattaacttcgaaattacatattttaaattaatgacttataaatgaatttaaaataaaagtggaaaaacctataaataaggtttatcaaaattgaatacaaaaatatacatttttaattatgcaattttataaaaaattcca

SEQ ID NO: 22429 - DNA, 2034 bp, Heterodera glycines
ggtcatccatatgcaattcaaaaattcttcatatggtttcctgcgggcaaacattccgcgcatcaaataaatcttttctttcatcatggtcatttttctcttctaattccaatcttgctttatctggaggcttgtgcacgtacttatgcaaatactttactgaactgacactattaaccttttcaagattaatgtgacacatgaacatcttcaacaggtataggttgtgcgggacaacccacctgttgtctaatgcatgcctttttccatttgcaaatacttcaacagttcttccatcatttggccttgcatacaaagccaaaccattttcaagaacaattgtctcatcctgaaaggttttcgggtatcccttagaacatttccttcctctcagtccattcttatcaacaaactattccatgcatgggcaatttgggttcaaatcgccacatggtccatggatcataaaccttttaaccaaagcatacaaatcagtttctaattctttgtctggtattctcgcactaatcccttttttctcaacatcttcaccattaatcattttatcttgctctgtcaaagtcaaaagcaaatggatgtgcggcagtccccttccttggttctccaccgggtacatccatgcaataacttctccaaaaaacttgccttaacaatttcattcatcataactttaactttcaagttaaaaactctaacaaccaaatcaggtctatcacatgaagtctgttcatgaaacaaattctcagaaatctcatcccaatgcgggttacacgtcatagtcaaaaacatatcaggcttaccaaaccgtcggacaacggccatagcatcctgaaaatgcttctcaacataccttggactgtttgttacacttggaggaagaatgaccttccttcccagtggcaaaccttgttcttgtgctcatctcattaacatattatcaacattcttatatgcatcagccaaaatctttttctgattacactttatccaattcattctgtctccttcaatcttaacatattcatcaacacaatactgttgaaagagctttccaccgtacaaaattgggttaaactctctttctctaattgcgactgtataggaaacatattgtaatctcgttactcttctattactatttctatgcttcatttcagggtgccaaccaagcgtaccacgcggataaaacagtgggtaagtcattggagtcaccattgaatctgtactcttcaaaatcttaaattcctttccacgttctctcaccacaatcttggcattaggtacttcaccgtcagccccaggtacataaactgcagcaacttcattcgctcgaggtacattgtaccccaagcgtctgtccaattgccttccggtctcaaacaaaagcttgatctcggctggctctctgttctcatttcttgctctttcaacttcttcatcttcttcttctttcatcatcatatatgcttcagcaaacggattcacatttctaatcacttcataagcagttctcagcaattgagggtcaatatcgacattggcatgcctcattgctctcattgcatgctcagtatctacgatgaaaatctgcccataagcaggatcatcgccatcttctggattcaaagctaaattcattctatggtaaatctgaccgtaaatgcggaagcaatacggacctcggttatttggatatctatatctcaacggattcattgaagcaaacgacacactactattcaaatgtctaatattctcaaaaaaattcacgtgtctcgcatcaaatttcataaacaaatccctcaattcctcaggaaaatcctgctcaggaatctcgggaaacaaaacttttccatagtggcagcaatccttgaaagaatgcctcggccactcattttttcttttcacaaatgcaaagcatcacaaaatgcacatctaacattcataggtccaagtctggtttcatgagcattcacataggatcccgctgcataacattaccacaccttgtct

SEQ ID NO: 22430 - DNA, 944 bp, Heterodera glycines
tttaaaatcagaaaataattttttttaaatttttccattttagtttcaaaaaaacaaacaaaaaaatgttcccaatttttaaaacgaaatagtgcacaaaaaggggggatggttagaagacgagagtaattttttaaaggatcgcaccccatcgaatatttccttatttctttttcattactgtccaaaggtgactgctgacattgactcttctgtagtccttaaggtacttggactttccacagtaaaatgtggcacaaattttggaactgtcccgcctcacggtgggacttaaaaacattgaaaagccaagttcaaaacttcagagaattatttgttctaaaaattacagtttaatttcttagagtcaaaagattcgaaacagaagcattatttaaaatcaaaataattctactaaatttttacattttagtttcaaaaaaacaaaacaaaaaaatgttcccaatttttaaaacgaaatagtgcacaaaaaggggggatggttagaagacgagagtaattttttaaaggatcgcaccccatcgaatatttccttatttctttttcataactgtccaaaggtgactgctgacattgactcttctgtagtccttaaggtacttggactttccacagtaaaatgtggcacaaattttggaactgtcccgcctcacggtgggacttaaaaacattgaaaagccaagttcaaaacttcagagaattatttgttctaaaaattacagtttaatttcttagagtcaaaagattcgaaacagaagcattatataaaatcaaaataattctagtaaatttttacattttagtttcaaaaaaacaaacaaaaaaatggtcccaatttttaaaacgaaatagtgcacaaaagggggggatggttatgaagagagaggaattttttaaaggatcgcaccccatctgatatttcc

SEQ ID NO: 22431 - DNA, 688 bp, Heterodera glycines
tttctgaaaaaaatatttatgaattaattatgcaaaaataaataaaaatttctaaaaatttgatcgtccataaataatttgtaattgatcaggggctcaccaaattttgcagggatacgtatcggaacactacaaatgcttactaattttcctagattttttaaacccggtgaaaattttttgcagacaccaccattttgcacttaaaaaaatttcaaaaaactttaaaaattcatagaaaatttaaattcataggtactactgctaaatcaacgcagagacgcctttccttgacctttttaggcccctgcaaaatctggtgcgcttctgatcactactcgaaaaatgagtgattgaattttcactaaaaagttaagcctaaactttttggcctgtttaaaaaggaattaaaaatttttaaaaattttattcatctcccaatttgatagaaaaagcatcagagtgcctaaactaacatgtaaataaaatttggtgcgtttcagaaccctttctgaaaaaaatatttataaattaattatgcaaaaaacaaataaataatgaactctcttccttaataattttcctgcaccgaaggtactcactcggccgcttcgcggcctcgtggtgtgccttcggcgccgggaaattattaaggaagcgagtccatgatttttaacatgcccctacc

SEQ ID NO: 22432 - DNA, 1505 bp, Heterodera glycines
gcattttttgaacaggtttaattttaaaaaaaaattttttttcgatttttggtttcaataaatcactcctccagtttcccaacagtcgcccatttcccaagaccacatttccaaaaaaaaattcacaattccgctactcttatttttaaacaatttttttttgacaattcaccgcctaattcaaaaaaattcccttccggcttccatcgacaatgcccaaaattcgcaaaaatttttaagtctattttcgggggtttggaattggtcaaatgaattgttagtacggcatgtacactccatgtccagttggccaaccgtgtgcctaaaatgcgttccggcgtgcctcaaaaaaaaatttacataaaaattctgtcgggcgtttcttccgactttttcccaattttcttattaaacagatggttaggagagccggtgatctgacggatgcgtttgttgtggaggtcggaccgggcccaggtggcatcacccgaggtttgtttttatttctccaatttttttttgtatttaaatcttgcctcagaaatttaaaaaaatttctaaatttgaaattaaaaaaaaattttctgtggcgatactttgtctcggcgagatttggtcccgtcccccttttttccgtcacccaaaagtgccatgccataatatcctattttgtgccatgctcttccccttcaaatttgccgctttcccgtttcagcaattcttgagcagccgtgcaaacgattggacgtggtcgaaattgacaaacaatttttgatgcctttgcaggttggtggcgcgagaaacgcaaaatcccttataaaaacacgaaataaacaatttttccggcagcgccagaaataataccaattttttcgattccatccggttctcaatttattgtctcaatacttgtagaaaatttttttatttatcagagaaattttcggggttttctgttatgtctccacaccgtttatccataaaagcgcaattttttaccaaaaaacgcaatttttgtctgttacctctcaaacatcaatcaatccgatttttaaaaaatttattccccctctttccattagcatttgagcaatcattccatggagcggatgaatgtccatcgggcggatgtgttgaaatttgacattgaacaaatgtggacggatgcgggggcggccaaatgttcatgggttgaggtgggcaccgggggcggacgcacaattcactcccccaaaaaaacaatttttattgaaaaaattgagcaatttttaaaaagagacaaacaaacaccaattttgaatcggattgaaatttttttatttgccaattgcacaggaacatccgaattttcacatcattggcaatttgccttttcaagtctctacgccgctggtcataaagtgagttggtggcatgggttagtacggcgtaacccaaacaacttttaaaaaattgaagtttttttttgaaatttaacgaaattttgcccgatgataaggaacaca

SEQ ID NO: 22433 - DNA, 1482 bp, Heterodera glycines
ctcatcaattaattattaatttagtcagcttaaaatgatatagttaataatcaacagatgacgaatgattataataggaaaagcagcgaccaaacagaacattaaaatgaatagaaatcgacaatttataaaattataaaaattgtagaaaaaatatttaacgattggataaaaagataacgaacttttaatatatttgaataaaaatttaattgtaaatattcataaatatataactagaaaagtagtggaagaattgtcttttataatatttttaattttaaagtcttttttattattaatttcacctacaaatatttttttatattatttatttattattgaaatcgattaccttcatttattttgagaaaaacacaattcaacatcccatgtttttttgcgctgcctatggcccgcagggtccaaacttcattagaattattgatggtgaattaagaatttattcatattttacaatttgtattttcgagttttgttttcatattttatttagattgaattattacggtttaaataggttaattataacattaaatagaaatttaattcttttgaatttgttgattttaattatgtaatttaaataaaattctagttgttggattcaaggatttaatttttcattttttttattcaactataagtatcattttgagtaccaatcttgtttgcctgcttggttttcgctcccgctaggatgtgacctgaattaatttaatttatttgaatgtttattatttaaattttttgtaatttcagtgaatttttttttaataaaattatataattaatcaaacaaattgtaaaaataaattcatgataattacaatgagctttatttcaaaatgttttttttaaattttcttttattagttaatattttaaattgagaatttaatttgcgttgctttactcttcatgttcagcataattttttttcaaataattgatttgcatttatctttttattgtttggtttcttaggttcattttttttcaaaatatagtactaaataacagaaagtatataagtgctgaatattattataccaaatttatttcatttaatacttttaaaagcaaaaaaatgaagaaagggtaaataacaattattaacagcatattcatgagtatgtacttaaatttcggatgatacgataaaactcgcttcccaataacggatataatggttttagtaacagattttgcacaaaaaaatgccataaaataataaaaatattggtataaaattataaaaaactataaaatagtgaacgcatcgcgaggatgatgagcgggggtgggtatccactgtgacgtcaatcgagttggaggaggcgcttcgcaacgggtaccggtgtacggcctattatcgctccgtcgagtgggacgatacgcggtggagcgaccgcgtttttcgaggctacgttgccgaattcatggccatgaaaacgcatg

SEQ ID NO: 22434 - DNA, 2172 bp, Heterodera glycines
aaacgatccaaaatgaaatggaaatgcttaacgacctaattatcccatgtttatattttgttaaggtgcgcgaaaacaaaagcaaatgggcaagaatgtcaactgattgccacccaagcacttttcttcatttctcgcatattatctccaacagtaaacaaacaaattaatcagtcaattaattatttaattagaaggaagaccaaaaaaataacatcaattaactcggcattaaataaattataaatatgaaaagtaaatattgcaagcaatgaaataaagaaatatttattctttatagcagcgtatcttttaacattcggatgttaatgttaagtgtttatcgaaatattaatatcgttcaatcattttactgtccgtaaagcttggagccgtctctgaaaaccaacatgcactgaacaggagagaaaaagcctaggaatttgaaaattaattaattctttaaatgaaaaaaagtaacttacaatttctttcatattttttggcctgaacaggaccaaattgtcgccgacgcttttccaaccgaacaaatttattggaaaagtcggcaaatttaaacattggcggtggaacagtgaccaattgaagcacaatatctttggggtcactaaaataaaaagttgtaaatttttgtagggattctattacagtatactgtaaaaactaaaattcctaccgtaatgcgttggagaagtaaattctgtcgttggttgagcctagtggaagtgatcgaccgatgctgatcagatcaaaaagcatggctaacatcagcagaaaggaaaagcagcgacagaaagaggggcgaatttggcggaggacgaaggaaggaaaagagaggaaaagcatttcgaaatttggaaatatttaaaaaatgattatccttaattttataaaacatttgaaatttgtcatgagtagagaaaataggcgcgttccagtgaataaaatatccttgtgaatagccaaaagctttttaatgacaaaagttgggcgcactgaatgtataaatacgaaatgacaaacaatgggcagtagtcgagcttttattatgggaattttatgggcaattggcactcttttttggcacattcggatgccattttcgtttttctatgcccaatgtgaaactttctctcaaataaaaagagtaaattaaatttttttttcttcgtatctgccaaattcagcatatccaaccaagcataagactgactgacattcattacctttgagccaatgttcagaggcaatttattcaaaaatttttgttctctaattggtatgtaggtcgaaataaaatggaatatataaaaatattaaacatttatttattatccattttattaaactcctatcttaaatttatttttattttttaaaggatttcatatgaaaaatttatggcctaaattggcacacacacagaaaccaccaaagaaaaggttttgattaaatttaattgcacacatatggattgcatgaaaaattatttgaaaagaagaagctgtcctggccttggttggggggggcctttcaaaatgccagacggagtcactaattaattttaattttggcgttgctttacataaccaattagtattatgcggacttttttttgagcagccaagtaaaaggttttcctttttaaatttaattaaacaaataaacgaacttttaaaatggttagaagcccggccgccggccgcgtaaataaaaattagtcaaattttctgaaattttcttcttttcctatcatcaaattaaaaattatttcatataactttgctcgaaagaagcaaattttaattctctaggccattcgatagcccgaatttgtaagaattctctatttacttgtttcaaaaaataaaaatgatcaatttttgtggttttgagacaattggcgaccattttccattcaaaaggcttttttgcggcaatttttcaaaagactttcttttttaggcggggagtccggcggtgccggtaggcgccaacgggaatttttttgggatttttcatgaatttttaatggctgatcgaaaatagctgtgggagctgaaagcgctgtgggagcaaaaccaacaggggcctaaatgaaggaaagatgaccccaaaacaacaggcatccctcaagtggtggatgtgggt

SEQ ID NO: 22435 - DNA, 1100 bp, Heterodera glycines
catgcagctgcagcagaggcaatggtgcttggacgagtttcacatcagaataaagaatatagtgtgatttatttataaaaattaataaaattctattattactacttgtgtgttattttaatttaaaaccaaaatatttttgtaaatttttattattataaatttctttttttaatgaatcccttttgtaatttagatggctcaattgaaaaaagcatggcacgaatatttggagcgtgttaaaatgtttatggacaaattggaagaggccgatttgtttaatgaacaaaatgtggcaagggtctgcattcacgaggccggacacaccctgccgaaagcacacgcagccagatgatggccgagatcgcatgttattatggaggcaaaattgccgaactcttattttgcaagaaaagtattggccacggagatgatatgaggcaagccaagaaattggctcgaaaggcaaattttaattataataaattcgtgaaaaagcaaaaatttatttgaattttttgaaaaagaaaagtaaagctctggaaaagcaaatttctttttttaagcttgctggtgtggaggccaacccaaccacccgcagtgcacgaaggcaggtcaagctgatcctggacgaggctgaagaattggcggaaacagtgctcattccgcgcgaaaaaatgattaagaaggtgaattttatcctgcagttttaaatcctatcaaattttacgagtccaatcaaaaaacagttgtgttttacatatgccatttttttataatcagacaaattttcattaaaacgaatggactcataattggttggactcataaaagtcgattggtcttaaaaagaaggagaataatttcctatgaacaatagaatttgatccacttttacatattcagttggccatcaaagtatacaaagaaaaaacgatggactttgatgccgtaaaaaaagttagtttttatatactgtatacacttgtcacgtgtttacataaggctcccggacatttggacagtggacatctggacagtggacattacgacagtggacatttggacagtgaagtcatttggacagaaccggacaattg

SEQ ID NO: 22436 - DNA, 855 bp, Heterodera glycines
ggaaatggttattaaaaagtaagattaaatatgtgaatgtaattaatagattttaaaaaataaaataaatttccttttattaattaaaaagaaagttggaaatgtacaaggattgaatatttatttaaattgaaattaattttacaaattctaatttaaaaaatacaggagttctttaataaaagtaaataaattattattttaatttaaaacatttttcacaaaaaaacaatttaatttaaatttaaaaattttatttttattaagaaaaaaacactcttttaaatgaattaaaacattaaaaataacccaaaaatacatagaaaataatatacaccgcgcggattcgaacttcgcccccaccaaaaaaaaaatgatgcctcagaatccccaatcacacagggattctaaggtcttaacgatgttagaagtaaaatctgatcacgtattcgtgatcagcggcccaaataacccctaaaggcatgtttttggaatattttcggtaaaaaaatttttccactcaaaaatcctggtcacccccctttggtcccgaatgccaaaatcacttttatttttataacaattcttaaaaaagtgataaaaatgccaaataaaatttatataatagagtaaaaaattgcggatttttgtagtattttacttttacagtatgacttttcagaaccgagttctgaatttttttctgaaaaatcgaaaatttccagaatctctggaataactttttttgtttttatggtataaatttcaaataaacctcataaaattctcacgattttttgctatttttaaagctttatttcatcaaaattggtcaaaccttaggccagactctag

SEQ ID NO: 22437 - DNA, 1147 bp, Heterodera glycines
  unsure (1)..(1147): unsure at all n locations
aatgatcgaagaaaatttttttgacccgaagagcaaaaaaaaagatcttgagcaggcaaaaaatttgaaaaaatggtcgatcgtaatggaaatgggctctgacccccccctggggggccaaagtcgatcgtaagacctcttggctgacgctccccttgcacaggtatgaattaactaaacccaactaacaataagtaatgccacagaacaatccaacaatttagccatcctgcgccctaattaaattataaaaaagtaatcccctgttcctgttcatattatgttcgtcgtaccgatggacttgtacttctcagaggtggagtcgaacacaacggaagtgctgtgtccgcccgctagggtagcgggcgttgtctcctcgtcgtcgctgctggtgccatcattgttgtactgctctgacttgacgaaatgcattttgtccgtctccgtctgcttcagccgacgagctttagccagcatggcgttcagttcgtcctccgcctcgtcctcaatgattgtcggcaggtgtgctgccgtgccatttgcaatgtgtgggaattcgtcctcctcctcttcctcccccacttcatcttgctcctcatttttcattttgtccgccaacgcggtgagtaagtccatgttcacattggcccgcgcgctcttccatttgttcttttctggaataattagtattcagttttttaatatttttaccatttttctgatagcactttgtctgattgtaaaatattttatgtccctttctttgttcgcaagactcattaaaaataatttgcactcgccaaatcatatagaaaaatactatttttaaaacctctaaaatttcagccgtagctcggagatttttagggtcaaaatccggaccttggttaaaagtgttttccaaaagcgatctctaataatttgaattggtaaaagtggtgatgtgtaaaaaaatgaggaaatgtaataaaaaaagcaagtccattgttattgattggcatttgttttgtcccattttctcgccttgcncttgtggtggttgtactccttcggcctgtgctgcgtgcgcctcgtcgccgcggtgtttccgcttccgtcccttcccatcatcggtggcgccgttccgctgcgccctctcctcctccat

SEQ ID NO: 22438 - DNA, 1443 bp, Heterodera glycines
  unsure (1)..(1443): unsure at all n locations
aaaatcttagtcgacccatcagcnccttttaatgcatcccgccagcccctaaaaaatttattnttcagcattttntgatttttggaaattttttgaatntaattgaaattttttcgaattctccaaaaatcccgcaatgcgcacgggatcccgcaaattttaaatgcgggattttcgggattgcgggatttgcgggattaaccccgcgggatcccatcccgcaaaaaattttgagttccagtcccgcagcgggatccgcaaatttgaaatttccggtctctaggcataatatttaaattcttatttatggggaaataattatctcagattaatattaatttttttttctaattttaagaacaaatttggcggaagtgttaagcccgtgctaaatgttgtgcacacagcagaaccgccgcccacatacaacagaacgaacaaattcacctccgtgttccagggcattgttgattcgtacggcattgccagctatttggaattaaatccaggcaacaaatatttatttatttgtttaatgaaaatctcattatttgatttatttaaaaggattgaatcattctcacctagaaaaacctgataaaattgttaaaatgagcttaaatttctcaaaaaattctccattattttaaaaatttgtcaagaaaaatgaattaaaatataaacaaatttttgtcgaaccaaaatttttataattttcttaaagtgaccaaaaaaactcaattttttttttgtacctttttgaaaaatttattataaaactttcataaaatttttttaaaaaattaggaaaaaatccatcttttatggatttgtaaatagggatgggattcttaggtttttatttattttttctgcggctttaactcgacgaaaaatgcacgaaaaacacatattcttcgttttaacgcccctatccgaccctaggaatccctattttgagtgttcgccctaaaataagttcttactcctattttggcgtttcgcccttattttcgcccttatttcgcgattttttaaatttttttatagaaattcacaaattctttaacaaaaatgcaatgaaaaaaaattaatttttttttgacgcgatcacattcgcgaattttttgcccctatttaggtccctattttggacttttagcccctaaaaatcccatccctatttacaaacaggcgagtattttcaaaatcattgcagaaaaaaaagatatatttgtaaaatttttaaaatttaaaaataatttttctttatttcttttaatttttgttttagccccctacacaatcatcactttcccatttctattctccattatgttcggtgatttgggtcatggaattttgatgttcttttgcggactgtttttggtgcttcgtgagaaaaatttggaggctcgccaaattaaggatgaggtgaaatat

SEQ ID NO: 22439 - DNA, 1483 bp, Heterodera glycines
  unsure (1)..(1483): unsure at all n locations
acgcgggcgtgcgcggcctgtcgcagcagccgcgcctgtaaanagcggtgttgaaagcaaaaaaggtcattgatttacattaatttacatggccggagaccccttcgcaaaattggaaaattggccgctgatcccttgttttgcaataatctgaattttgagctctacatctgaattttagtgttctttatcctgaatttgaaaaaaaaacttggtcaccctcaatatacatatacttctgaacaattctaatgctaaaaacaggcactcgcgcgaaaactgaataaaaattttgtatttgaaaaatttccaaaaatttttacgttggaaaattaccggtttttaccggtaccggtaccggtggaaaaagttggtaccggtaccggtttttgcattaccggtcagtaccggtactggtttttttacaattaccgattaccgctcaactctagtcgaattgatttatttggggtaaagtaaaactccccgaaatctcatcatttgcaaaatattctcctatttggtggtcctcttatgtgcgttccctttttcttccgatccgtcgtcattttatgtcaaaatgtttccgcgccttccgtttttggcaatgatttttcgcctcctattggcacttgtccaacccctcgagcccattggcaacagttgaagctgaactggttcaaaattgttttaataaaatgcgattctcgtgtttttctcatcaagtattatccgtaaaaaataggaaaaccctaaaaatccaggctttatccaacgcaattatttttctgctatttgtgtgacatcattcgaaattcaacagcaaattgtgctaattgccaaaaatgaaccgacggtaatgaattttaaaagtcacaaattcgtcgtttatttgactaaactgttttcccatttcagttggatttgcaacgacgtttggatggacattttcccctcttttgaccgtcctcaactcggcctcaaattggcacttctttcgccacgtttcaatgcgttggtggacaaacattttgatggcaaaagcgaattgacaatttggagaacgatcgaaattcgtcgcaaggacaaaggaccaggaccgaagctgtctgtacaaatggatgacaaatctttgccggaccgtccgttgcccagcaaaatccgttttaaatggcttcggattgagtaattcggaatcagagatttatggcaataaaagcattcatcccatttttaggtacatcgatcactccgtcatcgcttttcttcgttcaaatcatcaaattttcgacaaaagaggcaccaatttatatttgtggattccatcatcacaccctacgaatggccaaccaatttgggacatttttggtcgtgaaatttggccaattttttcggcaaacattcgccacttgcgctttaacgatggtgatcagttggacaatttgcttcgtcaaatttcgccgacaattttaagggatcttaa

SEQ ID NO: 22440 - DNA, 2378 bp, Heterodera glycines
  unsure (1)..(2378): unsure at all n locations
gaatttcctccttcgctcccggccgattaaaatttgaattcgaatttctattggcactgacacaaaaaaaaccattgtaaatccaatttgaaaaaaatggtcaaagacaaatttatataatttttttccacaatttctgcttctcaaaaagcccaccaaagacaatttgttttcggccataaattatacgaggcatatcacataaaatgaccggacgagcgccagccgaagcaaaggccaaaaatgccaaaaatgagggggggggggaatggtcccgaagggcatatatttttattatgaaaaattggactgcaataagaccaactcattgttatgcatcgatttgtcacaaaaacgattcagtaatgcccgaggcttttaaaggagacgaaaggccaaaacggcggatggccccgcggcatttggaagcagtgccaagaaaacatttggcaattcacaaaagtttccaatgacaacatatgttgttgtgtgccatggatgctatgacaatgaccgatgaatgccattggaagggataattctccccccccccccccatttttgcgtgggcttcggaatcaaatttccctcccccactcggtgaataaacaaatcgctaaaaattgctttttttccgttgtgcctttctttgccaatggcactgctcctcggcgccccacccacacttttggcacacatttttttgcttttgttgcaaatggtaatgcgataagcgcgggatgacaccggacaattaattggagagaaacggcggaaagggacaaagaaaagacacggaatgaaaacaaaatggaggaaagcagcagcagtgattgtgagggaatgataagcggaggatagggcattaaagcatcaaatgattgttgggagtgataagagagggaaatgggacggtatttaaggggggataagccgaaaagtgacagacggaaataaacggaaagtcgagaatcgggtggagaaagttaagtcgggaattggttgaggaagagacaaaaggcatttttaggccaatgcttaaaaaataaagggaatgcgagagttttaaatgttcagactctgattttgatttcgaaattaaagtggcgataacaaatcggttttccacggcacagaaagtgtccatccgtccggccgtcgtcactcttttgggcaccaaaaccaccaccaattcaattcgcttctccgtccgcccgtccgctgtttgccatgtccatttttaataaagatgggctgccctgtgcccaatttcatcctttcccttcccccctcccctcgtcatttcctgctgcaacagaagcaccagcgaaagcagcagaagcactgagagtgtcccctctccgtcagtcgcccgtccaaattaaattttacccgccaccgccggtgagaaaggaagggaatgaaatgggatatggacgaaggaaagaaaagggggaaagggaggggggggggggggagggaaatgccggtgccatcgaaaaagggagggcaaaaagagggccaaatctgtgcgactgatgcgaaaatggaaaatcaaacaaatacatttcaacagcttaataagagaattagcaaaggtttaattgtcaaattctgatcaaatttaggcgcccaccgccaaagccaaacagttaattattattggggataaacgaaattcatcaaaatcaaaattcatactaaatttataagtatatctgttatcaccaaaagcgaattattgatgaagtttgaaaattgttttgttttcagaaaataccgtataaatattcaattttgatttaaaaatcttagaaacattatgccattaataaattcaaaaaggaaaagcataaaaattaattaggttcaagcacaaacaagcaaaagcatcaattaataaatttcaaattttctctcttttaaaggatgttaattggttcattaataaacaacaaaaatcgacaaattttgcagttttcttccttttcttcaattttatttaataaaagccgcaaaaaacaactcaattttcttcatttaaattttttaaggaggtaaaagagttaatctacacttaagtatcaccatttacctcatttaattcgttaattttttgcttttcccataaaatagtacttctgcttcatcttcgtgcgtcgagtcttttcccgaatggcggcatcaaaatatgtccaacgaattttgtccgtcaaattggccaattcttccgacgactgttcagcccgactcggagcagttcaaacagaatgaagccgaaatggcagaatcggtgcggaaattaaatctgtnaaccgggaaattaattcattatattcagataagcgaatcaaaaatgtggtcgatgcggtgatcga

SEQ ID NO: 22441 - DNA, 2030 bp, Heterodera glycines
tggaccacaccagggacaatcggcttgccattggcttcaccagcggtcggataagcgtcgtttccgcaaacacacaacccggcgtaaagttggcgcaaattcaatgcattggcgcagcaaaagttctaactttaaggtatttgcgaggcgaagatattcgggaggcgcagaaaggcatcaattgtttggattggaattttaatgattcgtcacgactctgtgcagcctatgaaaggtaaatgcaaactgtgaattcagagttgggagaaatggggcgatgtacagttggtgatgggggggatgtggccaagtagggtaacgcgactgacgaaatcactattttccattttataatttgtgatctcatcatcaggaaacacgtccttttcccaagttaaaatattcgtttaattccatgtttaggaatcgtggtactgatcatgccgtcgttgtgtacgatttgaatcggacgacgcgcaatgtgcgagaagtgccaatgtcaattttcgaggctaattttgctgaaaaagtgctcagtgtctgttggttcaggttcctccccatgcttctgtttccaattctctcctcttccattggcttgccctttttagagacgacccaaatttgctgctgatcaacgcaagtcgcggaattcgaattgcggacattcgcgagcacggcaatttccacagcactttgagtgtccaaaatccgatgatgggcctttgcagtgagcccaactttggctttcggttccgaaaaatgaattcattcactcagtcatccattttcaatttagttttgcttgtttcgctcacaatttggtttttgtttacgatcggcgttctttgggctctgcgccattgcacgaaattgaagcttgtgtaagtaaatgggtgttgttttgtttttaaatgcattttaaataatatttttattgaataatgggagtcggctaatataaacaaaagatggggaagcgacagccatgaagtaatggtttttggattatttagagttattctgttctttcactgcatttttcgcccttttagtcaaattccaaaatgttaaacaaattggcgtggcacaaccgccgtctcttccatctgacagctttggccaaagattgtggcaatctcttcaatttttccatttcatcctccgccttttctgaccgtcaaaaaaatttgactggcgctgccgacccatcgtcgaacatttacagtcaattggacccatcacaacggaagggactcgacattgatggtcactcatacggagttcatttttactcggtttggattgttttttgatttaacttattgttgtaaatcattctttgaattcagctgcccggaatgtcgtctttgacctccttcgactggcacccgaccatcagtgatcggttggcacttttacctgcccaagaaaagccaatagcttttgcccattcggtcgcctctacaaaacgaattgccataattaaagtatgtcttgcttcttatttttttcactagttttctgttgtgtttagcttcgtgatgacgtcaattccgtcatcggtccttccggtgacttttgcatttcggcggggccgcagctgaactttgaaaacggcgagaaattgttggccaaacccaactgcacttctgacattgacactgaaacactgttcaaacgacgggtgctcgtcggctacggctacggaaattcactgaacgcattggcaagtgagtgaaaggcattcattcagtcggaaggattcaattatttgttccaaaaaagcactgctcgaatattcgaagaaggccattgagagagatcaattcgcttcggatgacttacgcttttgctgggattggctttggatgcaattccaatcggcggatgctaacgaagtgcagaagaattacgggaccatgtgcgaagcattttttggatgtcctcaattaatttactttcattttaaggttcgctggcgttaaacacattttgaagggcacaaagtccagttcgaccatcaaaca

SEQ ID NO: 22442 - DNA, 985 bp, Heterodera glycines
  unsure (1)..(985): unsure at all n locations
cccccccccccctcccacgcccttcagagcacgacaaatatttcaacaaaaattttgaaaaattgactagagcaatcgaacgctaacggacgacctaatggaaaaaaaatccccgaaggagagaatttaattaaatccattccttcgggggaccgtgccgggtgccgcggggtaagcagtgctggttcgtttcatcacggcaccgaaccttttggctagtcagcaatcgttgcttaacttgccagatcggacgggtgcgcatgattccactgttccaagcaccccaccaaaagcaaaacgatataaccaaaatataaggaaaaattttttaaaaaattttttctccatcttcctttttgatactaaagcatcagagtgctaaaattaagttgtaaataaaatttggtgcgctttagagcactttctgaaaaaaatatttatgaaacaaaaaaatcgattttttcaagtgtccgtttggggtactcaaacatttatggggagcaaaaatccaacgcagaattaaagtacaggctatagggaagctattcccgaaggattcggtctccccataaatctgggcgcatcggttcggggggactgccccgaaaacaaaaaaatcgattttttcaagtgtccgtttggggtactcaaacaattatggggagcaaaaatccaacgcagaattaaagtacaggctatagggaagctattccggaaggattcggtctccccataaatctgggcgcatcggttcggggggactgccccgaaaacaaaaaaatcgattttttcaagtgtccgtttggggtactcaaacaattatggggagcaaaaatccaacgcagaattaaagtacaggctatagggaagctattccggaaggattcggtctccccataaatctgggcgcatcnggctcggggggactgccccgnaaacaaaaaatcgatttttttcagtgtccgtttgnngtactcaaacaatt

SEQ ID NO: 22443 - DNA, 1869 bp, Heterodera glycines
  unsure (1)..(1869): unsure at all n locations
ttcaattttttcccggcggcaataactgggcgctggcttcttctcccatgttcccaaaaagttttttggaaaaagcgcgccacaaaaacatttttattgattttttcatttgtaataaaaaaaatttttggcaaatgtatatgtatgacgacaacactgttttttaattttttggggaaatcttcaatttaattttatttcaaaaccctgcatccccatgggggggggaccacgacaaattataaaatgcgggtttttttcgcggggatcaaacccgtcccgtaaaaaaaaaattaaaaaatttcaatcccgcagcggaatccatgaatttgatttatccaactttagtaaaaacaatctgccaatgaatgggatttgcaaaatgtcatgcaaacgcagaaatcaagtacattaagatcatttacccttcaccaaggcggcgtcatggcagttcgtaaatttttttttaatttttaataaaacctagaaattttcctcaaaaaaatgagattaatttacaaatcgagaaaaccctaagattttaaaaaatttttacaagttttgaaaaataagcaaaaaaaaaatagattttttttggcttttatagatttgaaaattcattctagaaaaaattctaggtaatataaaaaaaactcaattgtatgaactgccattgaccatccaccaagacacatttcatcgtttaaaaaagttttctccgtatgcgtgctaatctaatcccaataattaatttgtggcgcaagagacagaaaaatttgccgagactctcgagcatcgtgaccacaaattaatgatggtgtgatgggggaaatcccaaatttggaagtcaataaattacagaaatacaccaattgaaaagaaaacatacacaaaaatgccgaaaaaataatactgcgaatattggagaagaaagacaggcatttacaaaaacaaaggcatactgtaaacagagggctcagcccgttttttttttgctccaaaaattgttaattaattttgtgaatctgttttgaagaaaaatttcgtcaaacagtcaaaattgggagtataaaaaaaggagtgagagagaaaggagacttgggaaggagccttggatactgtagaatttaaaaaaaaagtaaagaatttttttatagaaaacctaatgaaacgagcaaatatggacaggggcatgagagatgatagatagggccgtcaaaagttgcaaaaaatcgcaaaatatgagtataaatgtgaaaaatatacacccaaattaaggacaaagttttccaaaaaacttcttcaatttagttaaataagctaaaagtcgagaaaatagctagctatggtatgaaaaatcatttttgaagaaaaaacacaaaataaaacgaaaattattaatttttgaagaaaatttcatgcgtttcacccctcccacaattcagggaaaaaatgcatgtgcatatttttttgacagtcctaatgataagataataatggaagacattactaattgaaagaagccagtggagagaaaggggcggagaaaaaagaaaaacagagagagtaatgcacaggagaagcaacaaatgaatgaatggatgaatgggtgtgacctcggcgtgacaaagccaattaggagtaattaatcaagcaattaattacctaccaattagctaatttcgcacatatcaatgggagaaagaagaaacaatgtacaaaaaaattaataataatatgttgcggaagcaatcaatacaaataaacataaaagcatttagcacctaattaaataataccaaaacttttaaacaaatcagtttttaccgaccagatccctaattctctatttaattcccanaaatttga

SEQ ID NO: 22444 - DNA, 1072 bp, Heterodera glycines
ggagctgatgccgagaatgaaaagcatagagaagaaaaggaaagaccaaagtgacgacaaaggcatgcgactcatcgcctgaaaagccaccgatactttggaattgcaattcggacagaaatgcctcggggtaagcgacgaaggccaaaccggtgccactttggaccacttggtcaatgggctggtccaactgtttggccatgaagccaagcacactgaacactgctgtcccaccaaaaaccgacataaaacctgggaaagatttaaatggcaatgattaaaagattaattaattacctaattaattaattaatccgtggaaagaaaaaagtcggaaaacaaatggaaaaaaagaaaaagaatattcgtttttgtctgtccttcattttggtaccatcagcagcagtgataatcagcgcatcagtgaaacagttgtgggaatgcgaattgaaagaggacaaagacaaaatgccaccgaagccgacggacagcgaaaagcacacgtgggtggcagcggcacgccaagtctttttttgggaaggggcgtcgctttaaagtgttttcgggtggggggggggagagtttggcagcaaatcactgtcaaaacataggccaaaatgaatgatcctccaaaggaatggcgaattaatcggaaaagtttgtgattgcccgtgggactgaccgcggggtcgaaaatgacgctaaaattgggccggaaaagataaaagtccaagcccaactgagcaccgtccaaggaaattcctgtggaaaggggggaaatggacaagacaaatggaaaaactgaggaaaaggtcaaaccacgaaggaacagaacgacaatgatggcataagggacagtggcagtgaaataagcgactctaaaaaaaggggaaaatggcaaatgggggggggggggtaattagcggatgggggggggggaaaataattcaaatggggtataaatcgacaattattggatttctaggcttgtatgtcttcccaatcacttccccatcattttgacccttttgacgactacttatgtcgatgacaattcatgtcgagccgagag

SEQ ID NO: 22445 - DNA, 1591 bp, Heterodera glycines
aaattaaaacagcgaagtcgcatcaataaccattgatttcatttcataaaaatctgttccttaaatattaatacattagcaaagtgctctgaaaatggaaaaaacaaaattcaccaatttgtttaaaaatattaataatcaaaaataaaaaaaaacaataaaattcataaattttattaaaagcctccgaattttgtttctctttttaaataagccccactttgcgagggattatttacttttttgacataattttcataacatctaatcaaacatcaaaattttcattgaaattttccgggttttaccattttcattttcagaattttggccaggggaaagatcgtcacaatgaatgacgaattgccaaatttgacgattggcgttgtttgatcagaggagaggaccggtacaggcacaatttggcacatggtctaaatatcatacccaatttaagaatttaaataatttaaattcaaatatacagtgaatggtagaaatggggaaaatttctgtttttatataaaatcacaaaaatcacttttttggatagagcaaattgttttattgttccaacaaaatctgtcgagttgccttccccccccccccctcccccctcaactaatgagaaaaattttaatgatgtacatcacaaagcggcacaaattattacgagagcaaattttgtgatacatttaaatgttttttttattttaattaaaaagtgggaaagggaaattaataatttcattttaaaatgcggctttagctgtgcacaaaaattgtttaatttattaaaccatttaatattgctcttgcctttgaattgtttaataatataaaaattttaactagaaaaaataatttaattttttttaattttaatttttttcttgaaaaattcctcttttcatttttgcctaattgaaaataaaactcctatttaaataatttgtgttttttaatcctatcagtcgatttgtatggcaaaatttgagcgcattaaaaataaatccgttccctggtaataagttactgtaaaatttacttattttaaaattattaataattttctctgagatttgagttggcaatttgaaattttaacactgacattttgcaggcattttctagtgatggtggacaagagtgcttaagtgtaagcagaatgcgtacgcgccgagaaaaatgccagattttgatttatgccgttgcattttccacatttgagaccgcttgaaattggtcagtaaaaataattcaaatttcaacatttttgtttttgtagtcattttgcgatgattcttttaagctgtaatggtgccaaaaattgaattttgtgtgcaagtggtgccaaagtcggtcagctgctgatggcacattatcacgtaattatcatttggcacttatcgtggctttaatatgttttcgaaacaaaataaaaattcaattttttaaatatttgtttttggattttttttgcagactgaatcaatttttttgataatttaaaaagaattattattttttatagtctctgagttcgtcactttataaagtaggtttaaactttgaactttatatctaatga

SEQ ID NO: 22446 - DNA, 1529 bp, Heterodera glycines
tggggcctgatcaggactctaaaattgattagcgacttgtgcaacacagacaacccctgaaaagtcggtctgccactctgatccccctcttcccatggtccaagccccgaaagcatagggagggaaccatccggtgctaccagtaaagccgtgatgtcccatacccagtgcttatgagggaaatagtccagaggagccctcttacgcgtccgtaattaggccccgcagggcttggaagggaagggatgttgatggatgcctgggggtacctcccaggcggggatcgattagccattccactgaatgactcccgactgaactccgactgtccctttggctggttatccgttgccttttaagcgcccctcgggatgggaggagccctatcggagagataaaatgggggggggggaagggtaaaggccatttccggtcccggccttacacctccggccctccaaaagaccgtccctggtcgttaaaatttaaataatttccaaatttgaatgaagtcctcagacttttctttcttttgatttgttttacgatgagaaatttgttttgattttaagccaaaactgaaaataaaataattcaaatatttatttaattactcaaaataaaaatggaaaatgccgagcctctaatgggaatgaacccattcctccaaccaatccacagaagctctgtcattgagctactaaaagaaatccgccctttttaaattaattttcttgaaattctgattcaattggatttgaattaaattggcattgcttttcaaattatgagacaagagaaaatctgatgaaatttaaaacttttaaaattatataaatttaataattgttttatttaatttccaatcgactaaaatttggatttttgatataatttggtgtgactgtatgactatacctccccttcatatctgaggatcgtccctgatccaagaacttaaatcccacgggattcatataccaatactacattcatttatttaatttaaatattatttttttttttttaatttatgtattaaacttttcccttaataatcatttctcacttgttgtgtttttttttgtgtttatttaatttaatcagctccgcagagcttagacaaatttgtgtgaatatatataagtagagtagctccgcagagcttattttaaaccatcaaatataaatgcgagaaataacaaatgaaccattgggacgaatgatgtcagggtgccatcggaaaggtgaatttccgggcaaaataaaggatgggtgaattttaattccagatgagagctgaacacttttgagaacaacattgacttgatgatctcttctgaagtgttcaagcggaaaatttgcttgacgtcgtatgacctttgttgggcaagacgctgatgccgaagtagtcatcacatattttggaatgacctcggtgggtgtaaagggttcattgatttcgccaattgtgccaatctcaactataaggtcagattgccacatttttatggtaaaatatatataaa

SEQ ID NO: 22447 - DNA, 1578 bp, Heterodera glycines
aaaaaattggggtaccaggggggcggtcgggcggtgccgatagccgccgccgggggaaaaaaaattaaaaatttgtgtgtgatttgttaacagatatacaccaaaaaattacaaagttttacgattttaaggatttttatggactggtgggaagatttttatagatttttacaatcatattaaacaattttcaccaaaaaattattatattagatcaacttttggatatttttggtgggtttggaatctgacggtgtctataggcgccgcaaagaaaagcaaaaaattttaaacacttgaaattgtataaattttcaaaaattccgaaattcatctttaaacttttaaataaaagatatttcgccaaaaaattattatttattcaaatttgggtagtttcattggtgaaatttagcccggtgaaaatgaccgggcccgggcggcccggcagaaaaagtccgttttaccgggcggcccggacccgttttttttgaaaatttaccgggtccggcaaaagcccggcgggcgcccgggcccgtccggtcgctaaaaaatattaatttcatgtggcgcattcgggtgggggacagtttagtctggccggtttagtctgagccaagtttaatgaaccataacttttttctcagctgaccaaatttcataaatttagcatcattcgaaagtcctacatgtttagaagcttttgataaggtattcctaagcgattgaacaagttataaaaaagttgcaagatgaatactaccaaaaagtcagaatttttgcatatttttacttataacttttttatatgtcggtatatccttgtggtttttgggaagccgatagagcttgttaagagctttcgaatgataccaatattgttggatttggtcaacaaagaaaagagttatgatgctctaaacttggttcagactaaactgtcccagtccgaagttttaaatgtatccaaatgagctaaaattggcacctttcgatttgcctcgttgatccgcaccgaaatgttagaatttgtttaattaaaaataagtttttactcgattcaattgcttaggctaggcctatgctttgggctaggcttaggcctaggtttcattttgtaaattttattgtacgagttgccatttacccaatcaaccaaaaaaattattttgttatattgtttttttcaattgtttgttgtcattttttctgtaaaaaaaacatttttatacaacaacaacctaataggtttatatacaattaattaattgggtggcaaaagtgaattggtatcatttgctcgcagtttgtgattttgtatttaattgggcgtcgttatcaactaatttcaattctttttcgtcttcttcttcgtcgtcgtcttttgcatgttgttcattgtcagaaagacgtgctgaactctggccaaagtcatactcttttggcggatgaattccctgacgaaatctctgaatgtttaaatttagcgtattcagtggcatggccttataatattattgcaatatctacgaaaaggcatactttgatgaaataaatgcgaatttctatttatatttt

SEQ ID NO: 22448 - DNA, 2623 bp, Heterodera glycines
  unsure (1)..(2623): unsure at all n locations
aaaataatgacacnttagatcataagcaattttattgtctaatttatttatctattttactttattattaattctatcatctcttttgatggtaagatctacccattctcaaattataatgatttttaactaaaattagttttcttttttaaatgtaatatttttatattatatttttgggtttttcttgctgcttgactcaagtgaaacagacaatggcggattattattaattgttcttttctcaaatattaatatatctaaaaattcatattgttcgaaatatatataaagtttaaacttcttcttcattaattttcattgaaatatttctatactatcgcataattagcataatttacctatatatatttttggaaaaaatttgggttttttcttttttacttattttatgtcacatttacaatatacagtgagggatgcgcactgtgccccccagaccaaccgcaccgtctatcccggatggaacatgggagggaatggggaaagccatggccagtgactaagccccaaaatcccaacgactcattgactgtcgatatatttattcactcgttgttggatttacacgaagcgagaaaaggaataataattgaagtctgttccacaactaactgactaactgatcactggggaaggagaaatgtgaagagaatgggcggagaaacattacaatgagaaaaggaaaaacgtgtgaaaaggataaatgtgattgaattgataatggccaatgggaaataattaaatgaggaaatgcgtcgaataatccttacaatactttaaataatttccataccaagtttttacattaaattaataattttgtttaaattaaacttttcggactttatctttaggctttgaatcaaatgaaaacagtatgtctaagtgtgtctttatgtcaatttgcattcatttttatattttgtaattaataattttttattaagaattgaaaattatattaatttattttaaaaaagctttcataaattcaaaaaaatgttcaattttctttttaaaatataaaaaaattaaaaacatattaatatttcctgcattattttattttaatattgttttttttcttcatatgagaattctttgtatttttttgcctgaaaacacatacaatgccttttttgtttttttaaccttacaatgcgcgcattgtttatgcgtggcggattttcgagaaaacccattcgtcatctcgagtcccagtacaccctcgctcaaacactattcgcgaatagatataaatatcttcttcaatgataacaaagctttacgaagtgaatataatgtgaattattcaaaaaagttggttccttatttaatacctaatttaatgttgagtcattttctttcttggaaggaatagttctaaatttttatttatgtctttaatcgaaacgataaaaattttaattctttgtgagataaaatagagaagaggtacgcctttttgccagtaaaataaataatttattattaatttctattttttatgtgtttgttttatccaattgctattttaactgatttaggtacatcttgtactccttgtttcatttgttccatggagtatgaagaatattaaataaatcgattttgaatgatgaattaatactttctcactaatatttgttttatagattttataaattttattttaagccaattatgcgacatacgaagtgaagcaaactataggagatgatagtgtatattaatttatcgcagcacatcgaaatttattgcattgccgacattcatattttttcaatgaaaataattaaattggtattttgaattttttaatatttctttttttaaaatatgctattttggaattgtaaatttatttctttcatttaatatataataattaaataaatattctaataaaaatattgatttagttatcatgattatcctttataaaaaaaatttatacaattcaaatttttactataaatttgtaaaagtattcaatatttttacaggtttccaaagatacgcattagtttcctttaatttataataagtataacaattttagaaattgtaaaatagcttttgtattctttacgttatattgttttattattggcttacctaaactttaattttaacaaaaagttatggcttcttaaacttccttggcacggaaacgtgcgcacggaattgagatcaaaccccttttatttattaggcttctgaggttttgctctcgatcactttttacacctctgacaatttagaagaatcttgaattttcttttaaatctttgttaagaaggcaaaacaaatcaaaaagttatagtttcaaaaatttatttaagcagcatttactttatcgtgatttatttgtttttttagagaaccatttattaaattataattattcgaaatatttatttatttgccctttttagtatattaatcaaagaaagccaataaatatgttcaaaaactttaatatagttctctgatctttgtctttatttcgacgatttcattgaaaaacatttcaaattatttctgaattaatgcttatatttttcatttaaattaagtgtcttctttatatttcaaa

SEQ ID NO: 22449 - DNA, 1187 bp, Heterodera glycines
cagatatttataactaaaaaataaaataaataagcaaatagaaacaatcctatagctattctaatttattgaacgagccaatttctagtataactacaatttataatacaaccattgggacaggtaaaaaaaaataataatgcaaatatagatgtttaaggctctaacctactggatttttgaaataatgaatttggaaggattagagtaaaaacatagatgattattgtaagtcgaaaaaattaaacatttcaatttattttattgtttggtttcttcgttgatttgaagtcaattttatcaattaatagatatggatgaaacagtgagaatttccaaggaccatgagaaaaaaaaattgtgatgccgtgcaaaaaaaaaaatggatgaaaaaattacggccaaaaacacttacaaattacttctattattggatatgtcaaaattagattatgtgagtaaaagaaaataaaattttaggactaaaatttcctgggaattgggattggtggtttgattaccaattttcaaaattattgggtttgttgcatgcctgataaaattatttcggttatgcaaaatcacaaaataatgcttgtagtgggcatgtaaattcttaggaaataacccaaaaatgggagccctagtaattttgcaatccattggtataattacaggaaagaaaattttcgtttaaataagaccaaaaaatgaacattatttttcacgtgaaaaggttaaatacaagactaatgtcctaaataaaaaacttataccttgataatgatttcaaataagcaaattaaaaataatattttgtgcgcttgcttcaaaattatttggaactgaattaatcctaaaggcgccatatcaatgtagcacgagttttagtactagcgtagcgatccaatgttaaaaaaaacttcccaaaataaatgaatgacattatcaacagattatagggcgtttttattctagcagcgtatcgaaaacatgaaaaataaatgataaatgtttttttataaatttagcttatagcacaaaaaaaaaacaaagattcggttgaacctaagtccatcgactaggaaaatagtcaggtaaggggtgcatctacttcaaaagtaaactatatggctatcactaatattttatattgacgaaaaaaaatttaaaccacattccaggat

SEQ ID NO: 22450 - DNA, 1559 bp, Heterodera glycines
tcagtaaaaaatttaaataattaatttatcaggaaaaaatattaatattatcgtggagctcattcgtaaattttattaactccaatcatcagaagcaataaatttattaatattttaattttactgagcttggtgtggaagatagtgttgacaaacaaatgatgtaaaaattatatgtatatatatttttattatttataacgttggcaaacaaatgatgtaaaaattatatgtatatatatttttattatttataacgttggcaaacaaatgatgtaaaaattatatgtatatatatttttattatttataacgttggcaaacaactgacataaacattttttaataaataaatatatttgttttgcagtttttaagaaacgcccacttggcagtttttaagaaacgcccatagtggcagtttttaagaaacgcccacttggcagtttttaagaaacgcctatagtggcagtttttaagaaacgcccacttggcagtttttaagaaacgcccatagtggcagtttttaagaaacgacctagcaccgtttaacgaaaaataataaatcctactcaatcgcaaataataatagttttcattaataattttatcctactgaccaaaataattgctaattcgtaaaatgatttaataaaaattttccattaattaaaattccaatcctattatgtttcaatagaaatcatagagagatttaaatttaaaaaaattcatattaataattaataattaaaaacttgactccacggattggttacgaatagggcttatattttcaggctctaaaacccgctaaaataggcaggctttaggctctaaaaaacccataacataggcattaaaaaaagaaaatatgctctaaaagtctctggtgtaaaatgatctaattttatgcaaaaacaacaaattattcgtcaaaaattcaataataagttataaaagactctaaaaaagacaaacgaattaatataaaaattaactaattttacaaaaaatgagcatatgtgatttcacagattggaaattgcattgtatcagagcttaaatattatttttagcggtttttgatttcgaatgagctttaaattgaatcgaaactttaattaatttaagacttagtaaattattcttttaagaattagcaattattttggtcagtagaataaaatattaacgaaaatattattattttttctaaaaaattacgtggaatttccttattttattcgttaaataagtagagttatgattttctcgaaaacctattttgagacgacaaaatgaaattatctcggatttaaattttatatttttgaattattttttcaaaaatttatttacgattaaattatgcatgcaatcactttaagctcttgtattaagcagctgcttagagcatctagaatttaaaaattaagtttgagcccgattttcgatctatggtttttcatcaatatttgattttttcttctacgttaaatacttaaaacacttattattcatacaaaaacaattcgtacaatatttatttatacaaa

SEQ ID NO: 22451 - DNA, 1003 bp, Heterodera glycines
gagtgagtccttcggtgcaggaaaattattaaggaagagagttcattatttatttatttttgcaaaattaattcataaatttttttcagaaactgctctgaaacgcaccaaatgttaattaaaagttaaataaggctctctgatgctttttctatcaaaagggagatgaataaaatttttaaaaatttttaattcctttttaaacaggccaaaaagtttaggcttatattttaaaaagtttcatctaacctagcgcactaaaatcgatataatctctccaaattttgcaggccttctccattgtaaaggactaacttaacctgaaaaaatgccaacgcttgttgtttttaaaatttttcgaaattctgactttttcattaattatttattttttgcaaaattaattcataagtattttttcagaaagtgctctgaaacacacaaaactttatttacaggttagtttaggcactctgatgctttttctatcaaaaagggagatgaataaaatttttaaaaatttttaattcctttttaaacaggccaaaaagtttaggcttaacttttttttcagaaactgatcagaagcgcaccaaactttgcagggatactgaaaggaagagaaataacctattttaaatattatctagtcagttcatttaaataatttttatccaaaaaatttttttttgggttttcggggcagtccccctgaaccgatgcgcccagatttatggggagaccgaatccttcgggaatagcttccctatagcctgtactttaattctgcgttggatttatgctccccataattgtttgagtaccccaaacggacacttgaaaaaatcgatttttttgttttcggggcagtccccccgacccgatgcgccccagatttatggggagaccgaatccttcgggagagcttccctatagcctgtactttattctgcgttggattttgctcccataaattgttgagtaccccaaacgacacttgaaa

SEQ ID NO: 22452 - DNA, 892 bp, Heterodera glycines
  unsure (1)..(892): unsure at all n locations
gtagaaagcgttaacacnnaaaatggcagaagactctgtcttttggttgttaagggccgaatgaacggaagccaacagcagaaaacagtgccaagatctgctgctgctgcgtctgtgctattatctctccttctgttaggccgacgaaatgccaattggatggcttcagagtgtgaaaattaatcgcaggggattatctctgccaaacgacgggggtcatacgtacatagaacgaaaaatgaacaaaaatccataattgcgaactaacatatatatgtcctagaattaaaaaaaaataaaaattaaaagataatatgatgaataagtctgtaacaaagttactataggtaatactgtaattaatcccctcctttttttgaaaaatttttaaaaatttaatataaaaaaaattgtcgcgggttttagagaatatcacaaatctgtcatcaaaatgcgtcaaatttcgaacctggaagacccgaatttgaacaaaaagtcgcaagtttacaagttttcgaatttgcatacagtattaccaagattatagcttcaggagtttcttctgatatttcacatacttcctattagccaatcgggctgaaatttttaccaaataaacttttcccttaaaaattaagaagcacccaaaaaattggaaagatagaagaaaaaaaaattagtgaattttttccaaaaattcctccaaatttgctgtatatagcttcatttcgatgctggttgaaaaagtcaattccacaatagtgaccagatcattccttaagtgtgatcgagtgatcagaattttatgattttaaaaaatccctaaggggctggaaaagttattcgtgaaagacgaatatgacagcaaaaagagcctaaaatttgctacata

SEQ ID NO: 22453 - DNA, 616 bp, Heterodera glycines
ttttttgttttctataatcaatacacatgcgctctatggttttctaaaaggtcagttaaaacatttttagacataaatgaaaaacaaaatttgaatttctgcttttggttcgaaaaatctaatccgaagttcggaattggttgaaatggaggccggattcgagataaatgacctcgaaaaaccctggaagcgtgtttttatgactagaaaacaaaaagaaaattctttaaaaaatgtgcgcaaccatccgtactaacccagtaatgcttaagaacaatgattccaatgaatatttcgcaactaaaaaaacctttttttagtggattatcattgttcttaagatcacctaaacacaaacaaacaataattttgatcacctaaacacaaacaaacaataattttctaatggtgctggtggtggttttcatccagctgacgaaaaacacggtacgccccccccccccgggcacgccaatcttgaacttaagcttgctaaaagaatttatttacgaattataaattgttcagacagcccacattttgtagatgcagtcatctaccggacatttgtaaaaaaaacagcgtttttgttcgtggtagggattgatcgcaacgt

SEQ ID NO: 22454 - DNA, 1555 bp, Heterodera glycines
atttcctaaattttcgctgagggcgcctaacagcagcatgggaccatatacaaccaacaatttggtaatttttagtcaaattctataatagtagttaaactccgcatcatcttccgatgttgcactgctcacctcgcccaccatcggtttgcccacgtgcacaactcggcattcgcccaccggcagtgccatccgcgcccaaccgccccaaacaacttcctgctcattaaactcatgacgccacggcttcattctgaacagaacatcctcaatgtcctggcgaatttcatcttaaaacacccaaatgagcgatcgcctgagaaattcaccgacaaatggactccatgcggaacaaattgaaattcctcaataagtaatcatgcaaagtcaaaaattgcagattgagtttgttgagtggcagcacatttttgccgtcgtaatgttcgtaaggaacggactaaactcacaaaactcattttgcatttacgggatgttttccatttcgcccgaccttttcatcccaaaggattgcttcggtgggatacaaaggttctgcgtttagtttttgcagttgagaagggtgacgttcgcattggaaaatgatcgcttctcgtaaaaatgtcggatcgtcaaaacgaccgtaattttggtccaaatgagaaaccaattgacgagcactttcatctccgttaatttcgtcgtgatttttgtcagggattagtcgtaaatatttggcaatgtgttgaagttcctccaaactaaaatacttaagtttgctatttcaatccttttttaccgtaatgtgccgagatgctcacgcaaaaatttgctggtgtcaacggatgcaattggcagaagacaaaactcgcccaatttgtccttcaaaaatttaaaagtcgctttttggagatcggaaatcgaatcgtagtgacgtttagtgaccttcaaacagataagaataaatgataaaggcatttccaaacaaacttcagccgcggtcagttgctgcccatttacgtcgtcaatttcaaaacgaacataaaagcgcaacaaagtgactaattcacagaaaagagagccatgttcagagagaataaactgagaaaggaggcaatggctgatggcgtgactcgagcggagcagcgcattgaaaaaacgcctagcaaagcacaaaacggtttaaggattccattctcaaattttcagttaaagcatcattcagggaaacaaatgttcatgatttttggaaaacaaataacttaaaaaatatggtgggtaaacaataccatttattatactacttgacatttcatttaccggaaataaaaaaaacataataagtcctttttattgccgccctccccccccccccccagtcaagggcgtagccagacccttggctttgggggggggctgaaatcaaaaattcgatttttagggtgtatttttttcagtcgatttttaggggtgtatttttgcttttttgaaatcccgaattagggggtgtatttaacataatttttcgccttttttcgcaaaaaaattaatatttttt

SEQ ID NO: 22455 - DNA, 2450 bp, Heterodera glycines
ccggggatctctagagtcttattatttcaaagtggtgaccgcttacaaggccattccattggaaacgtttgtgaaaaatggcgacgaacaaaacgatgagtgctcaatatgtctcggtgagattaagccggggacaatggtcagaccgttgccgtgtaaggtaataaatacaaatcttgaattttttaatttacttatatgttacttattttagcacatttttgacgacgcatgcattgaaaaatggtacaataaatctgctttttagagatttctggctaagaaatacacaaaaaaaaaatttaggttcatgggcggaaatatcacatgtcctttatgccgtgaaaagttgcaaatatcgcaaacggcacaaacaatgacaatggctaaccatttaggtaattaggcattaaattttgaaagggatgaactgcaagataaaagggaatttctgtttttgatcccttaaaaagtgatctttttttcggaatctggcaacacttgccttccagttcaccatttttcgttagcggaaagtaatatgattaaattaatagaaattaaggtgttatggcaccaccgggtggcattgtagcaccgagagttcaggtaagtggtggcactaatgagggacaagttcggcatggaacggttaccgcagaccagcatgaagttgtcatcgatattggcacgaatgccaatcagaatgatggaaatactggtggaggaacggagagtcaagttccagaaacaccacggcatgaagcaactgaaaataccggaggaacaatgaatcacgggaccgcaacaccacggcatgaagcaactgaaactcggctgaataatggctccgaaaatgagacaaaatgatgcatgagcaatttaaagtggattaacgaaaagctgtaatgtttaaattgaaaatttttaatgataaacaattttctaaaatttctaacttcggttttaggcacctgatgaaacagctgacaaaaaaccaatcgacggaccgattatttctaccacccaaccctacaattatttaccattttttgttttttttcttcatcccatccatttgaagaaaatcactgctgttgtacgaatttctgtttttcctcttataaattacaattctatcaaaacagggttcagctgggtttctgctgctactttttatattcaagaggcttagaatttagaaatgtgattattgggacagagttgtaggcaaaaactgaaactagcaaaatagcaaaaatgaaataaaagctttaatatactcaaattgatttttaaaaaaatgcagggccggtatatttagtttcgaaattttcttccttataaagctataaaattctattgaaaaatcctgtcaaaatattgattcacaaaattttaatcattcaattgctatcaatgtgtgatggaaatacaatgatcagaaagtcctttattgaataaataacaatacaaaatatgtgaattgaatagtttaccataaattaaattgattcagaactgggatacaacatattcccattaaaaattataaaaattttaattatttccgactgactgatcaatgcatgtatttctgcctcaaaactcccgaagtcccttcgcctcaagcagcgataatactcgagtcgccactcctccagaaacgtgacaggcgcgcatcccatcccccggctcaaaatcaagttcaggaagagccgggcggttcgcccgttgccgtcaaaaaatgcgtgaattctgaccttagaaataatcccaatttttttccattaagcagcccaaaaagcccaggtggacacgttttcccattttatatgaaaaaatcttataaaaacaaaagttttcgaaatttaaatcatagcaaataccatagttagtcccagaaaggagcgtttaatgaatacctttggaaggggaatcatatttaaatttgaaatttttagtaaaattcaaacatttagattttgatctgatcatctgacatttcgccacagttattctttcttttttcagtttgatacttgttggatccagttaaaatggattcgagaagtattgtaatttaaattcgcgtatcaaaaaacataaaattcgcttaaattgaattggacaataattacagaggtttatattttggttgaggtcgattgggccgctaatatcttttatggctgatggcagcaaaagtttgactacaaatatcgaggcaccagttttacaaaaggggtggagccaagtaaagcgacggtttttatgcttttcaaagacctttttgcggtgcgcttttttcaaaaaactttttttgtaagtataaaaatttccaatttcctctgacggagcctaccggcaccgccggaaccctctcgttgatcaaaaactttttgaaaaaggacggcgcgaaaaagcgaatagaaaagaaaaagccgtcg

SEQ ID NO: 22456 - DNA, 1866 bp, Heterodera glycines
tccaatccagcaatttcccgtagaaaagatgtggtttttcccatctaaattctaaaatcgagaggaaattgacaaaaaacccacgggttcttgaacatcctcttgaggtccaccttttctttgcctgaaaatggcaaggatataaaattaagttcatatatgtaaatttgcaaggaagtacttaatttgccataaaaatctgtcttattattaagttaaaagcctatcgttaacattggaaaaaaacgtggagaatttgatttgttccaacactcacagtaagggcatgtctgcaatttgcccaccacacaccatccgcggatgcaaaactcgtggaatacgtggttacatgccaaagcatacgtctaaaaagaaagtgtcaaaaaaacgaacaaaaccgtgacaaactttttcttctggcagttcaacagcttcggtcatcactcctccattcgcttcgtccaacgaattgaaattgttttggttggacgacggtttatgcaaattattcccgcagacggcgcacatatccgactcgagaaccctaaaatggtggaaaaaaaacagtgaacaattccgttttgttggtaccgttttggcaatccgtcatgagtaaaatactagaaaaataataataatgtgttaatctctccatttcatttttaaaaccccgattttgcaggccaatctgtcggtcagagaatgtgccaaatcacgtccaagcacaccgtaataaaggccataaaacaacaaatgcacgccaaaatccaagctcagattactgctaattccttaaaaagccttttttgaatttttagaaaatttaattttaccgaacaccgaatttattccaatgacagtaaagacgagtgaaaagtaaccgacaataccaaaaatgtaactgagtttatgcatgaacaaaaagtatttgtagacgagcctaaaagggaaatggacgaatttcccttttttgcgtaaaacccactgaaaacctgggagttgatccggaaattgccggctgattgaccctccgccaaacgtaaaatattgaagaagtgaacacagtccaggaaagaatgaatcgccaccagccatttttaagtgacaccataaaagggattagccaaagaccgaccaaagtggcgaactgaaccaaaatcatcttattgttagataaagccctttcagcgaaaccaccacccgttttttacctggtatgagcgaaaatgtcttctcttccacaacatcaagattatttgtgccacaaccattgagacaatgaaaatgatgaacatttccgcatgcatcgcatcgtggccctacaaaaattaactttgttataaatgaacgacagttttttaaggaaaattaaattaccctgtgttttctgtgcatttcctcgtgttctcgacgccattgaagttcttcctgaaaagttaatgttttttttagaaattaagccaaattatccagcctcatcttcttgcacggacattgctacaatggtaagtatgatggaaaagaaaagaagaaaagcaaacgctaacaaataagctaaaaaaaagaaaagaataatgctaaaatttgttgggatcggtactcttttgtccgcccactttattttcatatctttatttctctccccttgtttctctcctctctctctcttcgtccatgttccccataaatacccccgcgtcctctgacctccccgtctttcattcatttgtcatccatttatttgtgcttatattgtgcaatcaatatttgccctttgccctccgtccctcttcgcttatttttttattttgtgtcttcacaacttgaataaaataattgtttattcacttcgccggtttgtgattt

SEQ ID NO: 22457 - DNA, 1411 bp, Heterodera glycines
attaaatttttactaaaattataagcctaaaaaatcgtctaatgattttgaatattttttcaataaatcgcccatttctggcactatgccaagtttgggcgggacagacctaacggggagatataaagtatagggaatatcaaatctattcccgaaggattcatcctcccgaaactgtctgactgttcgaaaattttttttaaattaagcctaaaaaatttgtaattattttaaatagtttttcaaaaaatcgcccttataaattgcattggatattttcaagacaatttagtcctgtactggggagtatccctgcaaaaattggtggggttctgatcgcttttccaaaaattactttgaattaaatttttactaaaattataagcctaaaaaataaggttaattattttaaatattttttcaataaatcgcccatttccggcactatgccaattttgggcgggacagacctaacggggagatataaagtatagggaatatcaaatctattcccgaaggattcatcctcccgaaactgtctgactgttcgaaaattttttttaaattaagcctaaaaaatttgtctaattattttaaatattttttcaaaaaatcgcccttataaattgcattggatattttcaagacaatttagtcctgtactggggagtatccctgcaaaaattggtggggttctgattgcttttccaaaaattacttggaattaaatttttactaaaattataagcctaaaaaataaggttaattattttgaatattttttcaaaaaatcgcccttataaattagcattggaatattttcaagagaattgagtcctgtactggggagtatccctgcaaaaattggtggggttctgatcgcttttccaaaaattacttggaattaaatttttactaaaattataagcctaaaaaataaggttaattattttgaatattttttcaataaatcgcccatttccggcactatgccaagtttgggcgggacagacctaacggggagatataaagtatagggaatatcaaatctattcccgaaggattcatcctcccgaaactgtctgactgttcgaaaattttttttaaattaagcctaaaaaatttgtctaattattttaaatagttttttaaaaaatcgcccttataaattgcattggatattttcaagacaatttagtcctgtactggggagtatccctgcaaaaattggtggggttctgatcgcttttccaaaaattacttggaattaaattttactaaaattataagcctaaaaaatatgcctaattattttgaatattttttcaataaatcgcccatttccggcactatgccaagtttgggcgggacagacctaacggggagatataaagtatagggaatatcaaat

SEQ ID NO: 22458 - DNA, 1030 bp, Heterodera glycines
cagcaaaggaacagtcaaagaataattacgaaaagtggcaaaaagtcaattagagatggtccattgctttacctccccctcccccgccgcatccgcaaccaccgccgcccccgccgccacaacagccgccgcctcctccaccaccgccacagcagccgccgcctcctccactgggacaacacataggcataggacaacacatttggccaccaaagcccaaggcatcagaaagggcgaccaatgccagcaaagaacagccgatcagaaggactaattttggcatggcgtaacttaacaaagaaaggctttttttcgattacaatcacttttaaatcaaaaatttagtcgcttttataatgattaagagcaaatattgaacagaaggaattgtcattttggaaagaatggtcggaagcacaaaaatttgctgatctgaatgtgcagaagactgcaaatggctttttgagctggataatctgcttccgagcacccgcctccgttgggtaggcggagattgcccgaggccggctggcttcccccccccccccccctcaatggtccgtcgtcgccattttgcccggggcggaacagcgagtgctgccgcaatgtttcgcaatggaacgagcattagacgaatggttttgctccgggagactgaggcgagaaatgcttcgctccatcaatccacgcgaaggaagcgccgagcggaaaaatgcgaattcggtggctcatctccgccgctggtgcatgttttgtgatggaacaaagcaaaagacgtgaaaactcgtttccgacgactgttgaatttgaagaaacaaagaaacggttaaggaagacccagaatggcaaaaaggcgaattcaatcaaaaccaattcgattttttctggcgtgccgaaatttatggcattgccatcgccattcccgtacttacggacacgtcaagaaatattgccccaagcatggaattcagcagaaaaatatatagtgtaaagattaggcttggacatgatcggaaagaaatttcggact

SEQ ID NO: 22459 - DNA, 1111 bp, Heterodera glycines
  unsure (1)..(1111): unsure at all n locations
gtcatcaagaacgcggagggtgacgtgcacattccgagcttaatggctgccagaccgattaagaaggcaaacgattggcatttgcatgcaaattgtgccccttttattgcagtttcacttcggcatggacattattcaacagagtgagcatgacgctgactggagacgtccggttatgattctgaagatgcccgcccattgtgtgtttttggtcgcagtgcgtactctgtcgcccaccgcgtgaaaatttactcaataagtatattcctatgcttatgaatttcagaagtgctccgagttggctcgcattagcagtcggctatggcttggtgaatgcgctgaactcattgcatgagaagggattcatccatcgttttgtgacgccgtggaatttcatggttccgatgccattcaccatggacaacattaccaaaaagatgattatcatggacttgagtttggccaaacgatgggaccccaactcgtaagggaaattaaatgtcgtaattaaatagcatcttttctacagcattagtgatgtctcagttcgcttttctggcaccgttaagtacagttcactgagggcactcaattttcgaaccgttgggccggccgatgacttaatttcagtcattttcatcgttgctgagttgatcagcgggaagtgcgttctttgtttggaaattgatttttaacttgcctttgtagaattccctggcgttcggtctcaaaaattgaaaaatgcatcgcgctgcgacagaagttcgcggagtccatcgaatttaggcgccttccaagagaacttcggaaactttatacgtatgttcaatttcagaatgaaattatataaaaattaaatttatcctatttagagatctctgcaacacttctcccgctgattgtcctgcgatcgataatgtgaaagaggcgttcgaatccgcactgaagcgacgagatggcgatgactggagtatcaagccaatgcctgactggttggagatgcctactgaatagaaaaagatgaataccttttaggctgttttgtatgtattagtgtgtgtatttattgtattgtgcgtataatatgttttgctaganttatatacatatg

SEQ ID NO: 22460 - DNA, 2477 bp, Heterodera glycines
agggggagcaggaccaattctgtttcaaagaaggcggatctctttttgcctatgttttcatcgcctgttttcattacttaattttttggtataaattaaggtctgatacatgccaatcacgggagctccgcgattgattatctgtctgaccaactcagccgtgcttcgacgagtgccgttcgtcacggcgcatgtctgggacttggattggccgcactgggcacacgtaatgaacgtgtttacgaacacttgagggatgtgctgtaccagaacgaagcggtgtcaggagaagcagctggaactgccatgggcttagtcatggctggatcgatgaaccaaatggttttaattgtcttttatttggtttttgaaatcgatttcttacaccttaaacgtcaggccttcgacgaaatgtaccagtacattcttgacactcaccacgacaaaatccaacggggacttcgcacgggaatttctatgttagcttatggagttgcagaaagagctgaagagtgagagcaatttgtttccttccttttttcttaatttgttgtttagttggattcggttgctttataacagtccttacgcaattattcggcagacgggtgtttgcatggtcggtttatcccttttttacttccaatatttcaaaattcgttttcagattgctttggcttacgcgggtacgggaagtgcgtcggtgatcaaaagacttctcgagagagtcgcatcggatccaaatgatgaagtgaaacgatttgcaaccattgcaattggatttgtcctgtcaaagttaacatttttttgttttccaaatcatgtttaccctatttagtaatccgcaacaatgccttgattacgtcgaacttttgacagaacattttaacggtcacattcgatatggcgcagcgattgctttggcaatttcatgcgctggcactgggtacaaagtgagtactgaagtggccacttggcatctgggacattacctcctcccctttaaggaggccatcgcattgcttgaaccgttgctgcaagcgaaggaaaattacgttcgacagggggcgttggtttccctcgcttttgtcctcattcaacaaacgacatcgacctgcccaaaagtcgcagactttcgaaaaactttgattaaaatggttggagagaagggagaagacacaataacaaaggcatgccgaattctattatattttcatgacaaattgtttagttcggtgccgttgttgcacagggcatattggacgcgggcggtcgtaacgtcactctttcgctgcacaaccagaacaaccaaaacgacatgccgtctgtattggggatttttgtgtttttgcaacattggcattggcactcgatgactcatttcatttcattggcacttcgtcctacttgtgtgattggcctcaacaaggatttaaaagtatgactaaacttcattttatctacatacattaaaacatgcgcagatgccaaaaatggacttccgctgcaatgccaagcagtcgatgttcgcatatccgcaaccaattgaagaaaaacgcaaagaagggatggaaaaggtggaaacggcagttctctcgaccacaaaaaagaagccgaatttggagaagaaagcagaggatgccggttagcagaaaaccaatctttctttcggtcacaatttaatttttgacaattcagacggaaaagccgaagagaaaatggaggtggaccagaaaagcgaagaaaagtccaataataatataattcaattaaaaatatgattattttaagaccgaaagaagtcccggagccctccttccacactctttccaacccttctcgtgtcgtgcgtcttcaattgcgcgctttgactatgcctgatgactcaccatacaaaccaatgaagccgataaaccacggaggcattgcgatgttccaaaacacagacccaaacaaagcggacgaaattgttgaattggctgtcgccggaggaatggtcgctgaggggcccaaggaaaccgagccaatcaagccacacgagtcgtttgaattcaatttcggaagctattgacacttattacctgatgtccttgttcatgttcattttgttaaactattatatctacgtcatttcatgcactcggaattattataaagctgattgattttatatgaattgacgagttgtttggcatggtttggttggccgtggcacaaaccgtgttaggttttttcctgttccagacctgactacagcaaccctcattccagcatcgctgctaatatttaatctaaaaattaatttggatgggacgcataaaacggttcccggtgatttcgtcagtggacttaattcacaaaaaagcgtacacctagccaaattttacaaaaaaattcaaaaagtcgagtcataagaacaggcttgtaaatattctaacgagtcacaatttgcaaaaccctctgtaagtattctcaaa

SEQ ID NO: 22461 - DNA, 1087 bp, Heterodera glycines
  unsure (1)..(1087): unsure at all n locations
cacgatcgctttaattcccnnttaagaattgatttcccccccccatttaaaatatgttttatcccataatttttaccggttccaattctttcactttcatttccacgattcctccaatgtttataattttgttcgaaattggcctcggcatttcgaagaactaaaaatggatttttccaatcatttttggcattatgttttgtccgacttcgttcgaatttgtaaacagcagggaaacattgcgcataatttgtttcagcggggggaaattttggccaaatgcttcagcaataacaggctcctaaaagataaatttaattttttatttttaaataaaattagcattttatatatttttttgcttgcttacctcatacgaagccatcacattgttcaaatacaaccaatcgtacaaatcatttataaaattcacaaatcgttccacaaaattcattttgtgacctccattcaatggcgtgaataaaccttttttgtaaattatttttaattcagcttttagctttaattgttttaaacaaatgtcaaaattagttaatgatatatgtgtaataaaaaaatgttttaaaaaattaaccttaaattttaacgaaaaaattcagtgagtttctcttatgattttttaaaatccaatgaattaaaattgaaatttagttttcgacactctattttctaaattataattaatcaaatgattaaattaatgaattaaatgccttcccccctttggcactttcactcacttgtcacgtaactgctcagcgttgggatgccaaagggacggacaaccgtttgatacaacggcaccgctacagtgccaagttttgttttgacgccaatccgatggaaaagtgccatgggacacggatcataaagttcagcaagtacaacatcaaattgttctgcgtgaagacggcggagcagctcaacgtcatttacgagttcgaaaagtgaaggaaaggaaaaattaaattactaattaatcaattagtatttcctactaattacctcggcatatttcgcataaaattttaccaaattgttcaataatgttctgtaatttttgttt

SEQ ID NO: 22462 - DNA, 2338 bp, Heterodera glycines
  unsure (1)..(2338): unsure at all n locations
ttatttagcaaatataataaaaataataaataaatttaaatatttcattaattgatacttttgtaacttcatcctagcatcttttgtaacaataaattgtttgcggaaattgttttcagtttcttaggctcggtcgttttctattttctgaacttattggttcaaatgccattggtatggttgtttttccaatttatcaagtctttcttatgtcttcaaaatttaatttacctcttaactaaaggaaaatttgaaaatttagttaggtaagatgtctaataagcttttatatatttccctttgtcttttcttcgttttagcccatcaaattttgtcattaaatattcataattggcgctctgtttttgatggaattcaaatcaaagaatattttcggcattttgccatcatcgtttgctcgtcgagtatttttaacatttacgtcacaaagtgtggttaccaaaagagcaaaattcggcaaaatttgttggggtgggccgagtcggaagaagtggccaaaaatgtgaagcgataccaagcaattccgagctttgagcaaaaaatgttgtgcgcagataaaaatgaggcttcttcagcgaaatcagagtaaataaaattaaaattaatataattagggcagttttttccgattttaaaaggaccaataagtaattttcagagatttaacagaaaaaattgaaatatttttatttaagtacaaaatcagctcttctttgtactctttggctcattggactgacggcgcatgacgaatttaatgaacatttcagtgacaatttgccgtcaatttatcaccacgagattgacaaacaaaaaattgaaaaattattcgttgagtcaatttttacgaattccgaaaatttagatgcaacgtaatttaagtttaataatttaaaaattaatttaaaaaatttagaattgaaacattaaaattcaaattaacagaacaagaaaatgcgcaaaagaatgtcctttaacacaatgcgaccataatgaagcgagaattataaaaagaaaaatattttgttaaatcatttgactctttttttgtacttaaaaagtccgagctttattaataattataaaaaagatcaaaattttgccaaaggattaattattactaaaaacaaaggccaatgagaaaaatgtcctcatttttggtgctagggtgcttccggtaacatttgagcgattcttaaatccgccaagggttaataaaataaaataaaaaagatggtatcattaatagctttgattatacactacctgaatatttaaattcaaaaaatattaaaacaataaaaaaaagttaaatttccaaaaattcgaaatagaaatttcaaactttcaagaataactttttgaaaagatgaagattttttgacaatcaaagctttcgaatgataaaagaatgtcaaaaaatttccttttcgacaagtgatgtctttatttggaaatattttgatgaaagactgtataaataaattactgatcagtctccgattccgtcatccgatgtcaatgactgatattctaaggcaattgctacccaatttcttcatcttcttcccattttgcccatttgttttcatcctgcgcaattggatgtgctcccggaaaatggacatttagaaaataaaaggaattatcataaaattgcataattataccaaagagcaattttccggtgttaaatttgccgttggttttgtctttattaaaaataatttatttgcttttttaatccatttttggcagttatttggctatattttcgcatatacccaacaaatcatcagatttaaaacgccagggactgaaaggttcggccatgaattaacaattatttgttagaaaatactttttataaatagggctgccaattttatgtaaatacatatttttttcctggcttctccttgctctaaatagcaggaaaaacactttcttttttgtgtttgcgaacaaaaaccgggacttttatttacatatttttacatatttcgggattttcttacatatttgtacatattttggatttttttcatatatattttcatttttttttacatattttgagtattttttacggaaatttttggaaatcctcaaaaaaaaatccaaaatttcggcaaatatttttgtacatattttcatttttttacatattttgaaaatttataaagaaaaaataagtttgaaaatgttgcctaaaaataccaaaaaaagtcatttttatgtcattttgtggctatttcatactttacggggattttctttcccanaaaaataccattaaaaaaaattttatttacat

SEQ ID NO: 22463 - DNA, 2721 bp, Heterodera glycines
cctttttgatagaaaagcatcagagtgcctaaactaacatgtaaataaaatttggtgcgtttcagagcattttctgaaaaaaaatatttatgaattaataccacacaagtattatttttttttaattatttttttcatttatcacccaacgttctagactgatcagaagctcaccaaattttgcagggaaactgctgagaaccctacaaatgcttataaattttcttagaattttttgcctggaggaacacagttcttcacacttaccacaccagcattatttttttttaattatttttttcattttatcacccaacgttctagactgatcagaagctcaccaaattttgcagggaaactgctgagaaccctacaaatgcttataaattttcttagaattttttgcctggaggaacacagttcttcacacttaccacaccagcattatttttttttaattatttttttcattttatcacccaacgttctagactgatcagaagctcaccaaattttgcagggaaactgctgagaaccctacaaatgcttataaattttcttagaattttttgcctggaggaacacagttcttcacacttaccacaccagcattatttttttttaattatttttttcattttatcacccaacgttctagactgatcagaagctcaccaaattttgcagggaaactgctgagaacccttcaaatgcttataaattttcttagaattttttgcctggaggaacacagttcttcacacttaccacaccagcattatttttttttaattatttttttcatttatcacccaacgttctagactgatcagaagctcaccaaattttgcagggaaactgctgagaacccttcaaatgcttataaattttcttagaattttttgcctggaggaacacagttcttcacacttaccacatcagtcttaattcttaataattattttttgcattcattccccttggttcttgactgatcgacaagctcgccaaattggcagggcaaatcttcgaagcgtttactattcggaattgaggtcctgaaaaatgattctttgtaattcgcaagtctctttttttaggcctaaaaaatgattcagtcccgaatatggaggggctgggtcgttctgtgaatgacggtcaggcatcgaactgagttggtttcgtgaaaaaaaaatttttgttgtggacagtaattaagaaagattgcccaccgaagtaccaaaaaatcgaaaacctaggcctggatgtgccttggctctattagagtcttaggcctataattttttttacaattgcttacatagaaattgagaatgaaataggtggtaaagttggggcccaacaggtctttgatcgactctttgcacattgaccactccttaacaccgacaatgttcggactgttgttgctgttttccacatccattttgcacatttttggtagaacgaaaagaaaatgagcaaaatttatgtaaataaatctaaatttaattttattgtttatatacaatttttagtaaatttttgcaaaagttagcgaattgctggggaagggatttggcacagaattttggagaattttgtttttaggattgaagaaatttgcgagggttttttcaccgattccatcttttttttttgccaaatagcgctaatttaaaaattaagttggcggtttcccacgcatttgctgggtttgggtcgatttactaatttttattaaaaattagtagagaacggaccggaccgggcccggaaaccggtccggcgattttagggaaaattccggtttgaccggtttttgagaggccggcaccggaaaccggtcattttgaaaatgccaaaccgttccggaaactgacattttgtaccggtttttaccggtttatgatatagccaaaaattcttcatttttatacaatttctgttaataaattgcatcgaaattttcaaaaatttctcggcggcgcctatcggcaacgccggaccctaaaaatccttaattttcttagaaaaatttgctcaaaatcgcaatttttttttatttccaaacagaaatttcaaaatcttaaaaaattttccacaaatatctaagaaagaaattttttttctttttatggagaattacttactaggttttccggtactaatgcactttacaaaaaatttttcaaaaaattctttaaattttttttatttttttgaaattttattattgaagaggtcatttattgacgcctaaagtgaaatagagccgaaattttacatctggcacgatttatggtaattttgggtgaaatacatgtgaaaatttaaatttttaccaaaccggaaaccggttccgggcccggcaatttgaaaatccggttttccggttgaccggtttttgagaggccgggcccggaaaccggttgcttctgaaaatatcagaccggtccggtccggcacttttggaaatctcggtctctagtaaaaacccacgggccaggtcgttttcgtattacgagcacatgttttttgactataacttttttctttgtcgaccaaatccaacgatcttaatatcattcgagagcccttcagatgctctattagcctgcaaattttcaaaaaatttcgttaagtttctaaaaaaagttcgtgccaaaaaaagttggaaaatctggttgtatgaattcttctggccataacttttttgaa

SEQ ID NO: 22464 - DNA, 2209 bp, Heterodera glycines
  unsure (1)..(2209): unsure at all n locations
attggagtgtttcggatttataatttggcggttcgtaaaataatttgaaatccctcattatcccggcgggaggggttcccaattctcgaccttctcgacctattactgtccctgatcagactccgaacttccatacccaaaataccgattcgcaccatctttgccattgaaggagtgccggggagggatcccaatttaaaattaaaattccgtttttttggctaataaatatttttcagaaaaataatcccgggcatttatttgtaataaactgaggaatagaaaatgcggtcaaaaacagacaattggacgcaagtttaagggatttgttctgattaatctgctggcaccgaatcttccctttggctgtcagtgattgaacgtccaccaccaaatcaaaccaatggataaaacccaaaagccccaaaagctccccccccccccccatcgatcacttcgcattgtgtcaatttccctttgcttttccaatcaccccgcttaaaggaatggcggggggggggggcagaagccgttcgcttttcctccattgctatgcttcttcaaaacggagaattccaaaaagagaaaaatgtgttggaattttctcgccaataaatcgcaaaataaaaacaaaaataaataaatttgcatgtatttttaagtccctttttatgtgttggttttgctgaccaatgttttgctatgtttgttatcacttatcatttttcgtttcagtgtttgcttttcgcatttattggagagggaaaatgaccgaaaggtcagaaaaaggcaaatgaaagtgaaagaacggataaaaagaaggaaaatgaaaaagacggacggacgcaatttaataggggaaaatatggtaaaaaggcatgaaaatattgaaaatttggcaattttttatttattttaaacttactaaatcatttcaaaatatttttttcaacatttcgaactcatttttattcttttgagcaaatcggagagtgaaaagaagaaatcaaaggcttggtaaaacattgaaaaagtttcgactttgaaatcaaaaattttgatcaattaagttaaagcatagaagaaagttttttttttttttagtaaatttcggttaaatttctcaatttctgaaaaaggcactaaaaattacaaaataataaaaaatgcattgtcaaaagtcaaacaaatgccaaataaaattgataaaatggttactgctgttcaatttaagacagtttaagactttaggacaacatcaaattgctttttgngaaaaatattatttaagaataaatcaacaatttgttcgagtgaattcggttaaatgcgatgggcggggggggggagccgagggacaaagcaacgatggcccggcacggcgcctttccccggtgccaccaaatttatgaaatttcttttttcattcattcattttttgctgtcagtgtggcctgccattcattgaatttacagcagggaatccccagtttaattcgacagattgtgagttcgttttattgtattccaaggtcaaattgagaatttcttcatttacctatcccagagtcttcgtgtccattcgaaggacgacaatgagattgatggttgcgagtttagttagacaaatgctcggctcatatttataagaggtcaagttgaaggatttatcaccgggaatatcgtcattctgatccttcatccgttcctctttctgatcgtctctgtcttcccttttctcttccccttcaactctttccgttctattcccatttctccattctcttccccttagccttttgttcccattcgccttctgctcctcttcctcttctgttcctcttcccctttctcttcctcctcttccccttctcttcctcttcgccttttgctcctcttcctcttctgttcctcttcccctttctcttcctcctcttccccttctcttcctcttcgccttttgctcctcttcctcttctgttcctcttcccctttctcttcctcctcttccccttctcttcctcttcgccttttgctcctctccctttctcttttttttgtggatcgactcagcacggatgaaaaggaaggaataaaggccaatgaaaggggaagtcatcgctgaaggcaatgggcggggataagcaattacaataggaataaatgcagaagaatgggagaaaaattgtagagaaaatagtaggcaaag

SEQ ID NO: 22465 - DNA, 1440 bp, Heterodera glycines
  unsure (1)..(1440): unsure at all n locations
aacagttaccgcccgccctccttcactccgcgtctgtccactctattggaaaagttatttctgaccagcgaccgttcagaatggcatttcgttgtccttttgaattctttgccttttcacctttcatttttccctttgctttagtccctccattatcattctgtgcatagaaaatgagcgtaaagtgtcaataaatgtgcacaaaagcgttaagcatgactaattgcatatttaaaatcattttcaaaaagttattagccttcggcagacaaaatctcccgcaactgttcgatgtccgaagggcgaaaacgaaaggtggcgccggagaatgaattaaaaaacaatccgttgattttggttttcggagttcatttttgctgctttttttaccacatccattctcttcttcaattatttgaaaaagacaattaaactatttattaaaataaataatgtaatcccttgtttcaaaatcatgaaaaaggaaatctaaattagagtttctatatgaaaacaaaaagtgcgagaattaatgctaaaaaaataaattattgcttattataaacacgtttctgggagagaaagaatgaagtggggaggnggggggggacactgacaaatcggcattcggtcgagaagactttcttttttgaattcgcaaaaatgccaaattcattttcattattctcatacaattagccaattatcatctattctttgctggtgctggcaaaaggggaattaaaaagggaggagaaagggagggaaacccgagagagagagaaagggacaagaaaaggcaataatggagacagacagacagatagagaaagagagggaaagagacgggaaaacagagaaaaatcaaatattatgtgtataatattctaaagaattcgacggaagttcagccccgccgcaaagtcactcatcggaaatgcgacacgaatttgaatcgggcgcacatccgtcgtattcgaccagcgacggatggccaaggtcccctcgacccgtgtcaatgtcggaggaaagcagcgaatggccaaagtttttaacacaaacgcctaaattgtcatggaatctcgctttttgagcaaatccagtctcggcctttggttcgagtgacccgggaacagtgggccaacgttgtttagattttttcagagatttctgctcatggattgattgtccgtggcttatccatcaccccaccaacgaacatttgtgctctttgaagccgggactgaacagcttcctggggacgcccaccttaaagaatcagaatttgaaaagtcttctaaagaaaaaaattaaaaaaaattcaagcaacttttttgaaaaaacttaataataagataattcttagtttgtcccgaaacccgacccaaagtcatcgggtccgggacgagaaaaatgtcgggattccggtgacccgaaaaa

SEQ ID NO: 22466 - DNA, 1731 bp, Heterodera glycines
cagcagcgactgttctctgagttcgtccgctttcttccgcttcgctttttccatgcgttcgttcaccttaaaagggtttccattctctcaatttgccattttctgttttttcgaccctttgcattttttcggttggccgtcccttcgcgtcgaaatattcgccgtccaaaagtccgacgaggcgatattccctctcgtaaaaggccacccaatcgaacacactgagcaattcactctccgacaattcatttgcgtccgaacaatcgccggagggggaaaagtcgccggagacaaacgaaacggtggcatccctccctaaaaaggcaaatagacaatgggaaagaaatgattgaataaagcgcaaaccggcaaaaaagttataggtgccgccaatcccatagtgtcttctgcccttttcaacgtcgaacactcggcccaaaatggccaaataaatcggcttcgatgggtcacttccgtcgtggagggccaaccgatcgatggtgaaaagtggcaattgatctgctgagcattggcaatttgctccaatttctttcccgttttcggttttatttattcgtgtaattcccgtatttaagtgggaatataatcctggaaaaacaatcgtccattttttcctaattcctttgagggctgttcgtctcctcccccttcctttgtccttcttcaccttttcgtgctaactttccgttggcataattttgctctctccgccgccgtttcaatccatcatttgctaaaagtgattttctgctgggcaaaaaagggccaatgcgattgtcaaaagtcagaagcaaatcatgaacaaatggagcctaaaaagaacattttaccattagaaataaattgggcatttccatcaaacagtaaatgcttttttattttttatgaaaatttaatgcttttttgaatataaataatttccatgtcgtccgattgaccaattacaacctgacgaattcgctgctgcacccaaaccattgccggaccgaaaggaattttaacttcgtaaaaagaaagtaaagcagacagaaaaatgatttgaagagccaacaaaaccaacggttttgaatagagtctgctgctgttgtcagtgtttggaattacgcaaaaattcgtaactcttcccattaaaaccgactaaaaatgttttttttattacgacaattaaaatagataattatttaacaataaatgatcacattacttactaccaaaaaagcaatcacgatatttgaccttttcttaatagtaattttgttttttaaaaagggcacataaataaataaattcagtttcgaagacaaaaggtcggcttatgggcgatgacgtcactcggtggtcagctgctgccattgctctcttctgaggaagtcgatcgcttccgtttcctcctccgctccctctccttttccctcttctcctttctctcccgcttctctttcttcctcttttccttcttcgtctttctcttcctcttctttgttccctcttcttcttcgtcgtcttcttcctcacttttcaccgttatcactattttttcttcgccatttttctcttacgttccatttgtgcctttggccaacaaaaattcattgggtggcattgccgggccgtacacattctcgtcctaaaccaagtcgttgatggtgatcacctctgtcctccgcaccattttttcccctccgtttggctgatcagtttcgtgtcgat

SEQ ID NO: 22467 - DNA, 2119 bp, Heterodera glycines
tttaatccaaaacatgtgtcaaacctgataagcgcaccatttacgtgtgcaaatgttgcggagtaaacaaaaattgcgaagtatgtaaaacaaatgaaagaatgctaacatggtcagtagctgatggtataaacccgctggagaaatttattaattggatattagaatttaaattttctaatactgttgcttttggtcattacgcaggttttgatagacatcgattttcttaattaagattatttaggaagatatgattcacatttcgtgcttaacgaattaacacaaatagaaattcatttagaaattaacaatttcatataaattagcgttagcataaattaatgatgtaatttgattaaaattttttctaatttacatatctaacaactgagacaaatgctgttatatgtatacatttaatatagtaaattaaaaaatttactaatagcaataagcaaaattgtaaaattctataaaaatattatcttaatacacatttttaacaaattaattaatcgaatatccataaaaattctgaacgtaagatattctatctcgccaaaaaatcatcaaaaaacatgcttcttccatgccgagaattaatggaagcttaataattaagttttttgaagttattaatataaattataattaatatatcttctcacatataattacaattttaaaaatattaatcgataataattatcaaagctagtttcagataaatatttataatacacattaactaaaatttattaaacttttgaaaaaatatttaattttaagtgtgccttttccactaataatttaacaaagtttcatataagcaacaaaaaacaactaacaaagtgcattaaacttgaggaaaatgatttaataaattttaatcgtattgatgaattaagtttcccgttatttccttggtaaacagcaattgaaaaagagcatttattggtgaatttaatttttagaaagacatttttttatttccgtttaaaagatgggcggaattatggattctatactactaatgtgttttcaagcggtgctaggacgaagtgacaaaagtatcaatgttcgtaataattaaatttaattattattttaattttattttctaaataataaatcataacttagcttaaacttaatcaaatttaaatgtagctctacatatcctcaactatttgtgtaattattaaatttagtaaaattttacaaaaagttataaccaaaaaagctcgaaaaacttagaaaaacaattttgaccctaagttttttgaaattcaataaaattttttgaaattttaagccaataatagagaaatttcggttatcttttcatatcaagtgcggtgtgaattaattgatgttggaacaagtagtattattttaataaataaaatttatatcttatgggagttaaatgatcaaaaaactgtttgggtgttatacattttaacattaattttattttaactagtaactttaatgaaaataataatcaggcgatgcggataaacaccaaaataattgtttatatatttagaaaaaggtttatattattaagtgtttctttatttttctttaaaaaataattaataaaagcattccaacaagtatttgcagttattttatggtcttggtataataaaatctaaaattagttaaaaaaagttttggggttctgttggatgtgttgatatttaatattattaagtttcgacacgaatacttttattgattagttatttgttgatggtcctctcccatcgactcattctttgcatttgtgttattttacatttcggtgtttattttcggactctctaatttgactccgtcgttattttattattattttgtgattctaattttattgtttattcatttaataaatttatcttgtttgtgtgttagcaaaacacaacaactggcgacgcccgtgcatttttgcgcttaaccgtgaattcaccaaaaaagcgactctgacggccccctcacataacccataacaaacaagttattccccatctgtcgtagcccgaagagtttctcagtattttgactgagcaaagctaagtgtgggatcggtttttgccaattttgctag

SEQ ID NO: 22468 - DNA, 2333 bp, Heterodera glycines
  unsure (1)..(2333): unsure at all n locations
tagtaattattattttancagatgctgaaccattctttaaacgaacttcaagaagcgctttcttctgccgcatttttggacgattttatgccattggttttggcattcgaatttggcgcaacattttgcaccgaaaacggcggaaccaccaaattgttcaaagagaaagtccaatttcatatatataattctcaatttaattaattatttttttagtgcctttcccaatcattggtcgccacaaaaacaaaggcaccgtttgttggcccaaccaaattccatcgcacaacaaccacttttggcattgtgccaacaactgaacaaacctttggctttgtgccgcttgtgcgtcatgtggaccattttggcacgaattgtacgaacattttcttcccgacggaagtggacaaatttttgttgaacatcaccataactccatatgatattggatgtaaaaagtatcaacggcctttgaaaatgaatgatccggaaggtccgcccagcgaaaagcaccgctatttcgatgcttgtaacaaagttccaacggaagaaaaatgcggaaagtaaacgaaattagtggtatttttggtaaaacattcgtcattaattagtgaaacagccattgattaatgaacttggcacagatttattacgttccttaaaattgggtcgcgtcactttggagcggcacattttggcgctaccaatggaaatggcgctaaaatctcaataaaagcagtttttagttcttttgccatatggtccaacaagtttaattttaatagacaaataaaaaatatggtagcgtttgcatcaaaaacggtgacaaagtcacctaacacaaaatcaaaattagaacatgctttaatgatgaatacattcagttccgaagagctgatcgggtgctataaaagctcgaaaaaatggcccggaaacagtccaatcgtcgaaatatgccaaaaacattaggaaggaatttcgggtggggccgatgccaatgcaaatgttgccggattcattataaaaatttgtgttcaccgtaacgaaaacgatctcgtcattgagtcaaccttcaacatttccttctccaatgaaacgtataaaattattatttttgatatttataaattaattaagcaatacaaatattagtcgattcagtgccgaaccaatttttggcaattttaacaaaatttttgaaatcttatggtaggtagagagaatcattagtgcaattgaatgatactcagaatattcaaaattatttgcttctcaacagagtatgagccgttaaattattgaatcgtcgatacaaaattaaaataataaaaataaaaatatttaatattcaattgtaattaaaaacattaagttgcaagcggacgcgaacatttccaatttcgttggagaaaataacagacataacaaattggatgccaacattcttaatcgaatttggcaccgaccagaggaacagcgcaattcgtgaaaaaagcgacaaaaaagaatttgcgaagaattgaaaacggtaaaaaattcgaaataattaaaaattcattaattttttacagagcgatggcattggcaccgtgcttaatgacaatgaaccgcaaatgatcgacggtactttgggaaaaatgatccattttgtgccaccatcgaatgatgacaaaatgctcccatttttcncaattgaaaggcccaaatattcaaaactcataaccatccgtacaaaattgttatcctaccaagatgatccgaataaattcagtcagtaaaaaattaaatttaattttttttaaattaacttcggcacttattaagacagtttagacccatgtgatgaatacggcgcagattgtgtgccgatcagaaatttgttgctgaaaattgaggcattagaatactgtggaaagaatgaaagcgaaaacaatgcggtgaaataaaaataaaaataaaaaaatataaaaaataatttaagaatttcaaaaagccagactgggccccacttgcgccagaaatcccatggaaaaagccatccgaaacattaatatgcgatgaggatatggcatgtgacaaacgaacgctgcaagaacagtacaaccgattgagagagagtgcgtttattttggaaatttaattaattaagtaattaaattaattttaaaaaattaaaaattcaaattaaaattcagtttgtgggcttaagcccgaagaaatagaaagtccgcggaaaaaacgacaatacaacgcacaacaaaatggaccgaatccactatcaaaatctcattcgacaaaagagctcgtaatattttgccattatagtgtagttt

SEQ ID NO: 22469 - DNA, 1241 bp, Heterodera glycines
agaagaagaagctgaaaaagagcgatctcagaagcgatctctaaactcaaacaaatgcaaaacaaacgaaagaacaaacgaacaaaaagcaaaatccatttcaaattgtgcaaaataattttaaattaaatttataaatgattaatcatctcttttttgcctttttttacaatgggcgaacgaatgaaagcagcagcagaagaaaaagaagaagcacataattaatacgttaccaaagcgtaattactaattagctaattgagttggaagcatttcgcacgcgttttttagaaaattgatttaacgttaattggccctttaacaatttggccaaagtcacccccattggatataaaaagacaagtaagttgtttttacgtgatctgctgtccattttttgttgcgtgccattatttttgtctgtgcccattttttttgtccctttcggcgatatgcttccgtccgaccgcaacatttgttttttcttccctttgccttccgccgtttgtttttccttcctctgaaactccagcaaaacccaaggacttctcattgcccgcaagtgttgatcatcatcctcatcattattatcaccacgccctcataatggctgctcctccgtcggcttttcctttggcccctctgccggtgaaacctgtcgtccgtcgtcttccgtcttcgtccggggtccctccccctccgttttccgttgggttccgttcatttgtcaatccgtcgccccccctttcttttctcacttttgctgtggcacatgtgtcccctgctcatcaaccacagcacccttctctttttctgcttcaccgtctcggaaataactttcatcgcactttttgtcattcattccgtcccctcccaccgcaaaaagtgtaaaaaattatgtgtaaaaagtgccaacccacggaacggcgacattctccaaaaaacgcggattcgtcggcacttttcatttggctgtaaaagacccaaaatgtgtgttctctttcactttctcatttctgactcattgcctcccccgcccccgcatttctccactcccttccgttttccatcatttgaatgtttcgtctggacaaatcgccaaattccccgcccccaaagggcatttatttaaatggatcgcgttttccacgaccaatttactgcattcaaagcgacgattgaggcggaaggaaatgcgggaccaacaggaaagtgtggaaaagcgagaggggagggggaaa

SEQ ID NO: 22470 - DNA, 1410 bp, Heterodera glycines
accattcgtccgagcagcacttccaattgcttaaccatggaccgccgtcgacttcgagcagttcggaccaagaaacagcggagcagcaagaccaatttggaagagacaaatttattaacaacgcaatcagagaagacgaacaggaggaggaggaagaagggagagaagaaggggatgaacagacgaagaagggagatggaggaggggagaagagaggcgggggcagccgaaagagacgacggaaacccgagggtaaggggagagaaaatgccggagggaatgacgagaagggcgggggagagaatgccgagggggggggagacgaaacgaaatgccagaaaagggtgtaggggaaaagcggaggagggggggggggggtcaaaaggcaattgggaccaatgcaaaagtcgttctgatcagtcagtgcctttgtgcttaatcggcttttccaatcacagccaaagacatcgtccgaatggtggtcacttctccgctgggcgtcggcgccgtttctcttccgtccgaaaatgttggccaaacagcgcttttgcccccatcggacgatgatgtcccgcagcaaaacggcccaccgctgatccgtccctcgtccgccgttgatcgccaccgcccacttcgccttgatcatccgcccatttcggtgccctccgctccgtccctcccttttccttccgcgcgtgccatcgaagcctttttccgacggggcagtgccattggcaccgccgggtcgcttccgtcacctccgacacgaaatgtgccgcctcccttcaacctcggaggactgttcatgctgaatgggggctcatcgacgggcggaagcgacggagggacgggtgaagaggagaagaaaatggcagaaacggaggaggaagaagcggaaggagaagaagaggaacaacggaaggacgaggaggaaaagcggcgggaagacgacgaagtgagtgggtaaaatgccacggcatttggccatggaattcccatttttccgctggactgtcgtgctccttcaggaaattgtccgctgctcctccctcctttttggcactccgtcccatccctcggtgcttaaaatgtgcggcagttcgtcgccctcgggtgtctcctcttccgcctcctctttgccgcgaagcgtttcgccgatagcctccggcaaaatggcgcatggacaggcgccgcattcgctgtccggaagacgatccggtaaggaactggccaactgagtaccgaccatttgtcattgtaggactcaatcggccacaaccacttccatttgttagatatttctgactgatttcaaaggttcagagggtggcaaaaagtgctgtccgacgcccggctgcgacgggtcgggccatcagacgggcctttacacgcaccaccgatcgttgagcg

SEQ ID NO: 22471 - DNA, 738 bp, Heterodera glycines
aaaatgtccaaggcgggtttttcgggttttagataggttatcagacaagcaattccggtttttagacctccccctaatatctgcgatttttctgcatacaatgcaagaatccgcattcggcatcatctactcttcgattcaataggacatcaggaaatttggctggaaaatgtcttaaaaagttgtgtcttttcatcagtactttgggaacagtcgatcatttctctgctgtaatttgtccccctctcccgacacacagatcattttgctagctgtatagcattgaactcgtgatcggctcttctattactacaaaggataagccccaaaaaagtgtaagtttcgcaaagttacggcgttctgattattcaatacataatcaacctgtttgcactgagagcaccaaagaggcccgatgagctaaatatatgcgggggggggtaatggtcgaatgaatggaaacggtgattatggtggggtggtggtacattgccaattgggaatgaattccttttaaaaattctcggaattttgaaaaacttaggtgccttccccctaataaatttgacggatgtgccaatgccaaacattccttccccctttcccctctcttttgcctaattctttcgccgtgccgatttccgatgggatgagattaatgtccccccccccctctctcgttcaatgtttgccctcagccccaaaatgaattcgtcctcctttctcctccctttgcct

SEQ ID NO: 22472 - DNA, 1449 bp, Heterodera glycines
tagtagcattctggaattttttttaatgatcggcttttttcatatttggcaaagataattagtgaaacatttgggaaattattgcaaaatcccattggaattggtgaatggcgtgacgtttaattggaaatttaaccaattttaaagggagaggagggctaacttgacctcgtgtttgtgtgcatagttcggatgcaccgagtgggcctggtcagcgctgaccatgaaggaacggccgagggaacactcaaaggcggttgggtggtccacggaggacaaaacgcggcgcagcaaccactcgaaacagtgcgactgggccccctgggcactgcgactgccaacctaaaacggaggaaattcgcttccacgggttgctctacccaccaatccccccgcccctttccaagtccaaacccattccccggatacgggtgcacttcatttcccctacattgtttcaccacgaaaataaaattttttttctttaaaaagtttttcgggaggaaacgacccgggagtgggggggggacggcgggagaaccagcggtggagcaggtcgtctcacccccgtcgtttttccgcaaactctgtccggatgcagcatttacgagagacaaattacgaaacttttcggtgtcgatgatgccaaattaagattcttgtatacacccacctcttcgttgtcaaaacaggcgaccattcgcacatttgggtccgtatcaaaagcgtcggtgtcctccaaactttcgacaagtcctttgatggcggtgtacgtggagaccaaattgtccagccgagcgccggaaatgaattcttcgttcagtccggacaaagtctaaatttaaaaaataattggggtggtcaaaccgatgctttttcttcgcttaattgcgtacagctggttgtgtgtcgtagaggaacatgtccatgtccaaaatatgctccgtcttgcaacccgccgcagcagcaaccgccttgagagagaaaaatttattttcactttttcggaagagttttttctcataaaatccatgtcagcaggcccgtagccagggggagggagggggcgaggaatccctaaaaaattttcaagaaaatgggaaaattttgaaaatttgactcaattttattaacaattccatttaaatccccagaatttcccacggaggcgcctaacggcaccgccggaacgccatttttcgtatttttggaaatttaacttcataatggtttggtgagttttcagcgaaaaacggggcgctacttgcaaagttaccgatttttgaaaattttttcaaaaggtgggacccttttgttctgcaaaacttttttgtgatagtcataaatttattctctggggtttttggggtccccgatcacgaatctttcaattattttgatcaattccgatttcctaatctaaatttgacaatttctattgttattcac

SEQ ID NO: 22473 - DNA, 1063 bp, Heterodera glycines
tagtattaagtctgtataccagggaaggggggggggggatccctttccccccccgaaacgaaaaattttttttaatatttcgccaatttttccccaaaaatgcaaagaaatggaccctttttctattaatatgcactctattgcttgtgtgataacttctgatcaaccacctgaagaaattgttcggaggtctttttggagacgggcttaatgcgcaagcaaggactgaaagaaagcgaaaattcattttgggagaaaccactgacataaatttggcatgaaatgccctccccgccaacctgtcagtgtgcgcgacgacaatggaaacccccgcttcggacggtttaaaggcaccgccagcagcaaaagcaaaaatggaagtctcgcttctgaaaatttttcaaatgttaaaattgaaattgaattgccgaaaaccctaaatgtccgtgccaaggaatatcttcgataattagtcctactttttgacatagaaacgatcctttggttgaatttgaagcttgtcatactcggacttttgaacaaaattggcactcttcagaatggcctcgaccgattcgacagctaaaaatggacgaataaaaggacaaattacggcacaaaataactcataaattagataaattaaatgaaaaactatgcattttataggaaattaattgaccatggaaaggggtgaccgatttgttgaggaactgaagaaaagcgagcgcagaagaacgaaaggcagcgggggaagaagaagttgtcatttgtgatggtggacaacaattatcaaccacaacagaagaagaatgagaagacatttttatttatcacagaaacacaaagaaacgggagatacgaaaaggtggtggacttttgcagccttttgaaaaaaagtcgaattggattcgaagtcttagcgactatgaaaaacccggggaatgagtgttgttcattctttttttgtttcttttaaaagacagatttttcaactacaggcaccacatgtagatgatctcattatccaatatattttgatgataatttgtgtgagtgaagg

SEQ ID NO: 22474 - DNA, 1974 bp, Heterodera glycines
  unsure (1)..(1974): unsure at all n locations
aaaaaattctgtatttttttaatgaattttggcacttgaaaaacttcttgatttatggttacgattacaataatattgttatttaaagatacgaagaataaatttagaattttggtttctgaaaacagtagacgaattgntttttaaaaaaacaacaataaaatataatagtttntaatgcataaagcagccacagccattcgttntagcgaaaataaattgaatttgcttgggttccattccttttatatgtagttattcttcgagacatttttttttctgttaggtacttcacaaccagggttgtcagatctgaggatttatcctcattttgtggctttttgagaaattttgaggcttttggggaaaatcctcagaatcttttaaattttgataaattgacaaaatgttttacaaatatttaataagtgggtttttaatagagcatcaaaacgaaaatctcacccaaattttccaaaaaatttgctaaattttttataaaaaccaaaaaagaaccaatttttttttccaaaaaatcacaaaattaataattttttaatgaaagtctgctaaaaatatgggcaaaattctcaatttttcccctggcggcgcctatcggcaccgccagcccctaaaagtcctttatttttgttggagatggatgttgatgttggattttaattaatttgaattagcgccatacagtaacagtgatgttcctgtttgtttctccgcgccacatttccagtcattattttccctccgttgttttctccccattcattaattattttattcttaatttttcggttctaaattaaatctgttttgctccttccattttcgtcattcctctgactccgtcgtcatcttttatttatttattgatttcatttgtctttccacaataaatttaattctgttgttccttgtggacacaacattggcgacgcccgagtgcatattttgtgcattaccgtgaacttaccaaaaagctactctgacggccacctcacataacccataacactaaagttattccccatctgaccgcaagcctgaagagtttctcagtatattgactgagtaaagctaagtgtgtgttcggtatttgccaaatattgcaagtggcataaatttaattttatatttgttattgtcactttgaattcattctctctataatgacgacgaaggaagacctcaaaaatattttggaagcgcagcaaaaacagtttttggatttgatttcaaaaattttgcctcaaaatacggcaccaagtgccagttcttcggaccttttcagtcaaatcaacagtcaacttccgcaattccactacgaccccgaggcagatgaaacattctcactttggtgggatcgttttggacaatttgtcgagaaggacggtaaggatttgaccggcgacatgaaagtgcgtttgattttgggtaagctctcggcaacggattatttgaggtatgaacagcaagttcttcctaagaagccagccgaaatcgaatttcagcttacaatttccactcttaagtcactttttggcgacactaaatcaatttttgtcaggcgcttcgaatgctttcagctgtcgtgtggcccctcacaaaatgtcatggagtttggcgccatggtcaacgctcgctgtgaacgcgccgacatgactctgtcaaaggaggaagtcaaatgcttgattttcatcacaggtctgagcgacgcgcacaaagaactccgacaagagtgtctccgccaaatggaaaaagcgcgaaagtcaacgccaccgaggtccatgactttggaagcacttctggaagagtgccgctccatccaatcgcttcaaaattcggccgccgctttgtctggtcccgggcaaattcattcggtgcaggtccgaccacaaagagtaagcgatggaagtaagaagtcaaatcgaagtaaaacggtcaatcaaaagagcaata

SEQ ID NO: 22475 - DNA, 1675 bp, Heterodera glycines
attggccgtaaatgccaatttcagttacacgtggcgaatgtgcggctgctttcagccttgggctgtcggctacgccactcaactggttctgacggaaaatgtggacgctttgatcggtccgccttgtgtgaccagtaatgcctttttgtttgacactttgccaaaaattgcgtaaatgaaaaaggtgccatcgccgcgggatacgtggcctccttctacaacattccactgtatttgtggggtgctactgtggcctcggaattttacaacactaccgtataccctacactgaacaacgtgaacgttaactcggacatgtcagtggagaaaatattcttcgccttccatcccctaaaattattatttctaccaataaaataaactaaaatggatttgctttacgagccgtcacaaaatcaaatgaccaatgatttcttattaatttcaacaattattgcaggttggcgttggccttacaaagtgtgttggtgcaattcaattggacagaagtgtccttcgtgtacactccggacaatgagcgaatgtaagaattattttgaataattaattaattaattagctattaatataatttaattagggtctgtaactcggtgaaacagagtctcacaaatgtgctcaacgtgaccaatgtgaccattgttttccagcatcagatggagtccaatgtggacagtatgaaggcgacgctgagaaatctgcgcaaccgatcgcgaagtgatgggataattaatttgatagcatcgctaattaccatcaattagttgtgctttcctgtttcgatgtcgaggttgaccgtcgcaactttctgttgtccattttcgacactggtcttgctgcggacaacgaatttgtgttcatcatgggatccctgcgcaaccagggcatgctccagcagggtaattaggcaaaatggccaaatattgctccagcaggctaattaggcaatttggccaaattatggaaggggtaattaattataaattgttttcagtttcatccagtgaggacggcagtgtcaaatatgcgaacatttgggtggacaaaaacagcccgagcgatgggcgcgactcggacgcgctcgccgcgacaaaacacgtgatcatggtcggtcaatcatggcaaagagaccaagagcaaatctaagtgcagggctcgcattcgtccttgaatggcaagtacgtccttgaaattgagccctctcacttgaaaactacacaatactcttgaattcaagatgtcattgaaaatgagcactttgcatatgacaaaaaattttactggcccttggatttcacgaaatttcccgttatgtccttggaaatcagtatacccgtccttggaaaacgagtttttccaatgatagtcctgtttaagtgcctttatagtagtcttcgttgttcagattgatctggaaaaccaatcgagtgatcagatcgatgaattcaaccgaaatttgactaccaaattcggcacttatccctttttatgcaacggaagttgcatgggcgacgcaggagaacaatcggttgcaatttaccgtataaaaataaaaattacaaaacatttaattgttattttttatccgtcacaatacgccagggctttgttcgacacaacatacgcatattttagagcattgaatcgcacaatg

SEQ ID NO: 22476 - DNA, 1578 bp, Heterodera glycines
  unsure (1)..(1578): unsure at all n locations
tatagtaaaaagaaaaccaaacaaaattcgaatgggagcgctggactcaattagctaagcgcggtaggccagacccagttagttgatttcagatttgtcccgttaaacaaatccgaaaataaaatatgatcaatcgagcccaacatattctcaccttttccatcatccggcgccgccgtctcctcctcttcggtggaagtgtcgtcgccattgtccggcttcgtcgccgtcggcgcgcctagcgccgtcagtgtgatctgttgctgcgtcgatgggccgtcattgtcgtcggcgttggcgctcagttcttcagcgcccgcctcggcatgacattcgaccagcgcctcgacaatgcaagcgccggcccccggcgccgccgtcgccgtcggtgttgtcgccgcggccagcggtgccgtgctgaccgcggatgcggacaggttaagcgaggaggcggaacgcgagttctcctgcgaattgttctcctccccgtcagcgcatggaatgcggagagtgccaccgctggaaaagaaagggagcaaaaatgatcgaccagaggagcaattttaatgagagcaaaagtgatcgaccaggggagcaatttacatgatcaaaatcccatcaaacgaatttgatcaatgatcaaacagagttaatcggcttgacaaattgattaaattcgaaatcagttttattcgcgaggaagtgatcaaaccaaaacctgatgatctagttggcttaatagttttgcacattggtcaacaaaactgtgggattgatcaaattagatcgcctttcgtccaatcaatcaaataatgttagagggggagagggatgcttaatgggttcgatacgattcaaaaatacagtaacctaacaaatacagtcaatcagaatctaagggatggtgaccaattaccgtaattctgaccacgaatggtgtactatacaacacacacaacacacagagcatcagagcatcagagctcacctgtcctccgtttcctcctcagcgccgtagaagaagcagcccatggcaccggcgcccaacatgttcaacgagtcggtgcggtttatccagcggatgtcaaagctatacaagaaatggcaatatcatagcattatcacttttaagcggggatcaagaggaggaaattccccgacagaacttatttgccggtttttcctccagggatcttcaaaatgacgaaactcactcattgatgccgttgttgttgatttccaacggcgattttcgggcccaattacggcactccatttgttgttctgatttgttggcacgcaacgacgatgacctgttgctgtccatgctggttgcggaacctaatggcgcgcattgaacctttttttcttgccagcctagagtaggtctcgaaaatctcgatctcgaatctcggaatctagcctagtaagttttgagtctcgggacctagctcaaacgtaggtctcaagagtctcggtcctgagcctagacaccaaaacccggaatctagnctagagcaggtcttgagtctcgggacctagcttcagatgtaggtctcaagagtctcggtctcgagc

SEQ ID NO: 22477 - DNA, 1538 bp, Heterodera glycines
ttaaaaattttgaaaaaaatcaaatacttgatgaataatcaaagataaaatcagtgattttgcaaaatctgagctcagattcggaatcagcacattttttcatcccaggaaaaacaaaaataaaatttttaagtttattttctgtcaattctacacctttgccgatagtgtcccatcagtagaagttcaaaatgtcttcctcctcctcctctccattgttttcttcattgttcaattgtgatgattccaacctttgtttccccgtccattcgtcgtccgtccattttttgcgttcgcccgaccatttttacaacacattactggtccgtttttccgatgtatttgcaaatgttttttaattttggtttcatcaaatccaatttcgtgattttctcatttcgttttcttccccccccccatgtgaatctcgaaagattttaattctcgactttttattcgaattcgggtcctggattcagaattggtcaaatggatgtcgggatgttaattagcgaccccgttaaagccttggaaacatttctatgacacttgaaaacaaaagaaaaaaatttttcgaaaaatgtgggggggggggggggggtgtagctccctatttcccggttttttaaagaaattttctgtctaccactaaaaacctaaaagaaacactaaaaaaacattaattcatatatctaagaaaatttttctggtcatttttttttgtttttaattcccaaccagccataattcggagatttggcccatgatttttctatttgcttttaaaattcccccgctttttcagcaacgcgttgagtccgcaaagcgtcgcgttgtgctgtccgccctctatttgggcaccgacgcgttggagcagcgattggtccatcggttggcggtcgcggcaaaaagtgtggcgaccaaacgccccgtcaaagttcgcattttgctcgactttttccgtgccacgcgcggcgcaaccgccgacggaaaatcgtccacgacaatgctggcaccgctgtgcatctacgacaatgtggaggtgtgtaaattttcatttgctacctccccccttttccttttttttgaaaaatttgctgaattttttttgaacgctccgcataaaagtagagtgaaaagcaaaaaatataaacgaccaccaaggaccagggggttcactacatttcaccctgttacccgacatttgcgcctatgacccaaaaacgggttcaaacttaagtttttttcaatccctaatggaataaactgctttaaatactatcagcagaaggggttgaaaaaaatgtgagtttttttttggtttttaatcaaaaattcctcaatgcttttagcattcattagtttttatgccttaactccgcgaattttcaagttttgctctaacaaaattgcttctttttttgtattgacattcagtgcattctttggggatgatagttgcggtttttggcctacgaaattgcatcaaaaaaaggtgaaaaatttcataaaattttcccaaatcaaaacgctcacat

SEQ ID NO: 22478 - DNA, 1102 bp, Heterodera glycines
accaacagcacaatcaagggactcaatccgccagcatttcaatcactggggcatcaattctcctgcatttcaatcactgggactcaacccaccaacattccaatcaacggggactcaacccaccagcattcaatcactgggactcaaccctccagcatttcaatctctgggactcaaatctccggcattccaaacaatggactcaaatctccggcattctaaacactgggactcactcaacccaccaactttcaatgacattccaatctctgggactcaacccaccacatttcaatctctgagactcaattatctgactttccaatcgctgggactcaacccaccagcatttcactggactcaatccaccaacattccaatcactgggactcaatccaccaacattccaatcaacgggactcaacccaccaacattccaatcactgggactcaatccaccaacattccattcaacgggactcaacccaccaacattccattcaacgggactcaacccaccaacatttcaatctctgggactcaaatctccggcattccaaacaatggactcaaatctccggcattctaaacactgggactcaacccaccaacttcaacgggactcaatccaccagcatttcaatcactgggactcaatccaccaacattccaatcaacgggactcaatccaccagtatttcaatcactgggactcaatccaccaacattccaatcattgggactcaacccaccagcattccaatcactggcactcaattctcctacatttcaatcactgggactcaatccaccaacattccaatcactggcactcaattctcctacatttcaatcactgggactcaatccaccaacattccattcaacgggactcaacccaccagcattccaatcactggcactcaacccaccaacattccaatcactgggactcaatccaccaacattccattcaacgggactcaacccaccaacattccattcaacgggactcaacccaccaacatttcaatctctgggactcaacccaccaacttcaacgggactcaatccaccagcatttcaatcactgtgactcaat

SEQ ID NO: 22479 - DNA, 1096 bp, Heterodera glycines
gggattctgagtcatctttatgaggaggcggggggggcgacaggttcggtaacggaaaggtatattaagtttctattcatatatgggttatattcactgattataattaatttgaagatttgttttaaattatttaaatttatttttttttttaattaaagaaattattttttgttttattattattaacaaaattattttaattaaatttaattttttcttttgaaaaatagatttatttttaagcaaaattagatttaaaaatttggatgcataataattcatttcaaaataaagtaaaataaattattccgtttattaattaaaaaataaacttttacattttttattattttgtttttttaaaatttttaaataaacctaattctataaaattatatttaaaattatgaaattatttttgtacatctcataacaagttagacttttgtacctcttctaatcactgttgtacctttctaatcacttttgtacctcttctaatcacttttgtacctcttttaatcactgttgtaccttttctaatcgcttttgtacttgtacctcttctaatcacttttgtacctcttttaatcactgttgtacctcttttagtcacttttgtacctcttctaatcactgttgtatctcttctaatcactgttgtacctcttctaatcactgttgtacctcttctaatctctgtaaggccaacaaaatttgaataacgggcgcgaagcgcccgtatgaaccaacaaactttaaataacgggcgcgaagcgcccgtccaaggccaacaaatttaaaaacgggcgcgaagcgcccgtctgagtccatcaaaatttaataacgggcgcgaagcgcccgtccgactcaacacaatttaaaaaacggccgcgaagcggccgaaaagcacaacaaaaattagaaacgggcgctaagcgcccgtctgagtccatcaaaatttaataacgggcgcgaagcgcccgtccgactcaacacaatttaaaaaacggccgcgaagcggccgaaaagcacaacaaaaattagaaacgggcgcgaaccgcccgtctgagtccatccaaattttaataac

SEQ ID NO: 22480 - DNA, 1014 bp, Heterodera glycines
aaaaaattccaaatctccacaacaagagctaatttctaataattgttgtacctcttttaatcacttttgacgtcttttaatcactgttgtacttcttttaatcactttttacctcttttaatcactgttgtacttcttttaatcactttttacctcttttaatcactgttgaacctcttctaatcactggaagcggcctaaaaacccctaacatttttttaaaaattccaaatctccaaaaccagagctaatctaggaagctctatcgaatggtgtgccatatggcaggaaattttcaaaaattttcgagctaggccccctagaaattttcgaaaattttttttgggttaaaaatgagggtcaaaaatatttttctggggtattttgatgtgctgagcacgaatatgatgtttatttttcgttttaaaatttttggaattttttaaaaattccaaaatattttccaattttttggcccacgggattttgggcgaatattgaaaaattcatatctagcctaagggttgatcaattttacaggaataaagccttaaaaatagagaaaaatcgggagaattttatgggctttatttggaatttctatctaaaaaaggaaaaaagttattccagaatttctggaaaaattcgaattttcagaaaaaaattcataactcggttctgaaaagatattctggaaaaataaaatacttcaaaaatccgcaatttttttctctataatataaattttatttggcaattttatctcttttttgagagatgttacaaaaataaaagtgattttggcattcgagaccaaagggggtggacaggatttttgagtaaaaaatttttttcaacaaaaatcttccaaaaacatgtctttaggggttatttgggccgctgatcatgaatacgtaatcagtttttactttagacatcgttaagacctcagaatccctgtgtgattggggattatgggacatgttctgagggggggggcaggttcgaatccgg

SEQ ID NO: 22481 - DNA, 2084 bp, Heterodera glycines
aaaacaattctgtccttaaaatattgatcacaaaggtcgcagcatttgcattttctaaaatgttttccacaattttgaaagtttctccatttttaattataaaaaatcttttttgaaaatttatattgtctttttacaatttttttcccaaatacatactaaatatatctccgatggttccattaactgaaaatttcataattaaaagcatttataaaatggaaatctttgacgaatttattgttgttgacgaaaaagcgatcagccaattaactgttgcccattttaattccagctccaactgtacttttcgtgatgtgacccaatttgccgcactgtaatttcacttttttaaatttgatttacatggtgccgccggggaaaaaattgaatttttttttgcatttttaataaattttttcgaaaattgtgaaattggttctaaaaggcagaaataggtttctagtgccaaatgcctttttaaatcacttacatattttagtaaatttatgacaagctgtgccatattgaaaatcaaggacattggcaatgcttccaagccaaatgaggagccattggcacaaattgtccattggtattgggacaaaaatggcgcacaacagatcaatgatgtaagaaaaaaaaaagattaaactttaaaatgattaactaataaattattttagacccatacacttaacaagggcagtgaaattaattgtgcctgtgccaatgcttcatcaattgttatccgaattctcaaaaagcgggagaagaagcccgatgaaaagtaaacgttacaattattgtcaaaagttatgattttgggttcggattcaaggactaattgaatgcctgctcctctgatcactaaacatttgttgttccccaattaagttcgttcccggcgccttccaacagctcaactgatcacgacgaattgacagtgaaaattggtgacaaacaggtgaaaccgaagaagagcatcacttttttaaatttaaataagaaattcgtaataatcaactttttgtagaatttgatcaaggtcgccttatattctgagcagatttttaaaagagattataaccatttcactggtcatcttgatcagattgaatgataacttgatcagtatgctaaatttaatcagatcactaagaaatcttgatcaaatcgttaattaatcttggtgatcagatcgctgtgtccgcccattggctgatgtccgtttccccggtgatcagtcgcatgctcagcgtggagatgaaggagaagcagcagcgaatgatcactttggacgaattgggcgtggacatggaccaattcatggagtttttggaggccatcacttatcaaagcacaacttttctgccaaatcgtaattccatgatactgtatttattctactataacccctgaggggttgaaaatataattttaatttttttgtaaattttgacttctcaatttcccaacttttagccaaaaatgtgctgatgctgctcaaattggccgactatttccaggtgggtgccattacgatatttctctaaaattaccataaattcaattgattttcaaaaaatgatacttaaatttgaatatcctttatcaaagagagtttacccataattttcaataaaaaattactttttactcatttttaaattcattaggctaattattaggggcactaattgctccgttttgaggttgccgcgttgaagtcgcgctgcgaaacgcatctgatcaattgtgttgaaattccgctgatcgaccgttttcttttgattgagcgttttgcactcgactatttgaaagtgatttaattttttaatatttttaaataatttttaaatgatttaattgcttttcccacattttagaattattttttgcattttgatgtcaacaaattccgtgccttttttaatgcgaaccatgaacagtttttgcctgttatcagcaaagaatttttgtacgctttgtctgtccgactgtccgaacaatgagcgggctttgatcaaattgattttgatattttcatagaatttgatcaaattgattttgatattttcata

SEQ ID NO: 22482 - DNA, 2514 bp, Heterodera glycines
  unsure (1)..(2514): unsure at all n locations
ttggtatcattcgaaagcttaacctgtttaaagctttttctaaactctcttgcttcgcgattagacaattaccaaaaaagttatacatgaaaattgcgaaaaaatcgaaatttttcataataactttttcagaaaccaaaaaatctttttgctttttgtatggctaatagagcatgtaaagagccttcgaattataccaacaatttgggttttgataacaaaaataagtggaaaaaccgttactttttaaatttcagttttgctgaacacgatcaaaattccaattaggaacgtggttaatattttcgtcagtaaacattttcgtcagtgaaagttttcgtctgtgtactatttttatttatttcacagttttccatttttttcgtcagtgttccaattcggcagtgaatattttcgtcagtggattcataaaattaaaatgtgcttcatttttggttaaactatttaatacagtatttatcgcttcttgcgtatggtacttctaagcaaaataaaatgattaattgtgctttaataaatgatttacataaaaagaaattgtactttaaaactgttgaatattattagtaaatttacttctccaacttcttatctcgccatcgttcccatgcgttctcgagtgcctatttgcatatttgcttagtccttatctagtttttgcaatgcatttggcacttggactttcacgcacgaataacagccttgaaggctggcatgcaacgtgttgtttcatatcactatatttaattcataatacagagaatttaatattacaaatcaaatagctttacaaaatttttggtttaaaaatgtgtgattaaatgtatggcaaaactaaaaaaaaatgaaagcaaggccattggctgtgatcggtcatcaatgggggataaagtcaaatcattaattagtaagcgatgggcggaaaacaaagcggaaatgaacatttcccgcgatcagtgatcagacaaagtatttgtgctgcagacattcaaccgcagtcggccgttcgtgcggattaaattgcaaaattgccgtgagcaactcaacaccggaggcgggcaaatattggggcatctgattggcaaacggaggtgttatgtgcggagagttttcggcgtagaaagaatgagggacaattgcatcggcgggccaaacagagacggacggagtgccgagttttctgaggggggggggagaaatattcgactcgacagggcaataaaattgaaaaaaaaaaattttttgcggcagcattttttgaaaaactcactcaaaaatgatgcgcaattgctccgcctccgtatcccctctgaagagcgcgtcgcgcgtgtacagctccgccaaaatgcaaccggcggaccaaagatcgaccgcagtaccgtacttgcactggagcagcagctcagggctacggtaccacagggtgaccacctcggtggtgaaggtggcatgcagaccgtagttccgagacagtccgaaatcggcgatctgaaaacagagaggtaagcgaattaatcatttacaaagcttttcgaaatttgagcagaataaaaaaataaataaatttactcacccgcaaagtgtgtcttgttcaccanaatgttntgaggctaaaaattgggggaaaaaagtgtcaaaaaggacgccatgaaacccttaaggtcacggtgaataatactgttggcatgaaggaaatcctaaacaaaaactgacataaatgaaaatgtcggaaaaggcaattaagtaattgctttcttaattgtcaaaaacaaatcaattcctcacaatgcccgtcattatttgacgtgcaaaatatttgcactgcgcgtcgcacatatttttcggaatttttcgcaaaaagtcgcacaagtcccagtcgcacttttcgcagacgatgttcaaactgatggtgccgccctttcggcgaatgaatgcgtcgtggagccttagaaaagaacacagacttttaatcttttacttttaataatttggatgtgtgaataattaaactgcaaaaacagaaatttgcctgagaatatttgggtgtttcatctgtttgagtgcgacgagagaagcgacctgaatttgtttcggtgattttgccatgccaaagcggtttagtggaaatgccatccgaaagaagcaaaaacggattcactgcctttttacctctctgacgacactctgcggaattccctcctccgtcgctttaacgggaatttttttcatggcgaacttaaacacgttcagttgaacaatcagcagaacgacttctcccccgcccttccccacctgctctctctcattttctttgctggtcaccaaccaaacttcgccgtacgcgccttggccaagtacgcggatcgggcgataatcctcgtcaacgggtggccgcattctgcacaaatttaaaaattttcgcggacatgttcaaattcttcaaaggacccgaatattacatcgattgccattgcattactttgaataaaattt

SEQ ID NO: 22483 - DNA, 2616 bp, Heterodera glycines
  unsure (1)..(2616): unsure at all n locations
gatgccgttttccgctccctcctccactttaattggaaattgtcgcgtggctccacgcgccaatgtccggcctcgccacgtacgtcagccgacccgcgtcgatgtccgcctgactgacccgctccaaccgccncagggagccgttgagcagctgaacagaagcggacaacagtcccgagcagttctcggaaagccattcaccagtcggccgtgcattggctgctttgtcaggtggaaaatgactttttcgaccggtattttccctccgccggtcgccttcagcaaattaggaccgatcaccgcagggacacccggcgcagtgccgagtttggcgtttcgttcaatttttggcccaattgcgacacttggcacaggcaaatgaattgtcggtgtactgctcaatgtcgactgagttggcattgtgccgtcctcttttttgcttggcaatatttcgtcaaattgcaacaagaaaaattcggggcccaattgatggcgaccgtcgtttaacagaaaatggaagcccattttcgtgtcctataaaagtcgatgttgattttggccctggcaaaaagcaaaccggcacgcccttcgcctcgtcaatttcaaagcggacaaagccgtggtccaattccttttgcgtgaaagtgtccatggtcgtgttcagtcccttttgaagtgcgccgccctgttgttgccataccataaaatggagttcactcggcatttttgaagggtgctgaacagtttcaagcacaattaccgtaggaagtgggacacagtgaccgttaccgtagcttggagatgatctgcagtgattggcacacttttttgtcccttttgtaccttcaatggaacattgtggacaattgttggcactgcaaaaaaaggacagaaaatatcatttttacaggtaagtataccgtactcaccctgtgcttcgtctcggccaaaatgaattcgaaggtcggcggttctgctgcatttcgcactgtgagaaggtggttcaatgcacacgcggagttttatttttacaatctttgaattaagaaattaacagccaattaattgaaaccaaatcaaagtcgagctttggggaagaatccaaaagtggcttcttttaagccatggattggcaaattcaaatgccaaaatatttttgagggtaattcacaatgtccatggtgctgttttgttgtgctttacctcctcttccactgctctttggcccatcgccaccatcgcaatgtctccggccgacagttggccatggctaaagccactcgaaataggctgcccaatgcgtcggttgaacagcgccagagatgggctcttttggacgaggcgaaactctgcctgagcgatgtccaatggcacattcggtgggatggaaacgcgcaaaaaatgttcctccaaaagcattccctcagagtttggcactccgtcgagaaaagcggcgcggaatttgatcagtgagggagtgaccaattggagctgaagggaaggaaaatagatgaagaataaaacgcgtcgtttaagtgaattttatgtgccgaaatccctgctaattgcacctgagtgtcggcataaatgcgaatcggcacgcggaatgggcccaattggaggaagaagtcgccttgggctccctccccctccgccttctgctggcggtgctctccgtctcctctccgccgcttctcccatcgttggacggttattttcacttcgaaatggtcatctttttccgcctccgccattggcatttgtccattatttttgtacagttgtctgctgttgtgcacatattgcagcgagccgaaggtgagcagtggcggaagggcgaagctgagcaacggaatgccgtaattggcggagggagcggcgactgatcaaaggggggcaaaagccgatcaaaagaacaaagtgaccgtgcaaaaggggcacccaccctgtttctttctctggaaaatgacttggccacgcttcggtgccgtcacaatatgatgtttggccacgaattggtgccgctgttcgtgcagttgtgccacgattggaatgtgccattcaatgggcgcacttccgccctgggcgacgaccaatggcgggagaagcccttcttcccgttgctgatcaatcccatcactgtcccccaattggtcaatcgaatggacggaaagagcgatcgcttccaattatttgtctttaaacaattgtttgttgtgcttcactcacaaattggcacttttggcgcatccctttgctctttagtttcgtcctgtgccaagctgaacacgaccacccgtttttgttcagcagctgtcgtcctgcttctgctcccccctacgtccctcgtaattattttaatcggaatcgctttttcttcgctttcttcggcttcatttttgtcaaaagcaaagaatattttgttgttgaatatttccttaaatggattatatttaattaatttttattataatttttgaccatttgattaaatcgccgcactttcgccaattttccgtccgtttttaaacgccaaaaaggcgaacgaaaaagtggcggcatttcaaattcaaggcaggcatcgtgcacattttcgtttgtttctgcacgaaaatg

SEQ ID NO: 22484 - DNA, 1687 bp, Heterodera glycines
aattatttattattatttttattttttttattttttaaataataatttttatttttttcaaattttttattcgaaaaattctgccgcagactagcgggctcgaacttttggtctgccaccaatccaacacactaccactctgccacgcaaacacttgccagaaaaaggataattgtccactatatgctgcaaagatgatgacgtcaccactgcgaggggtactgtagtccagggaaaatcgcaataaataatccgcagccaaaaggattcgaacttttggtctgccattaatccaacacactaccactctgccacgcaaacacttgccagaaaaaggataattgtccatcccactttgggcggtctttctgtcgtaagtctttctctcttttgccaaattgttcttcaattttttctcggcttttagccaatgcaaatggcaactgccgtctgagcgatggctcgaaatgttgagaattgaattttaagttgttaaacacattttgttaatttggtcactgccatttaactaattttttaattattcattccatgttttttactgttgcattctattaaaaataataattaatttcacaaaactactcattatattaatttggtttaatatttgccaattatttacatattttcattaacattttcccgagggcgggacctccataacattcgtagtgtagcggggggcccttttcccagtcgcatccccagtacaaatggtataccgtcaacaatagtcctttattgggtaataataaaggggtacaactggggggccccagcccagaacgtcctcgggaacagagggacgcctgagggggtccctctcgcaaagttggattggccaaatccgaaaagtgatcagaggagaacgacggcgggaggataacaattgaagggaccgccccgtttcgccccagggacatttgttaatgatagattagggggaacaattaaatgtgttaaatgagtaaattatcgtatctcacatggatgtcgctagaatcacaatgtcccgaaacccagcatttttcttgtcccgaatcccggcccccgtcctgacccggatccccggattcttaccacactcgaaatcgactcgacagttttctcaacccgcggcaacctaatgaatgcgcttatccttttgattatttgtccacattttacagttggaggagggagcagatccccaccaaatgtgccttaggaaaatcaacgacatttacaaattttgtaagcaaatttttattgtgggacaatgtaaaggggaatggatggcatcgagactgggatttcattttccaattagttgggacctgattggacaaggatcgcaatcattttcatcaaaatttcttcatcatttccgggatgatcaccgcgaaaacaaggatttcgaagctcagtccaaaccgggagctctgatcctgtataattttactgtaaatcgtttccaactattgattacactggattgattgggatttcatgtctttaaaatcgaagtcggattcgaaaaaagtgggatttcgggattatcccattccggagctcggatcccgtttaacccatttacaaattctccaaccccatgcaaatgttaatgagttttgtgtttgccagatgccacccctctttgggttgcggcatcgtacggccattt

SEQ ID NO: 22485 - DNA, 1990 bp, Heterodera glycines
ctgaaatcagatttcagttttgaccacgttaagacctcagaattcccgtgtgattggggattctggggcatcattttgaggggggggggggggtgcgggttcggacccggacggtgtaaattacttttatttttattttataattttttcattgttttaatacatttaaattattaacaaaaaaaattaatattttaaataaattatttttctgtgtgaaagtcattcttttaacacccaaaattttcggaattttttttgggccacaaggggggtgaaaaatatttttctggagtattttgagcacgaatacgatgtttgttttgcgtctcagaatttttaaaaaaattttgcaaaaatttgcaattttttgcccttgggaatttgggttaaaatttgaaaattcataatcataacttatgactgagttgctcaatttaattgttttaaagctttaaaaatagagaaaaatcaggaaaattttatgggaattatttgtaattgaaatctctaaaagaaaaaaagttattccagaatttctggaaaaattcgaatttttagaaaaaaattcataactcggttctgaaaagatattctggaaaaataaaatgctacaaaaatccgcagtttttttctctattttataaattttatttggcatttttataatttattagaaaaaagttataaaaacaaaagtgattttgggattccagaccaaaggggggtgacaggatttttgagtggaaaaattttttcccaaaaaactttcaaaaacatgtcattagggctattttatgacgctgatcacgaatacgtgatcagattttacttttaacatcgataagacctcagaatccctgtgtgattggggattctgagcatcattttgagggggaggggggaagttcgaatccgggcggtatacattattttttatgtgtttttttgcttatttttacgtttttaataatttcaagttaataataaaaaattattatcttttaaaataaaaaacttttgaagaattaatttttcaaaattcctttaaattttcaatatgatgaaacatatttcactatatgttacatgctaagagaggaaattcatgaactccctccgttttcatgtaacatgtaacatattttgaagcgggcgcgaagcaccgaggccacgaagtgttcttatgagccccacaaatttagaaatgggcgcgaagcgcccatcttagggcgtaaagctgcctacaaccccttaataacttttcaaaaatcattgcatttcattatgttaatacatgttacatgttagatgctaagagaggaaattcatgaactccctccgttttcatgtaacatgtaacatgtaacatattttgaagcgtgcgcgaagcaccgaggccacgaagtgttctaatgagcccgataaatttagaaatgggcgcgaagcgcccatcttagggcgtaaagctgcctacaaccccttaataacttttcaaaaatcattgcatttcattatgttaatacatgttacatgttagatgctaagagaggaaattcatgaactccctccgttttcatgtaacatgtaacatgtaacatattttgaagcgtgcgcgaagcaccgaggccacgaagtgttctaatgagcccgataaatttagaaatgggcgcgaagcgcccatcttagggcgtaaacctgcctacaaccccttaataatatttcaaaaattcattgctttcattagttaatacatgttacatgttacatgctcagagaggaaattcatgaactccctccgttttcatgtaacatgtaacatgtaacatattttgaagcgtgcgcgaagcaccgaggccacgaagtgttcttatgagcccccaaattaagaaatgggcgcgaagcgccccatctaaggccgcaaagctgcctacaaccccttaataacttttcaaaatttcattgcatttcattatattaatacatgtta

SEQ ID NO: 22486 - DNA, 1738 bp, Heterodera glycines
caaaaaaacatatatctaattcaaaattatttcaaaagaatatttgatataaatccaaattgatttagagccttaacatctggtaggtttatgtccaagttaaagaaaaaacattgaatgcatctttatatataaatttgataatttgaatagacataaaagatttttcaaaagcattgaaaataacaataaatataaaatatttgttcgaatttttgtgagcatcaaaaaattaaataaatttataattactaggatatatgaataatttttccagtttttttttgaaaaattcgtagaatatgttagcttataagagataaaaattttaaaattttaaaaaaataaaaataacattttcttttaattcataaattccgaatagtaatctaattaatttattttaaaattatttattgttggatataaaatattatataaaaatttgtaaattaattacagaaagaagattattgaataaatattaattgaaaaattttgaaaaaattaaatatttataaatatattaaagaattgaaatttttcaaaaaattttaaagtaaaatacaacataatttaaatacttttttcaatcttataaaaaaattaataaaaattataaaattgttagaaaggaaaaaataataaatatttataatgaatttatttaatttttgaaaaaaatttaaaataacattaataataatttatattttcaatcttacaatggataattaacaaaaagaataagttttttaatttaaatttttaattttatgacaaatttgagataaaatataaattgtaataccagaaaaaaacagcagttaaattcactaatactattttgcattttaaatattatctttttttattaatagaatttaaaattaaggatataattcttataaataaaaaatatttaaaaattctgtttcaattattatatatatgttagaatgataaggggtttcgtttcaaaaactaatttgagaagttcgggaatagctgcggggctgaaattttgcagcaaggggtaactcgagacggcgcatctgggaaaactataggttttttggtccgaggcccaactgagtaccagggaccgatttcccgtttttgctcgcagttcaaggcccgtaactttttttctgacactctaatcaaaaaatgtccgctggtaggaaactaagttgaagtgttgactaaaaaacaaaaaaaaatccaggcctctacctataataggaagggctgcagaaaaatggagaaattcagtaccaactttgtccagttcagtcccggttgaataactcattagggtttgatctgggcgggggatggccagcgagcttattatagagctcaatgagctcgatttttccaaattttaaaatttcaaaaattttcaaaaatttccgagttaggcctaaaagtaggttttggggtttttgaattttaggattttttaacgatttttccaaaaaaatcggagaccactttcaagcaacagtttttcaagctctatcgactggtatttttttcggaaaaatttcgattttttctcggaaatagaaaaaatttttggcctgagcgggacatttgagtcccgggcccataactcgtcaggggttgcttttagccaaaaatggccttagagcaaaattgtagaactttttaagctctatcgaatggtgtgcaatgtggcaggaaattttcaaaaattttcgagctaggcccc

SEQ ID NO: 22487 - DNA, 1997 bp, Heterodera glycines
tttgtatttttaccccgaaaaaaatcacaaaaaaaaggaattagttacaaaactgagaggaaaaataaaaagagaagagggggttgaaatgaataccaccggaaaattttgcaaaatgaccgacacttttggatgccgaattatcatcttttcacatataactttttcttttatccgaccacaacaacgctggagcgatcggtcgtcggttggggaatgtgatgaaaagatggtcattgtccggggttctcctttggcttgggtttggagttcctcccctttcctttgtgtcagccctctcatcactttttgtcccctcaattgaccaactgcccctcccctttctgccaccctcaattcccctggcccgttcgttcattcattctgttaattgttcaactttgtttcgcttggcttggttttccactcagcaaataaagaggacatcgaaaagcggatttgggggcttggtgttttgggccatttttggcccgcccggagctgcgacgaggggccccattttgggtgtccccgagtcccaacagtctccagagtagggctttgtcacccgggttccgttaacccgggttaaaaaattttgaaaatcgcgttgctcgtctttaacccgggttaaataaacccgggttaagcaaacccgggtttattgagtttttaaataatttatattaataaaaataattaagaattgtgattaatatatttggtacgaaaggcttcggcacttttaaagcgatgttttcattatttaaattttcctattgctcattttcggtttcttcttcaataaatataccgcaaatattagaattaagcttttattaataatttaaaattttttatagttttttaatattccaggacattttttaataatgaaataacagatattatttacctaccaatcaacatttaaatatgtattacaaattaagaaagattcagaaacactttttgggttcaatcccaccattaagatggaaattctattattttcttaaacttatttttagggatgtcaattttatgtaaatacatatttttttccttgctttctttcttttttgtgtttgcattacatatttcggggttttatacatatttacatatttcgggcttttatacatatttggtacatattttggactttttcggactttttcatacattttttacatattttgtggattttttacagaaattttcggaaattctcaaaaaaaaatccaaaatttcggcaaatttttcgtacataatttcaaatttttattgcatattttgagaatttttggaaatttataaaatttctagtgaaaaataaaaattaaccaaactaatttttaaaatactaaactgtgattttaggcttatttaggtcatttttattgcattttgtgtctatttcaccctttccgaagaattttttttccaaaaaataaccattttaaaaattttatttacatatttgatacatattttgggtttttcttacatatttcgggattttttttacatatttatgtacatattttgacaaatttttgtacatatttttgacatccctacttattatcaccgcaactcaatcgcttcgatttgccataatttctcggtgtatgcaaccatttggacaacgcttggccagcagaacttgcatttgtcttatcatcatcaatcaaatcgggcaacagggttggaaatggattgtattcaactggctgagttcgtagagaattgtcggtgaaatcagaggatgcaaattgtcaaacacaatctttggcacccaattacggcacggcattaattatggccaactacccttaggccttcatttttccacactaccactgacttccttcgcttctgatccggcacattctttggcaccccattacggcattaattacggccaccttcgcttctgatccggcacattctttggcaccccattacggcattaattacggacaactaccctt

SEQ ID NO: 22488 - DNA, 2182 bp, Heterodera glycines
  unsure (1)..(2182): unsure at all n locations
cgctgactggcccctcggggcatgtgtcgcaccaatgaggttcgctgactggcccctcggggcatgtgtcgcaccaatgcggttcgctgacttgcccctcggggcatgtgtcgcaccaatgcggttcgctgactggcccctcgtggcatgtgtcgcaccaatgcggttgctgactggcccttggggcatgtgtcgcaccaatacggttcgctgactggtccctcggggcacgtgtcgcaccaatgcggttcgctgactggcccctcggggcatgtgtcgcaccaatggggttcgctgactggcccctcggggcatgtgtcgcaccaatgcggttcgctgactggcccctcgtggcatgtgtcgcaccaatgcggttcgctgactggccctcggggcatgtgtcgcaccaatacgattcgctgactggcccctcggggcatgtgtcgcaccaatacggttcgctgactggcccctcggggcatgtgtcgcaccaatacggttcgctgacaggccctcggggcatttgtcgcaccaaagcggtttgctgactggccctttgggcatgtgtcgcaccaaagcggttcgctgactggccctttgggcacgtgtcgcaccaaagcggtcgctgactggccctttgggcatgtgttgcaccaacttttggatctgcattcttaatgggatgtgtgagccctggctgatggatttcagcacaggatgactacactccatggcgaagaatgatgtctttgatctttatttgtgcattttggttaataaatttttaacttgtgtgcatttattggttaattacctcatatttttgccgcatttgctattccttcctgattttttgtttcagatgccttctaagcaagaaaaattgcggaaaaaagagcaagagcgttatcagcggcggacggagaaatctgtcagtcgggataactcacccgtcccagacgggagtgcagatgggaatggagaggcatcggcatctctccagggcaccagcaccccaagcttaagtgctttgcaaataagcacgccggcttcttccattggaagtaaaaaaaggggaagacccttgagagccggagcgaagccaattttggcaacgcaagaaactgtgtctgcaattgacacacctcgagctgctttcactcaaagtgaccaaggttcgccgtgcaaaaaaataggaaaggtcgccgagtgcgaccaaccaacgtttgccaatgaagctattgcttcaacgcctgtttcgactcaaagtcgtagagggcgaccagttaagcaactgggagggcatgccggtaaaggaagaggcaaaaccaacgagtctatgagcaaatgctctgaaatggaccaaagtgtggaaaacgctctaagtccggcaccctcgcatattgtgtttgaaaaaattgatttcagcactgtgcaaattaatttcgccacatcgcgaaattttgcctgtaaaatttggagatgggcagcaattggcctttatgagcgtgatggcgaaacagcacttggcccacgctctggcccaagattcattgagacctgctggaacaggccaaatgaatggctaaatgacagctttattgttgcctatttagcttacattgcaagcatttcacaacgaaagacagtagttgtggattctttggcatcgagaactgatgtttctcgattttccaacgtgaagaattacactttcggctatgatccgaatgctgttcctgaagttgtgcttatgccgcttcacttcccaaatcactggactctcattgtctacgatgttgcacatggtgcatacttcgttgactcgctgcatatgagcagcttgagtgatgagagaatggcactcatccagtcaataattgctgagatagtgcccgggagtccgtcattagctgttgaatacgtacagcaattgacaaagcaaaatgatggtaacagctgcgggtacttcgtgtgcctgtatgctgaatcgtggcttatgaacaattgcacttttgttctgccggacttgaacatcaattatgagaagaagcgcattttatggcacataaatgagctttacggctctgatattgtgccgtttcatccaaggggaagggtgtttcacatctttcgctngtgtgtctcatcacaatgggggatgtagcgcaaacttcctcca

SEQ ID NO: 22489 - DNA, 3057 bp, Heterodera glycines
ataagggttttttcaccagtcgaattagactaatttcattaacaaattaaaaaatgatattcggacagacccaaaccaattggcggagttgcgagtcgctgtcggagtgagccgtaagctcaaaaataattcggtttttgctttgttccgtcagtgttgtccatgtttacaattagctgttgcttattattcgactttgcatttaaattcgccaatttcagccgaagcgacggaggacgcttttccatgagagggactcacaatcagtcgaccaaaggacaaccgaaggcgagcgcagcgaaagccgtcgttcagcagcaaagccctgaaatggtggcatggctcagacggaaagagtacgacccgcggaaggcggcggcagaccaaagccaaagggaagcgcaacagagacagcagcagtgcgttggtggggtgggaggcaaaaaaagtgaaagcggcattttccgaaagggcgcgccttgcgccattggcactccccgaggaaaccctcaatggtgtggggaacgagtgggtttttagtgaaaaatgtatttgttggtggttggaaagtcagtcccctgaatgtctatgcttttctaccattttcttctttcaattgagtttcgtctcgtttttttcatcctcattgtgttttccattccctttgtgaccttctctattgcttaggaactctttcatggcttgtcggtttttctccacctcggcgaatgccaaaacgcccttcgcccgatggcgtcaaaatcgcaagagtcagcagacgatggccgaccaacgaagcaaccgttcccacgacgatttgagccgtctaggggaaagtatggacgacgagtcgcttcatggcgtggctgtcgatccctgctcggttttgttttacccgcgacgctaatttataaccaataaaaaattgcagaattcgctccaacggacggtggacgaattgacgcaaaagtgccacaagtcgattgaacttttgaagtcagttgtttcaaatgaaccaaacttctggttttaccattgtcccctcccccacagattgtgcaaccaatccggcctttcttcgtccgtggagcaactgctcgagaaggtcgtcgaaggaagcgcgggcgaagcccaagtgcattttggaagtgcggattctggtgcaaaggcaaacaatgagaacatttccgatcgcttggagcgcctttcttccgtaagacgcaaatcatttttaatttaattttctcattgccaaaggcatttgacgccatccaaaaatacttggaggagcagacgacaatgagcagttctcgtgtctcattagctgctttaactgggttcgatactttttaccaattaaatttaatttgtttttagtgggaaaatggcgacgacaaatgatgtgaaaaagcaaacgcagggaaataaagagcaataaaacaaatgcttactcctttggtagaattattttattgtaacaatttttacttatcaaatatttaattttccattattttattcattgaaataaataatatttttaaaccatctctccgcataatttgctaatcagtaggaatattttaaacgactcgtgagattttctgttttttagtttaacaattttatataaggacaccattttaacggtcgtttgtttcctccccattgattgttcgtctgtcatcggttttccttcaaaaaagggttctgtccgtcgttggcccctccgccgatagtttcgaatccttcgccgttttcgtcgtcggtgggggcaaatgaaaagtgcccattgaagccaattcgaagatgacgttttgtcagaagcaaaaagagagtgattatatttgtaatcacaaggacaaaaacgaggacgaaaagagcggtcgaaaggacaaaatttggggggaaaggcgtcgctgggcgagagcaataaccgtcacacaataaagaataattagtgcgcatggcaaaacgaaaataattgcttttaaagagctgaaaaattgtgaagggagaggcggtaattattataattatttgatttgattgtcctcccatcaaagactgtccatttgcaaacgatggaaatggggggggaagggtttcactcacctccaaaagtgactgataggcatcggtcggtgagcgaatgccccgccggcgccacccctccccccttatctgtgcaaggagagaacggaagagcaatcactgacggaggagcacccgcagaaagcgcaccccccccccgccacaatttgcattttattcccattgcctcggaatgtccgtccgattaatcgccgccgtttcgacgcttttgcttctctcagctgtcgcaaatcgaagcttagcgaagccaagcggcacaatcgctgagacgaaaggagcacaaatggaggaggaaaaggaagagccatcgccggccaattttaagggggaaaatcgacaacgacagagggaattgtcgcgggacactttcctccgcctgcacccaaacccacggggagagacggacgaaggaattggccaaaacaatgccaacggagagaaagcggaggaaggcaagcaaagggggggggggggaattcgagagggaatcgaatcgaccattttcccacagtcgaagacggaagtgaattgccactccgagacggagacacacttttggcattcacttcggacgacgctttgatcgaaaggactgcccaattgaacaattgtcgaggcgatctgttcaaacacaaagtacgcttgcccgggtgccggccgaaaacaattgtgaacaggtggcagaagaggaggggggaaaggcacagtgaaaggaaaggcactcgcagattctgccacgggaattgtgcctcgttttacatcccgagaatgcgttccaaaaagctgaaggccaccttccaaagttgtgccgcttgtgtgccgactgagactgacctcgtccaggtcggccctccagtgggaattcgaatatcttgacttatacgatgttttttctaagtggaccacatctacgactgaatgatggtacctagtcgactagct

SEQ ID NO: 22490 - DNA, 351 bp, Heterodera glycines
tgtgtgtgtgggtgtgggtggaaaatagctgaatatgcgaactaaaaatgattcaattggtccgagaggaaggtcggctgccgccgcaacacacgagccgatgagaaaaaaagcgcgtcgcttcgattgattggcgaggaaggtcggctggcgcaacatgagagacaatttggcgaaagagacaaattttggagaaagggaaaaaaatgaattttaggggggggggggaggaaggaggggtgaatgaaggagggtagggggggggtgaacttggggacaaatttggggcaaaatttttcagggggggggggtttggtaagggaaggaggggggggggggaatttgtaagga

SEQ ID NO: 22491 - DNA, 1592 bp, Heterodera glycines
tgttaaatagttcaatatgctgaatggaaatttactgggtttttataatcaaaaaggaaaaacttgctagttaaataatcataatatctaaaaaattcgcagctaaacattctctataaaaactggtaatgatggatttgtaaaataaatttatttttattatataaaaacagaattaatatgcataaagttttgataataaacaaaaaaatcaaaagaataaataaacaaaatatgttgcattctcaaataaataataaaataatgctaattattgggctaatataaggatcattaataacacatttttaaattgtattaatttataatttacaatttaaaaacgaataagataaactaaattttttccttacacgcaaaaattatggcaatttgttcgatgtacaacttcaacatctgaactattaactagggttgctccccgaccctcggggcaaaatgtcgggggtcgggtcgggggaagctaaattgtcgggattcgggtaccacgatagggtaattatgatcaaatatttttaaagaaaaaaaccaaaattttctttttaaatgctcgtatttaaagtttacgaaattggtaatatatattttttatacttaagtaaaaaaatttataaaattattctgatagagaacaatcaaaggttaaaaaatgggataacgaaattttaatttggttgaatttggcaaagttattttgttttcaaacccatttgcagaatttaaaaacgcgcaaaacaattttggcgatttaagaaacgcgccgccagacggctgtggactattcttgcaatttttgacattcgggaaaacgacctgtgttttcatttcattccaccaggaaaagaagtcttcgttgactgcaaacatcctgaaaactaatattttcacgaatcttactaaatattatgaaaccctttattgcgaaagttaacgacgttgaaaagacgttatttataaggaaaattaatattaaaaatctgataaatatttaataaattattatcatcatcttgtttaaaattgaataggactgataaaaaattttaaataaacaagtatttaattcaagtgtactcaattaacgccaaaaaatatatacaaattaaaaaatatatatgtaatgaaagaaaatatacagttaaatagaagctaaaagacatgaatcctaaaaaagctataattacatttaataattagaaactatgatttttagtaaatgccccaaatatatgtgccggatttttcctgcaaaaaaccgtttcaaaaaatctcggttaaaaattatttctgcttaagaaaaattaaaaatatttatatatgctcgtttcagaaaaaagatttttgtctttattattaagaaatctcaagcagcgtggaacaaaaaccgctccagtggacaattgaaaatagatctcttatattaaacaaataataatcaaattataatataaatgaaaatttacattttaaattactttcgctcttacaaactttttaattgtcttattcttttctattaaaataaagaagcaaaagaaaaaataaataaaagttaaaattaaatgtttgtc

SEQ ID NO: 22492 - DNA, 1767 bp, Heterodera glycines
aattttaataattgtgaaataatttcaaacttttgaattaacacaaaataaaacattacttatttttaattcatgtttcaaaaaccctaagattttcaagatatttttaaactgctgaagtttgagaagtaaagtcataatagtgctcctcggccaaataattttttacggctaaaactcgttgaaagaaaattctgtacttcaaggattataatctcgcaatcaacctatggatcagtcaagattaaaaaaatgagaacaataatgatgacagtacaatacgaaaaaaaatcgtgattcaaaatgtcgctatgccgatttctgaaatggcattcaaaattgtagcctttgggcattccgtcaagttgaaatgcacaagcatgcaaatattcccacaaaatatttgttttttatttctttgaccatttttattttcggaagagatctctgaatttttatttcctgttttacttctcttagatcttttttttattttgtcatgtaaaccttttttttgaaggtgaaacaattagtaaatttattttgattgtctgaaaaaggcacagtacatacacttaacagagacttgccgtataacaatgatccaaaatggtttcctagtaaatactgcgttagtttctaccagattgtttttctacagttttttttcttccaatcaccaatgattttttttccccgtttcaccgaataaaaccgatgtacccattaaaaatatgccaagtccgtccagttcagcaaggtttccgggtttaatttagtacaagaccttgaaaggggtcattttatattgctcaactttttttttggcatgttgataaaatagatgttgtgaccaggtccccgttgggtcgcatgcttttaatatttatggcgaaggtattcttggtaaaaattacagcccattagattataggaagtattaaaaaacttgataatttatcaacagactgtaatgttggcagttgcctattcgacggtttaaaatcacggtcttcggacattccgtcaagaattaatgagccgaatctcatattgatactcataacatcacataattcaaaatcttaaatttctctgttctaaaccaagcagtcagaaatgatgcctcaagaccttaaccgaagaaaatttggatgaagaaaaagtttattttgggtactttctaaaaattcaaatcgatgtttttctttaaaatattttatttatctcaggctgttttcttttgatttagtcatgcaaacttaattaattttattttaattgagggagaaataataggaaacttattaattttttttgagcaattttggttcggttttataagtattatttgatcattatttacattcgggttgacattaattttcattgggagaattacatttaatttaaaaaagaaagtatttattatcatttatatgcctttggctttcgggcctgccgtcatgcatgttctggaagaagaaaccaatattttactcattagcaaaacttataaaaaaaggggttgcgcaaatccgaccaatttcagtcctaaacaggtactcacgcgaaaacgtaccccacgcgaaaacgtaccccagccacgcgaaaacgtccccacgcgaaaacggccacgcgaaaatggccacgcgaaaacggccacgtgaaaacgaccccgaccgtaggccaaatagcataatggcgtaatttttgcgcgctaattcaaaatttacactggtaaatgccttttgtattttttatttt

SEQ ID NO: 22493 - DNA, 2669 bp, Heterodera glycines
tacattcttctgtgaattgaggaaatgccaattgacctccaggacgatgttttggcacaagataaacaaaaagaaacttagaaaaaatttaatttctaatattatttgtatttggaaattcgtttattcatataaagcaagtctctttatattttgttgtgcggtttgtgcagataaccccaaagctgacaatgcttaaatattattttagattaatccttacatttattgaatgcgaaagaaataaaatttaaaaaatgaaactccacccggaaccgaaccgatggctaaaatgcttatagtaataaccattcaagtagcacgggaccgcgaatcttgtgaaaaaccgggaccggaaaaattccggaaattttctgtcataaaatttaaaaaaaaattaatttattttttcaagtgaaaagtcaaatattggggctgatgaatttagaaaaaaatcattgatttcaataactccgcctaatttttgacccatatttggcataattccattaagaattaaataatatttatgaatttttttcaaatattacaaatttatcccgaaaaattttgcgtcaacatattaataagtaattaattattgtgacatttttcaaggtttatatttattaattcttcggttaaataattgctttcccattttaacacttctttgatcattcttctgttcagccgctggtggtgcccgaaatgatgcaatttttgccatcgcctttcgatccgacgtcgaaactgcgcaacattggcggctccttttgctggttgttgccttggaattcggcacacactttcttcgacccggtgatttgcacatttttgatggttgccacatcaccataattctcgttgaggccacacaacagcgttttcagcccagtcactttaatgttctccagcacaaactttcgtttttggcattgcgttttgcagttgccgcatgcgcgcgccaatttgccaatgccttccgcctgaaattaatgccaaaatgcacaccataattactttagcttagttctatgattggcgggaaatgcgaaattgatttcataatataagttataataagtccgagaaaactgataaattttaccacaaaatttttgatcgtcaaagtgccaccgccgttcatttggaacactttgtctttggcatttttcacaccgccgcctgtgaccgtgaaactgtactccttgcacccgctgctgctccggaaagtggccgcgtcttctccaaccttctcccaccacacattttgcagagtgcacccgtcatagcaatgaataccgtccgccccgttttggccaatgatcaaatttttgatcactgcgttcttttcggcacggatcaatgctttttggccctccgactgatcaccgctacccaatgccgaagaggcggtcaaccgtttgaagccaaagtctttgacgcctcccgaaactttgattgttgccttaacagtttcttcactagttgcctttggccattgttgcccaaaagcatttgttgccaaattggcaaaaagaatggtcagtacaagaaaggaatgcattgattaattaatttttattcaatttattaattgatgtttttattgtggaatttcaaaaaagttaatcgcttttaaacaaaaattttgttgcgcttaggagaaccaaagtttgttaaaatttgaacaaaaaatttgtttagctgaactttctttttagccagacattcaattatgccaatttatatcgattaaaattatttaaaatttatgttaaaaaatttttatgcacttgacagttgactaaactaaacttttgtttcgagttgacggaaaaccaaaaaatttgaacaaaatttgtttagctgaactatttatcatttggccaatttctaatgttaatttggccaatagaaattttcatcaattaaatttgtttgcttctcattattgggctcagacgccatcattagtttggtcgttttaattaaatttaattgactttttgaatgatcactcgggtaataaaagctaaacagataaaattaaaaaattctatccataattataagctaaaagaaagcgtgctgagtcaaaaaacagaaaagtgcacactcaaattgaataaattgaaatttaataaaggaattattttaaaataaaaataagaaaatttgaaaagttggaaaagttattgtgctttattcaattttgagcaaagtaaaaaaaaattataaacaaaattaaacgaaaattgaaaacaatacattagaacggaaagtgccaaatttgaattcatattcttttttcagacttctttttctttagcattttggcaatataattttcattttttgttgatgagtgttaaataaaataaataatattcaattacgctgttttcatccttaatgacccaattaaaatatctttacttgaaaattgaaaaattaaatataaagcccttaatcttttatttcatcaattcttacagttgtaaagaattatatagtccagcagaatagaaatagttaaaagtggaatggataattcgttaaaaatatacattccgaaatttgttaaaatttctatgctttcggtagcatttttacacttttaaaatcattttattttaaatccttatttgatgcccaagcatccc

SEQ ID NO: 22494 - DNA, 3240 bp, Heterodera glycines
  unsure (1)..(3240): unsure at all n locations
ttgttattttatattttcatttaaaaggtaaatgctcctctaaattggaccgttaaataatttttaaaaaaattagtctgtaactattgtaaaagcccgagaaatcgacacgaaacacaaactcaaaaaaaaaaagctgcgactcgacttttctcgggttgagacagagattctcgagccaaaattattattaaaatgattcgaagccgaatggccgcgctgggtctattacatccatttaggtcaaaaatgtctgtagcaactgctaccgtatgcttgccgtccgccacttaccgtgtgccgtaccagtcgttgtaccggtaggccgggttctggtagtattggcgggacaacgcttcgccaaaaaattctggcgcctgctcttgattaccggtgcccaaatagggcgcgtcgccggtcaatgccttcagctcggccattccgccgaccgcggcacattgcgggaggacaagagaagcagcgacgatgatgagcagagcagaagcagctttaaatggatcctctcattaaacattggttttattcctgatccttaatctacgagattctcgagcgaaaaaaagcattttgggattaagaatctgatggataacaataacatttggaaaatttaaccataaaaaaaactcattcctcttaatctgcatcaattcccagcttctgctggtgagaatattctatgattaatttttaaattcttggcctttacaattacttaccatgctattaatgctattacctgctctaagtgtcgtcgagtttggcgctgaacatctcctgttgctgctgctactgctgttcatgttcatgttcggctccgttcgtatgtatgtgaaattattttcttccgaacagcacagagttttgccaatggcccttccgaaatttgctaaaaatggacaaatgttggccctttaaatacgcgcgcgcgttcagccttttggccattcgttcgttgtttggacaacaacaaaaaaaaatggaggacaaattttattgggcgccggcggaccgaacattttacgcgttgacgtcaaacgacgccgccccgacaaattgaggccaatttttgtgtcagagggcgcgcagaaagcgaaacgaactctccaaacagaaaactctccgccgccaactcgcgcacccccccccggcattattcccaaaaagtgtcattcgtccgtcgtcgtcggcggcagcggcggttggatgaagaaaataaaattgttgtcccccgccccgtcctctcccaaaaatttgcggctgctgctctatgtttaaccaaaaaagggggagaagaatgggggaatttggttttggtcttcctcctcctccccccacttttcgtttttccccccccccccagtaaggaaaggaagaatgggagaatggtggttgtgatgatggatgaacttggggatggaagggatgagaaaaaaggggggagcgcagatccctgcccaattttcaacaaaaaccgtcattgctcaagtgggggngggggggggggggaagccccgcgccactcatcatcatcaaatcattaccaagagagacaggatgggattaaatgggataaggctcaaattgtcagccagcttcttccccatttgggcagcatatggttagcataaaaagtgctggtttggggttgtgtgtgatcttttagcaaccagcaatcgctcttgaataggctttatccaccgccggtgcttttgtgatccggatttgcttatccagggactgttggtccggataaaaatgggcctttttatcccgatttttttcgtctaccgttcaattaagccaaggactggttgtagcaaatttgtatttttgccaatttcattttctatttgcgatgttttgggccaaatgcctgaggcgctggccacaattaattaatttaattgcgctaaatatttccgtcacgcaaaggcaaaaccattctgttcggcaaacagcgcccctaaagcattgccactttttgttgttgaccttggccgggccattaagcattcattgctttcgtttgcgcgcattttacgtcatcagaccgagtaactttctccgtccgtgtcgccgtcagggacaaaaaatagtttttttttaattgctttttcatccaatatcgcccctccggcgcaaagggatgggcccaatttggtcggatggaacccgcctaattgatgagaaaccgatgtcccaaattgacaatttgtcaacagattcatttccaaattggtctcaacaaatttattagttcgttgaacaatttttgggtttattcgaatcagtaaaatttatatttgatttactgatgaaaatagaatttatttgagttcgatctccaatttataattttaatataattaactcaagattctttttatttgaaaaataaattcattccaaaaatgtaaaatttatgagaaaatcgtgaaagggcatccataaaattcttcatttgcttctatccgaccgatcccgcccctcattgtttcggtcactattataaaagtgcgtttattattatagatccatttccttcatcccattcttttctcccatccaaaatgatcaaaataataaacccaaatttggaacaaaaaaaaatccaataaatttgagtggcgcccggggggcgggaaatgtggaagatcacccgcgcagcttaagaggtcagcagaagcggaagaaacaaacgactactcatagcgacaacagagcaaatggttttcgcaaaaatttgcgtgccgatcagaggagggcaaaacattttaaaaaggggaaaaacgagttggaaatgtggcaaggggggaaaatggtggtgatcaaagtgctgatcaagcccagaaattgggagaagggcaagataacgatatgctgctgattaggaaagaatgaaatgcgataatgttatgaagttattcaaaaaatcatcgaactaaaaaattgtctttaactttgcttaaaaacaaccaaatttataatttttgatgtcattccatagcctaaagtgttttctattagcctacaaaatttttaaaaaacaatttaataagttattattaaaaagttatggcgaacgttgctcgaaaatctagtttttgagtacttctgctgattataacttttttgaaagaatacttcttccttacaaaagtcaacaaaatctttaaagagtttgcaggctaatagagaacactttgagctatgaat

SEQ ID NO: 22495 - DNA, 1472 bp, Heterodera glycines
gcaaaacttgaaaatatttgtcgatttattgcctattttccatccatgcttgtgatgaggaaatatatataaagatagactttgtataagtatgtattatcatggaagtcgtcagaataatatcaaaagacttcgtataaacaatattgcaataatttaagttcgttctatttttcagtcaacaacacgcccgagagagattttgatacatcaaagacaacctaaaatacaccgcggtgagagccctagcgaacgaaggctggactataaaattgcacaacaaatatacatactgttcgagttatgttttatacgagtcagatatgagtttttcctatggcaaggttgtgaaattcctcccaaaaactttcttacggaaaataagcagcaaattttaataaaaataaatacttttcaattcatgcaatgaatttcctgaatctataaattgatccactagaaaagtgttagtagaaaataaaaaataattggagcccatattttcgtcataaattgagtcccgaaagataaatagcatggcaaaacttgaaaatatttgtcgatttattgcctattttccatccatgtttgggatgaggaaatatataaaaagataaactttgtataagtatttattatcatggaagtcgtcagaataatatcaaaagacttcgtataaacaatattgcaataatttaagttcgttttatttttcagtcaacaacacggccgagagaaattttgatacatcaaagacaacctaaaatacaccgcggtgagagccctagcgaaaggctggactataaaattgcacaacaaatatacctactgttcgagttatgttttatacgagtcagatatgagtttttcctatggcaaggttgtgaaattcctcccaaaaactttcttacggaaaataagcagcaaattttaataaaaataaatacttttcaattcatgcaatgaatttcctgaatctataaattgatccactagaaaagtgttagtagaaaataaaaaataattggagcccatattttcgtcataaattgagtcccgaaagataaatagcatggcaaaacttgaaaatatttgtcgatttattgcctattttccatccatgtttgggatgaggaaatatataaaaagataaactttgtataagtatttattatcatggaagtcgtcagaataatatcaaaagacttcgtataaacaatattgcaataatttaagttcgttttatttttcagtcaacaacacggccgagagaaattttgatacatcaaaagacacacctaaaatacaccgcggtgagagccctagcggaaggctggactataaaattgcacaacaaatatacctactgttcgagttatgttttatacgagtcagatatgagtttttcctatggcaaggttgtgaaaattctcccaaaactttcttacggaaataagcagaaatttaataaa

SEQ ID NO: 22496 - DNA, 3326 bp, Heterodera glycines
atgtacagtactacgttcccgtcgttttacttcgcgctctctggtttaagaaaaatgtagtctataaattttggaattttatatatttattagacccaatcttaaatttcaaaattatatttaaaattaaagaattgattaattaccgtttcacaggcatacgacaaggcgatggcaaagcaatcgagatcagttgaagcaaatgaaaagttggagattttgaatcgaaatttacaaatttgggccagttaatgaaaatttctgcaacaaaaccaaaaggggcaagtgtatcacgaaacattaaagcaaacttattccaaaaaaataataccgtaaaaattatttgaaagtcaaggacattcgggatgatttggtaaatttttatatttcaaaattaccataataattatttcgagagttatggtctttgggctgacatggataaattttgttgcatttgttgcttattcttgttaaacttattaattgttgctgattttttaatactttataaatttgttgtttttgttactcattacagtaaattcaattttgagaattggttgtacatttttgtggaaattgtaaaaactcacaagtgattgataattaaataatacgcttttaacctaggcctgcagtttaaagaaatttcgagcgaaaacacttcaaaaaaacatggatctcaaaaaaatttgtggaaatgtggatattttgtaaattgcattaaatcttatttttcattttattacctatattcgcttagagcattttggcattttttggttcatgggatgccgataggcacaaagtatctttttttaattgaggtgatttataaatacattttgataaaaaacaacatctttgtaaggttttagatgaaatcgttttccaatggaatacttgaattgattgaatttttcgtacccagttcaattgaattttggaattcggcggtgccaaaaggacaatcgaaaaaagattttaaaactttggactgttttttaacagattttgactaaaaatgttaaattttattgaagatattaaaaaaaaaaaaactaaattcgggttttctaattttgattttttctataaagctagtaattagtttcttgtatttataaccaaatactgtttttttaaaaatcttatgcgtaaactgggatttttatattcttacttatttttttctacgggttagttatggcgagagcccaaaaaactttttgaacaatttatgatttaaagcgacttataaaaacatttaaactgcccgaatataaaactgcatgtgccatttcattagcaaacttcagtttgaatcatttatataataaatggaaggcaaatgataaaataattttgaggtgtgatcaatgatcatgttgaaaaatgagaaatgatgatcattttgtaaaaatgagcaatgaaaaattgtttcgccctgcatcgcaattacataaataggaaatttttcgccgctattcgctttgtgctgtccttcctggtgcccgttcgccgtgtccttcatttcgttaaattaaaaaaaaaatcattatgtgcagttgtcgaaaaccgaaaaagtcattttctcccgaggcatttaaattcaggaaattggtgaaaaacatttttgttggagcaaaaaaagcctttgttcctcagttggtgcccccctcacctcccccccaattttttcctctcgtatatttttctggatatggactacgatggttgctgctcgtttacctgggatgtcccatgatttttccacatccctcgtgatctcaacttaataaggcattagggataatcaagttgaacaagttcacgaattttatcacccaccgagtgccttgtcaaaatagctgaacgtaagcggcactctgtccaaaatggcctgtgcgccagcacggttcaccgttgcgagaatttctttaaaaggaaaaaaatacgcttttttcaacaagtgcattacaattccaaaaattttccgcaccgcctgacttgtcgttttgtttttgaaaaaaaattatgaaaaacattttttacggttttgggaaggggcaatggtaatttgttaattaagaattcaggtaatctttttccactcgcatacaaaaattagatgttttgccaaattttatatattttcagtataaattctaattatgggcccaacttacgcgtcgcagagaagccaaaggagtcttgggacagcttgttgagttgatcatcgttcaatgcaatctttccgcttgtaaagtgcctgtaaaagatgatgaatgccaatgagcataacaattaattttaataattattcccaggggtttttggcaaaagcgttaaaaaaattaattcaaattataatttttatagaataaacctggatttttggacttctttctcttacaattaggtctatcgttaataaaatatccatttttaaatatgaatttttaactttgtttagttttttttattttcccgcccagcagaaaacagggcacaactgtccgggtccttttcagtcgccaaatgaatgtttcaggtgccaagacaaaattataaataataaaatcgaaaaatatcaagaatcagcaataattttcaaattttgtatgaatccgtaagtaaatcctaaaaaaacattttgttctgaaagtgttaagccatttactcctcaacgaccccagaaatatgttttaatatttttttactcaatattccatcctccctttacaaattcctttctgaaggaaatccctactcgaaaaggcgacggcgtctcggttcaagtggtagtggaatctccattttcctgcacaatgactcgtcgatgttggcgaacacctccacagctcttttcctgtcgtttgacgtgccaatgaagaggaacccctttttggcttttgcgtcgtcaatggctgcgctaagtcggatgggcgacagcttctcaacgtctacaatcagcaaaacactgggacgggcaagagaggcgcgctctaacaaaaattaaatgaaaattatgtaatggcaaaaggaattttttagaattaaaaaaaatcaagattttaaaattaatcaaaagaaattctaggttttgttttttgatttcgtttattttcttggatgaattggagacaatttggtaattctgtagtttgcccctcctttttgaaaaagaattttcaaaaattcttttgccctaaaagcaagtttccacaggttttttgggtcgctgaacacgaatccggcatccattccggccaatttcggatcccggacccgaattcgaacaaagtcgaaaattcaaattt

SEQ ID NO: 22497 - DNA, 1808 bp, Heterodera glycines
gaaattcagacaaagagggataagaatcccgagactaatcccagaatcgagaccgagagtttcgagcaagggttccagggttttagtgccaaaaattgcacgcgattcgagaccgatgaattgatccctagtctcgaaaagtaagaccaaatgaccaaaatcctgagtcaagaccgagagtctcgagcaacggcgccattttttggtgatgagttatcatttgtccaccctccctggcgccaacaattatcaaaatgaatcggcatagacagtgcgggaaaggcggaggttaattttggatccggcttttggcattagccgcagccttcattaatctcgcctgccccatccacttaatgtgtgggtgggggggggggcggatttcatttctcccggcgccaaatcttttatgattattttggtccaccctccaaacaattagtcaaatgatccctcctccctcgttccaggtacaaatatatgacttaagcgcatttggctaatacatactgccatataaatactggggatggatggcaatatgtgtaatgatttacatccctccatgtgtcgtgccgttcttatatgtatttactgtcatttagcgttaaaaaaatgccaaaaattggggaggcgccggcgaccttttgttaggcacccaggcattaaccactaatttgccaaactaagcaatttgaatgagtacataatatgcgtacctatttattttacgattgggcttgccacattctgacactccgttacggtatataaattctaatttacggtaggttttgccacaattttggcactccgttacagtatataaaggttttgccacaattttagccctatgttacgatatataagtaggttttgccataattttggcactccattacggtatataaatttgaatttacggtagattttgacacatttttacattccattacggtatattaatttgaatcaattcacttttaattaatttttgttgactttgattttcacctatttttggcacattaaaaatggtgggaaaccatcatgtgaatgtgtaaattaaattcatatgtataatgagaaaatttttgatatttttagaagataaaaaagcccaaaaatagtttgagagagtaaaaattagggaaaaatgggtgggaaaatcggtaattttgacaatttttcattgaagtttttggtttgtgaaaacgacgtcagcttttaatggggttttatttttgaaattaaaaaaaatcctaatgacacaatgacaaattttaaattttttcatttttctccattttatgcggtttttcatttttttaaaattttctgtccgaaaaattcttaaatttctgcattttttttagccttagaaaggctgacaaatcatacatttttaatttttctcaaccacgcacgccgcttcccccaattgcttccatggctcagtggtcatttgtcatggccaagcgtgggtttgactcccaccgggcgccgttgtgtccgaaaatttcccaaattccttcattttttagctttaataaggtttgacaagaactttaacaccttccaattttcagttttcttataaaatctcacaatcttttttttaagccatgccacttcccccaaatgcttccatggctcagtggtcatttgtcatggccaagcgtgggtttgactcccaccgggcgccgttgcccaattcaacacactcattttttgcacttttacgccatttcatccccaaaataccacgtacataatatacaagtttcaaccaaaagcaaccagcttaa

SEQ ID NO: 22498 - DNA, 1444 bp, Heterodera glycines
gagcaaaagggaagagaaatgaaccgaagaaataaaatctttcttggaatattaattatacttttattaaaaagaaaacgatattggccaaattatcatttaaatttcgaattcttttctctgatttcttttgccctctcacttttcccttccctttcccctaattatttttttattttttataattttccattttatttctttttcctttctttttctcttttctctctttcctttccatttcaccaattccttgcgtttacaattaaaaaagaaaagaaaattacacaaattttctgaagaatgggcgaattggccttcatcagcgtattgccaccacttgcggctggcactaattagtgactaatgagtgatgtaatgaaaaaatttgtttgttttttgtatcgaaaaataaaagaaaacgcaaaggaagagagaaaaaaaagagacaaattgcttctcttttccgcgtataaagcggagggctcaccgacgaaaacccaaaaaattatgggaccaccgaggaaacggtgcggaagtttgaaaaagcaaaggaaagtgaaatatggcccggaaatcccttttatttgctcatttgggatctttcatagaaaagtccatttgtaaaggatgacacagaccaacgaccgaaattgatcagagatcgatgcaattagagaaagttagcggggggggggcaatcggtgcgtttagtgccccgcaaagattcggcccattgaatgtgtcacgccctttcgaccacagaaaagagaaaaggaaaagggaaggccaattggacggtttaccacttcggaggcaccgcaggcgaaacttacaaatgtcacttcacaacgccaatgatcagaaggagagggagaaaccattttaacagcagagaaaaagagaaagaaagaaaaagttagtcactgaggaaatcgtaaattaaaatggggggcaattgggggaatcacttcgcctcccctcccattttaaatgccatttaacaaaattattaaaacaattgcttaccatttacaataacccaaatgcattttgaattttaaacctttcatacaaattttgtgctaattggcgacgaatggtgtcatttctttcagtgaattttcctttcatttccctcatttgctttcttttacacttttttctccaattgccttaattgaattgttcacaatttgtccattgttttgtcagtttattgcttgcttaatgtttaattgggctgactatgaacggaaagaaaacgcattacatctctctcgaagtcaaaattaaatgactttagagattttctgcaattaacgcggatcgaaatttattttcccattggtgtctctgatgattttccatctttcccttccctctgttttcgtttagtgtaattgtctttaatttggcgcaaaatttgctctgggcaaccccc

SEQ ID NO: 22499 - DNA, 1240 bp, Heterodera glycines
  unsure (1)..(1240): unsure at all n locations
aaaaaaaattttttaaataattttaaatttttttaaatcctataatctttaaacatttaaaacatncatttataaaacaattataaccaaatcatcaattgattgagaccggttaaacagcaaattgtgatgaagaaacaaaagttttgcaagattttctggtaataaactctttcgcaagtcatctgaaattagaccggccgttgagaaaagccttaacttatcggaccaatcctttgccagtggcgcctatagcctcagcgttttaactttacatttaaatgttatcccgttttaaattcgatactaaaaattattgaataatttttcaaatatgccatgttaaggacattctgtggtttctctcttccagttacggtaaccgtatcccagcactgtttggccaacaattgctgcccttttaccgtatgatgcccggctgggccatcgttctgtgtttttattttgcaacaacagtcgcttaccaagcctcgaacattgccacctttctcattctgatgaatcgtttcactgcaattgcatttccactcaaacagaaaagggttttttttaattattaaaatattaattaatattttaatttcatccattagatttgggaaagtcaatcatttttgatgatattggcactgattgtgttccttgtgccattgttaagctgtttgccaattatgaaaatgaacgtcactccaatgccctatgaaagggaaagcgacggatttttcatccaagaaaatgtttcggtatgaaggaaaagcatcggaaaacgcaataatcgagcagagaaatatttagataaaaattttgcatatttccattaaaaaaactattcaagctaaaatatgaaagtcaaaaataagactaatctttggcctagacttcggcttacacataacctgagcttatgttagttttagctagccttagtctttgcttagaccgtcctagctaagtcgactgaaggccaagtaaaggcctctggactttggctaaagcataagctaggcttatgccgttagctcagaccgttttaggtccgttgtttagatctatggccactgtacattaaactgacatgcgatttgtcaacattttccgctttttaggatattcgttcctttcctatgctataaagtgaaatcgcttacttctgtcattttcctgctcttgtcgcttttggccatttgtcaacctaattggctataaaaaagcaaaaaag

SEQ ID NO: 22500 - DNA, 1819 bp, Heterodera glycines
aaaatagccattgaaaaggacaaaagactgaccaacattcactcggttaatggagtaaacatgggccaaggcgtgacgtggactatttttgctgcccaattccaattcgatgaaacgcggagaacgaagtgtcccatctatggcaccctgaacaagtttggtagccgccgaagagccaatgctcaattccaaatcgtttgaagagtcagcggcaacaccagcgacgaaaaacgaaaggcacagaatagaaaaggaggttatcggcaacagtacaaaataattaaatggggcaaccataatgcctatgtataaggaagagtgatgtgcgaaatataccaaagatgtagtaaatcataccaaaccagtattgtatttagttgaggtttaaatttttcctaaaaatgcttacttttggcgtgccttttatcttttttggtttttttaaaaaaacattttacctcgcctagatttttttttattcgcctctggattttctctgcgagacatttcgccgcctgcagaaaaatacgtttttcgccacaacaattgaaaaccgtgaaaattaaacttagttacggtaaatgtttttgagtaatacacaactaagttatttaccagccgaaatttttgaaccggatcaaaatccaaattaaaaatgtttggattttctaacactcgactacaacggccaataattggggagaaactaatcaaaacacaaccaaaagagaaaatctattaaaaaacaggccagaattgcacataacattgtttcatttaaacattatatccacaattagacagcataatggataatcgaggaattcgtcatcgtctaatgttctaaaatcccactcgttggtcagttaatcctcctccggaattgagtcgatgcccatcaaattgtattcgtagccggtcaactctctgtcgcggataaggagagccgactgctcatgtcctttcagaactcgatgatgtttgcagccattcgtcccataccaatgcagtgggtaatagtcgctggtacaaaatgcggggatactaacggccgcgataatcatgggcaatctctcgtaccacatttgaagcaatggaattaatgcctttctcaattaaccaaatttaaaaatgtgtaaaaagttgaaactttgtatgtcataacgaaataaacgttcaatatataaaagaaacgaaatgaaataaaacgatttattcagcataaacagcactcatctataaagcaaaaatgcacaaaactttcgcacagtttcggaattaagtccttcaatggctttcagattttcatgcattggtttggtcttgtagaatggtaaacctaaaatttaagttacttgtaaatatgttctccaggcttcttttgtgtttcttcacctggttttatccaaaccatgtttttcacgccttttcggtttgccaaatttgctgtgttcaattgcacaattgcaaaatccattttcccatccactaactgaacacctttgaccacaattggttttttcagcactttgtcttctttgtccaagaaggcagaatctgtcgacaatttttgcgcctgtgccaatgcagcaccaaaacagtgacaaatcacattggccatattctgttctcttaaagaaattcctttagatatccaaaaaacaacttatatttttagtttgtcttaaagattcacatacgccgtccatgggtatttttggtcctgttcacggccccagaacaatgtgtgcacgttcaaatttggacatgaaagtcggggcagcagaggagaatcgttgtaaacattcgttttttccaa

SEQ ID NO: 22501 - DNA, 1032 bp, Heterodera glycines
  unsure (1)..(1032): unsure at all n locations
cggttcgacagtccttaggcacggggcaatttgcctcccaacttgggcgatgttctgatttgcagcttcatcaatgcgcatgaagatggaattctcgtcgtagcccaactcatttgaggcgatgaaactgaacacgcccgccaacgaagggtcaattcgcataaataaaagcagcaccgtccatatttcgccatttttgtcgattaaaaaccgatatttttggctgtcttccgtcagatgatgattgttgtgataaattgacatctattgagattttcggcttttactgggctaacacaaaagatttattagtaagcgaactttgggttcaagcgaagagcgcaacagtaaatttaacacaactctttcaccatttttgacatgcagatcattcaaggtgttaataaaacgcggcggatattgcgtatctaaaagccgacatttttttttgttcaataagggataattaaggttattaggttaattactagttaaagcagacgaagaggcattaacaaactgtggagaaatgcctttctggccaaacagtgccgaagatgattcgggaaattgaaaatgaacgcgctttttcattgttttcatttgcccttccgatgattccgaaagaagttgagaaacaaaaagcggatcaaaatcaaaagacttcttatgatcaggattttgatcagcagtttgtttaaaacaaacagagatgggcgagagcaaaatgctattgatttctctctcaagcaaaaagacctcgatagcttcatcggaagagaactttttaacttccaaatattcacattcatgtgccacagcttcaatctcatcagatattttagctaccttttctttctcctctttncactttttcatcccttccggctttaactcctttttgccgttttcttccgactcttttttgaccattgttacctccttctcttgtttatcttcgtcttcctcctctttaggggttttctttcctttctgctttaactccttttgcccttttcttccgactctttt

SEQ ID NO: 22502 - DNA, 1009 bp, Heterodera glycines
cccccctcccctcccctcacccgcacttaagagccacaaaatccctttgtatttccgaagcgtttttgggtttgtttgtttgcacattaaaagcgcataaaacacaaggagctaacaatgagaagagagaactacggagatgattttgttgaaacttaatcatcattaagccattttcccaattcgaatgttacttaatctaattaattgggtgtttgttgcccatgtccccaccttcttctgcctctgcaatcacttcgtcttcaagaaggcgtgagatcgcatccatctttggctgtatacggactctttcgacgatgttctgacaaagatttataaattattttttgcttttttccaaaaacgaaatcccgggaatgtccgtgactaaaaacacaatttgcgatgtttggttttgaaaactcagaagtcggtctgtcgtcgtttcacctgatatttgggtggaaccacagttgagagaattgcgccggtgtcctcctccttttcgaagtccacaatttccacgtcaacgtccatgtagtcctcctcaataagcgcaactgacgactcactctccgcgtactcaatgctttccagaccgatgatcccatccgtgcttgacgtttcctggcccgcctcaatgtcaatgtccacattaaggtattgcgtacctgtgaaagttccatggaattagggtgacaaaattagaactgttaaatagacatttagtagggcatacccaaaggactccgattgtgtgagcagttcatgtccatcgaagccttcgtaaattccaacgagtccattgtgctgctccttttcttgcgcacaattttcttccgcttcagccttctccttggctgttcctcctctagaatgatctgcggtgtgcttgtttctggtccaagttcagaagacacacaggcgaaatcggcccattggaaagtcgcttcaataaattcgcattcgctcccatgcaaaatttcctcctccacatcaacctcattaa

SEQ ID NO: 22503 - DNA, 1047 bp, Heterodera glycines
cgattttttcaccgaatttcctgtcgatgatagtgccatggcgtcggatggacaagcgatggccaaatggctgttcactcccctcccggacgatgtgccaaaggtgttcaactgcgggttgaaagagtatgacgagagttggccgttgaaaattgaggcgttcaaagcggtaattaccactaactaattaattaattgacaatatgacgtttcgccaccaaagctaaaaccctcagtttttgtctttttacaacaaattaaaaaaatggtcttcaaccgtaaaaactcgaacgccagcttcgaggttttaattcagtgaaaatagttatcaaaattgggtttcctgaccctgaaaatccttaaaaacgactacctgaaaaaattggaattttggctcacaatcaatacttttaacaaaatttaagctttaaaattatattagaaatatacatacattttttgtttgctgggaattttaaaatttcatttttgtttatatatttaaagttagagacccagcagttggtacgccacaaaaaaattgttttaaagtcgtataaaaaatgtttcaaggtgtttcgagtgcgctgattatgaatccgacctccatttcgaccaattcagagttccggattcaaactcgaacatttggtcgaaaagacaaaaattatcagttttttaccaatatgattaacaatatagagcaattaattttcgcatggacaaaattttttggtactaatgcagtttgggtcccatatttttgtcaaattttttcaaattttttttttgtcagaattgcttttagattaatggaaacgctaaatcgacgtggcagaagttcaaacatgggtaatactgaagtttatcccccccatttttcgaaaaaaataaaagttttaaaaaaagccatgtaaaacacatttccttggggttttctgggtcgctgatcacgaatctggcattttgatgtttcaatggtttttgactggatttagcttgttttggtcaattttggaacaaaagtgagaattttgaaatttttta

SEQ ID NO: 22504 - DNA, 1167 bp, Heterodera glycines
atggaggcaccagggccagtgaagctggcggcggcactttacaaaagtcaagcggcggcaaaccgcccacaaaattatcgccaccgccgtcgccacgcgacagcggcgggcgacagtgggacgacgactacgacagtcgacgggggcggcggcggcggtctgtggcgaccctttcatgcctgctaatgaaggtcgtccgtcggtcgccaacaaattagtgtctgtcgtcgtcgccggcggccggtcacgcccctgggggcacaaacagcagcaacaaataaaaagcttttaaacatgttaatcttttgaatgataacaaaaatgttggatttggatgagaaagaaaaaaagttatagtcaaaaagctcttaacatgctatgaagaagattttaattggttttcctcatccgtcgttgtccaattgtgcccgatttaagaaaaagcagaacattaatgaattgggcgaacgatggaaccaaattgacattttcatagcaaacgacgggtcggggtcacttcgccgcggccatctcgccgcgagaaactggccgccgggccaacactgcggcttagttatggcgagagaagcccaaaaatagcattttctcctaacaatttttgatttagagcgacaaataaaaacataaaaacacatgttttggcacataaaaacatatcgcacatatttgttattactatttaaggtcatgggaaaaccaataaaatcagaaataaattaaatataaaataaaataaaattcatccaaaagtaattagttactgattagcagggatatgcaaaatgcgaaatacgaaaaatgttgaaaagcataaaattatagcaaatgcttttccatcggaactgacaattcccatttcaattgcaccattctgcccaattactgctctaattttaatttcgttcgccaatgtccatttgcgcgttttgaaatgttcctcaacgaagcagtcaaatcggcgactgatcagcgcaatttcgaggccaagctgagagggcggcagaaaatcgaacacttccaaccaacaatcgccgcaaatgaagctaaaaaagcaaaatgaattagccatggacattcaaatttagattattacatcgcttttttccatttctctctccgcttccttcggattgtcgaacattttta

SEQ ID NO: 22505 - DNA, 1504 bp, Heterodera glycines
tgacttttttgcgtttttgtgactcttttcatgacttttacactttttaaggcaaaatttgacaatttgactttttctgatgaaaattccgaaaaataagtcaatctgacggaactgaaatttcttataccattaggactgaaatggcgatactgaaaaataaataaaatctggcgatgtaacacttttgaatattttttccgttaaaattagtcgtttttaaattaatttcttcgaaaaatgtttaaaacggcttttggttttaattacatttggcaattttcaggacttttttggatttatttggtgattttggcacttttatgtgagcttttggttattttttcatgacttctttctggcatttttatgactttttcgtgactttttggcaatttttcatgactttttaagtcgacttttttgttaaattcccatccctagtgatcataaattgctgatcatcaatgtccaaacaagtgttatgaaggcatatctttctagacgaaggcaccacttatcaaaatcagaacatcggaggatgtcgacatcgacatcacaactttgccaaacacaacggcattggcgacgcgagttgcggcggcctcaactccctggcatgggtagttatgacaacgcatttcgccgcctcacgtggacaggaacgtgttttttgtattttactttacactacttaaagattatttttatttttatgcacctgaatgatgagctttactactattttcagttttatttgttttataaataattttttctaacaactaaaaatgtcacttcataacaaatattgattttttaaataatctttgctaataaattattctcggcatttgactgtccagtgatatgctgatttaaggcgtaccttttttagggatttttgaattatatatataataataggtaaaattattaaataaatttttttttgtttattttttatatcaaatgcgtatccctgtaatgattacagtcgaatttgggagtttgacttttacttttgagtattcatgtccgtgaatggaagtgttgtcgagtgcttgagcgtttaaattaaaaatgcatttttattgataagttgaatttatttattgttttacaccggcaattgcgcacaatcagtcctgtcttccacgttgaatgagacagaaaattttgtcaccgtttcaattcgcaccaatggctgatttggcacgataaattaattgaattcaatttaaatttctttattttttaatatttttatcatatttttaaagtgaattgatctagccagtaaaaaataaaatctggcgatgtaacacttttgaatatttttttccgttaaaattagtcgtttttaaattactttcttcgaataatgtttaaaacggcttttgggtttaattacatttggcaattttcaggacttttttggatttatttggtgctttttttgcacttttatgtgagtttttggttattttttcatgacttcttt

SEQ ID NO: 22506 - DNA, 1140 bp, Heterodera glycines
ccccataaatgtttgagtaccccaaacgggacacttgaaaaaatcgattttttttgtttcataaatatttttttcagaaagtcatgcgcacccgtccgatctggcaagttaagcaacgattgctgactagccaaaaggttcggtgccgtgatgaaacgaaccagcactgcttaccccgcggcacccggcacggtcccccgaaggaatggatttaattaaattctctccttcggggatttttttccattaggtcgtccgttagcgttcgattgctctagtcaatttttcaaaatttttgttgaaatatttgtcgtgctctgaagggcgtgggagggggggggggcgaaggcccaccacgaggccgcgaagaggccgagtgagtaccttcggtgcaggaaaattattaaattttaaaattttttaattgctttttaaatatgccaaaaaatgtaggcttaacttttttagtgaaaattcgatcactcatattttttgctaattgagcagaagcgtaccaaactttgcagggatactccccggtaaaggactaacttacactgaaatgagcgccgagctagctggctcaaaaaaatttttcgaaaatctgagtctttcgtttttatttatttgcaaaattaattcataaatattttttcagaaagggttctgaaacgcaccaaattttatttacatgttagtttaggcactctgatgctttttctatcaataatggaggtgaataaaattttaattgctttttaactttgggaaaaagtttaggcttaactttttagtgaaagtttgatcactcatatttttttagtctaatctactcaaaacggttcagaattcaataaaaataacattcacggtgcgaaaaatggggtttgacaagtttattggggaaaaaaagactttacaaaataatacccctgggagaagggagtgggaaacatgatttcaaaattttcaattttttctagtctaatctactcaaaccggttcagaattcaataaaaataacattcacggtgcgaaaaatggggtttgaaaagtttattttgaaaaaaagactttacaaaataatacccctgggagaagggagtgggaaacatgatttcaaaattttcaattttttct

SEQ ID NO: 22507 - DNA, 2289 bp, Heterodera glycines
cctcattctccacacgaccatcccccccccgtaaataatcccattcgtcccgtcatttagcttcacaattgcccctgctgctgttctcgtcgtgcttctctcctttttgctttaacatcatttgtccttcctttctttacccccccccccttttcgattacttttgtccctttttcgcttcctttgccaatgatgaacagttccaatgttctgtcctcgttacgtcttcacaatcccttccaaaatgtttctcaagttcactcttccccaggtcagtctgccttttcgcttttcgtccatcgcttctcctcaaatcgaactctcttttctcagtggacttcaacaaaatgctgctgttcaacaacggttcttcgtctgtcccttttgcgagtgttccccgacagtcgccgagcccggaatgtccgaatgtcggacaaatgggccgaagggtcagcagagggggggggggtaattagaaacaaaaagaaaagcccaattaattgctgataataattaattaattagtcacttccctcgcttttgttgtacatcttatacatatttcacgaaatgtccttcgctcactcatttttttgaattatttaccaccaaatttctttcggcgccccccccccccccttcacaaatcagtgactcattaataaaacacaataacctttctttctttctttatccctttctttgttcgggggagggggcaaagtcaaatttgaaatcatttgaattgcatttttaggtgatgggactgaaatggccaaaacaaaacaaaaaattaattggccaatgccttttaaaaaatcagcaaaaattgagaagtgaaaaattgaaggttatttggctaaaagataatcgagaaaaaacaaaagaggacaaattcagctaaagaaaccgatgatggaaaagaaacggagggcgcggatcaacgcgtgttttgatcaattgaaggaagtgctgctgcactcggacatgcagcagaagtgaggggggagcaaatggggacgaattggggagaaaatggacaatcggagaaaaagacatttaaaaatgggaaaagtttggcatggaattgacggggaaaaagtccatcagagaagggataagcaaatgataatctgtgataggaccggttgagaatactttttgatttgactgtttgagcattttcagcagcaaattggaaaaagcggacattttggagaaaacggtgaccttcgttcggctgctccagcaacagaacgttcatctgcagcagcagaacgcgcgactccaccaacagctgcagcagctgctccactgctccgagcctacggcgattgccttacgcgacggagttcaaaaaggggtccgtccgtaattggccaattaattaattaatcccttttccgttggccaacagttagcgaatttgatcatatgctcccattttgtttcagatttctctctctgtaatggccaccatcgacttgttttccggcttcccgtttttcactcccgaactttgccatagactgaaggaggaggtgccgaaaaaagtggcaacagttgcagtggacattttcagcccaacgccaactccgacattggcactgaacagtgccattcaacaacaacaaaacagtgcgtttatgccgtcctcaaaaagtgtttaagcattgactgatcgttctgaccactgactaataagtccaaatttaaaatgagtaattcagcaagcgctttggcgccatcgcctgtccgcttcgtgttcacttctgcgccatcctccgtcccctcctcctcagtgccatttccgatggttcgtcctccgctgactttgccgaattgcttatggccttttatgaattgccaagcatttggatggacagccgaagcagaaggacagaagcaaaaaagtgaagagaaaaagcattggggagaagaggaggaaaagggtaaaagagggagcgaaagaaatgcaaaacgaataaaatttaggacaaaaagtgaggggggagagaaaaactgatcagagtgccgggaggactgatcggcgggaagaagcatctgagacggagcccggcacaccagacaacccgggggaggagattgaggtggacgtggagagtgttgagaagacaagtgacgaaactcagagagagggagccaaggaggagcaagacagtggggtcagttggaaatgagaggggactgatcaaaattggggagaaaagggaacgaggagactgatcaaaaatggggaggggagaggagggaggggactgatcaaaa

SEQ ID NO: 22508 - DNA, 1029 bp, Heterodera glycines
tagaaatgccaatttattgcacttttgataataaaaacagaaaatggaaatggcctcgaaaaggaccacataaagtaattgggagaatatacacaataaacccaaaaaacaaagaattatattaccttcgttatttattactgaataaacacgcaaaaagttttaatgatttaaaagttgttaatggctttaaatataacacgtatgcagaagcatgtttagccttaggcttaacacgagatgatttagaatgggacaaatgcttaaatgaagcaagtcaattcaaatttcctaaaggccttcgttcacttttcgcaaatattcttataaattgtgagccgaaaaacccaaaattactttgggaaaagtataaagacgaattaagttatgatcttaaaaaattgtatacgcaaaatgatgcttatcaaatggctttattattaattgaacagaatctttctaaccatgaaaaaagtttaaaagattttgaaggcatgccaaaaataaatgaaactataaaaaacatttcagagtatcaaattattaacccaaaagatgaattaaaccttgccttaaacaaattttcattaatgaataaggaacaaaaagaaatatttgaaaatataaaaacaatttttgaacaccccacggaaaatcaaaccaaatgtttttacattgatggtccaggagggacaggaaaatcttttgtccaaaccgcaatttttcatttggcaagaggttttaataaaaaagttacaaatatggcatttagtggaattgcagctacagtgttaaaaaatggtagaactgttcataatcgtttcaaattaccgttagatttaaatggtaattcttcatcattaattgaaaataattctaaagaagcaaacgaaattagagaaacagatgtttttattctcgatgaagcaccaatggcaccaaaatatgtaatttgaataatcgataaaaaattaaaggaaatacataaaaacgattttcttttttgcggaaaataatgattttaagtgg

SEQ ID NO: 22509 - DNA, 327 bp, Heterodera glycines
tttatttttaattttattagctttttttttaaatttggccaaatgttttattgttagccgtcggaataccggtttccgattgcctatttttttgaaggcatcacacatatccctgctgccgtgaggcattcgaatttccgatcaaaaaattcgaaaacttgctgaaattgggttcgagaattcaaaaaattgacataaatcagaggcttctggcttctgagttttggttttgtattttaattttattagcagcggtattttttttaattttggcgaactgtttttcgccacttttcaaattttcggccaaatggccagcaacggccc

SEQ ID NO: 22510 - DNA, 1681 bp, Heterodera glycines
tggactaaaaacccataataattttttaaaaattcaaacttcttcgccaaccaattgtcaatttgaatcgcttcacagtctatgtagcgaagctcccaaagcgcgaagcgcttttcccaggcacagatccgacggttcacgcacccgctagttaaccattttatacataattggtgaaagacatgtcatcttatgctaacggaggtagagcaagattttatctacgaaacttgaatttattaagaaattatggtataattatttagatgcctaataaaccaaaatatttgaaaaacatgtaaataagtaaacaaataaaaatgttaaaaatactaactaaagtaatataatgtttaggagaaaagaattttgaacaatttatgcaaatatatatttaaaatttaatatagaattatttttaatttttaatttgtatatcgaaaacatacattaccaaattgccctttgaatgtgagtcaacaacttatacccgcttatgggcacttcaattttgatttgataattgctactataaaatgcacaatttccttaagagggaagttgctgtaagacttttttgttcagcataaaaaatattgttgtgcaaaaaattgttcgtttaaattcaatcaggcaaaagagcaataattttgcacgatttagcatttgtccataaacttttgacaatgactgtatgcccaattaactattatctatattatataaatagaattaaaactaaaataatatcagcaaagatttaaatgtatatgaattgccgaaaaataaacatttcaatcaaaaaattgtttttacatttaacaaaataaaatttaatttgtcattatataatgcaggcaagaatcaaaatataatattataaaatgtgaataattaaaatttaaaaaataaccaatattactaaagtaaaaaagatactatttagtaataaatattttatattatatacaaaaatacgaaatgaatgatattataaaaaaatcttgcttttttcaaatactattgttaactaacgaataataatatataataatttaaaaaatgatctttaaattttttataaaacaatttaggaaatatattaaacaaaattaactaaatgaaacaaaaattataaaagatcatcgcattataattgcgtcaataaattaattgattttgtcatttttttatgcatatttattcttctattaagacaaaaaacttaattaataaataagagtgctaactcaatcggattcctccaaagaaccaagagattgtaaaaaaaagtcataacgtttagattatttaaatataaagaattataaaataaataaataaaatttgacaagcgaaaatacaataaatcaacaatttaaatttgatagatttatgtgtgaatttagagattgtttattcaaattctttttaaaggaatattctaaaatattttttattgtacatatttttgggtttacttagaagaaaaataagaagaaagaattgctaaatggtttaattaatttaatatataacttaatattcccttaaataaaaaaatttccacgttaaattactcctaaaaaatatttattacgtttagttttttgtccaataaatttctacaaattacaatcctccgaaacaaataactgagtacataaaatgagttgtaacc

SEQ ID NO: 22511 - DNA, 1100 bp, Heterodera glycines
  unsure (1)..(1100): unsure at all n locations
ttaattccatttttaaatgaattgatgaattttntttgcaatattgaccacaacatcagtgaacaatttatagcaaaaatttgtccttgaacgtctgaaagccacatttcatttaaaacataaatatgcgcatttttaaataatggacacaaaataattgagttgaaaactgatcacaaattgccattgggttcataaatacgattcatacaaacgcatttccaaaacacgattgagctccagagatttattattatttttataaaaaacagatattcagtaattaattccatgttgaaatgaatgggtgaattattttaatattcaccgcaacatcagtgaactgtttatagaaaaaatttgtccttgaaagtctgaaagccattattcatttaagccaaaactatggacatcttttaattaagagcacacaataattgaaatgaaaacaaagcacaaattgctgtgggttgcataaattatgattcagacaaattcattcccaacgagattgagcttaagtgatttatcaataatttttataaacggtatacattctgtaattaattccatttttaaatgaattgatgaatttttttgaaaattgaccacaacatcagtgaacaatttatagcaaaaatttgtccctgaacgtctgaaagccacatttcatttaaaacataaatatgcgcatttttaaataatggacacaaaataattgagttgaaaactgatcacaaattgccattgggttcataaatacgattcatacaaacgcatttccaaaacacgtttgagctctagagatttttcattatttttataaaaaacagatattcagtaattaattccatgttgaaatgaatgggtgaattattttaatattcaccgcaacatcagtgaactgtttatagaaaaaatttgtccttgaaagtctgaaaaccataattcatttaagccaaaactatggacatcttttaattaagagcacaaaataattgaaatgaaaacaaagcacaaattgctgtgggttgcataaattatgattcagacaaattcattcccaacgagattgagcttaagtgatttatcaataattt

SEQ ID NO: 22512 - DNA, 1317 bp, Heterodera glycines
acggcgcgggtacccctccctacgcctccaaaatcccgcgcctattgaaggggtgttttcctttgaagatgccgcccgcccacaaacccgcgcctattgactgggtgttttcctttgaagatgccgccttagtattattaccgcaaaatcccgcgcctattgaatcctgagcctatgggatgttctttggactctgccgccttgtggattttaatttacccaaatccgtgcgggtgttttttcaccgcagcgacgcgccgcgggaaggtaatcaatcatccacctgtcaccaaaagtgacagctaatgaatttcaatttttcttttgccaattaaattcaaaatcccttatcttttgaaactttaggggtaatttctaaaatcctgagattttttatgatgatttttctgatttttgaaaatttgcatttcctctccgccccgccgatttatcgcctagcaaaattaatcgataattaataaatacacaacagaaccataaattgtgggaccgtcccaataaattaaaaattttttatcgtctctttaaattcttttgagccattttcaagtagggcagcatataatgagaattgtttttagttcccgtaattacgactttaccggtccagaaaattaacgctgtcatgcttttactccgcttgaaatttaaaccgcaaaatatttccggttcataaaatgcacgacgattttttctaaattcgtttagttcaatttcatgtccgaatttaaaggtcgaaacaatattttcaaccgtgtgtccggtgtaagaagcccccggacaccccgagcccttaattatttctatgacatttatatagcattttcacagtctatcagacttttcgtccccagacatatcatttttccggatccccataatagtgcggtggctttgatcgggcgtgtacatttgataactgcggcattgaattttctagggttatacttaaattcgcattcggtgatcgtcagagagtttagtttaattccggtaccgagattagcgagagcaattatatttacgattatcggtttttgcatttttgatacaatgtaccaatcaaatggtcctttcactccctttatatacccctctataaatagcaaacaaaaataaaattaaattgaaaaatgaactgcccacataaaattaagtgttgtcattactgtccctgtcattacgagatttgtagcaggtgtaaaaagcacagtcttttgcatttcggtacatcattttttgataatttctggctatgccccaatgcgcgaaacatgttccctatgaaaatataaa

SEQ ID NO: 22513 - DNA, 2238 bp, Heterodera glycines
aatgccatcaaagtttactgctggaacaaatttgcaagaacaccaacaaatatcgtatccacaaatggcacaaccgtacggcatgggaatgccgtcgacaatggcatgccaaaattgggcgccaattgcttatcaccagccggaccattatcaccagcagcagtattatggtgaattttggcaccaccaacaaaaccctggaatttgtgccacaaacagcaatttgtcacaattaatttggccaacaacagcaatggcaccaacagtgccatcagcgtcaacaacaacattttctggccaaatgccaatggtgaagcagtgcaaacggcgtgccaccctcgcctcagttagcaccagtgccgtgccgtgaagggaacggccgaattttcggcacaaaatgccgtcagcaatgtgtgctattacaattatcccccaacaattagtgctaatgatgccttttgtgctgcacaatattattatccaccgccgccgcctaattatccaaatcagcaacagcagccaaacgcacaatcatcatcatcattagcatgtccaaattatcagcagaattaccattgcattgttcaaataataacaaaacatcatctaaatcatcattatgacatttgttggtcaaaattaagagaaaaataaattatatttaatacatatcagttggttttttataattaagtttaattaaaaagcaaaaagactatagaaaattttctatatatttttttcattggaattttatttttctattttttttctaaatttatatttgaattttttttaattttcgggggagggtggaagaaacggcgggacggggatgagctgctccaggaaatctcatgcagagccaattctccacaaatcaatgtgtgtctcgtggcatttttcatatacgaaaaattgaaaatgatcgtacaaatttccacagtattttccgcaaaatttggttgaaacaaaacaaaattaataatgcaaacataacacattcacaattttaaatacaacatggattttccaaattatttattatttttattgttcattcacccgtgccacaatggcaacgcaccgcggtgaaatggccgggtcaaacagacggaccaactcagcgccaccgatgccattctcgcgcaaaaagagcagccgatccaacagcaccagcgattcaagcggacattggagtgcaaattgcaatgcctgctggggacaaattgtattttttacgggtattttgggggcgacgaaatggggcagcccttgaaaattatatgtgtgtagtaattgagggttgtgtcggcagtcggaaaaattttaggcgatcagaattccctaaaaattttggcactcgatcggagctctgagcccgaaaatgttggaaattggcagtcggcatgtgacacatccctggatatatttctataattgccaaaaaacgaacagtaaatggctcgatgaagcgaactgctgggctgtacgtgtccatgatttggtccaatgtttgctcaaattcatccctctcctcctccacaatggcacttcgtcgcatcacttccgttctgaactcgtccaaattgttgttggccaacatgcatttgttcagctttcgtggcggtcgacgctgatgcatttggagaatgtctcctccaccattatgatcaactttttcacaattggtactgtttgaggaatggcgatggggtactgtaaacaaatacagtaaatagcgggcaccaaacattctttcaagcaaaattttgaaataaaattaaatttttttaaaggttcaatgttaatttatgaaaaagcaccatcattagctgatttggcttttgttgctgctgttttatgcatccgtaagcactccaccaatgcccggttcgaaaatgcttgacgatgtgccgtgtgctgctgctccgtgaatgccatccaacggaccagcgtcgcttggcacgccagccgaaggcccgggattggaaagtggttgtggccaaaagtgtgcaaaaaaaggtcgcgcatttgactgctgagcacccatcgctcaatggcttaatagcgacaggtatatgctaatttgtgtacggtacaactgtttgtacggtatacagtaaaatgtggtcaaataaaaatgaaaagccattccggaaataatgtttaaccctgctcagcaaagaaagacttattttatgaggaaatatggtactctgtccatttgtaagttgc

SEQ ID NO: 22514 - DNA, 1346 bp, Heterodera glycines
  unsure (1)..(1346): unsure at all n locations
caaataataaagtataaaatagtgcgatatatgtcaaagtattacaaaagaaaacaaaaagtcacgcaatgcaaaaccaaataaacccgaacgtttaggcatctcatcaacgaaaataagccgctgaagaggaacggaaccacacaaaaagaactcgggcggggggaggacaaaacgacggatagcgcatcatacataaaacgataacaatatttatggtttatcacctgtaaagaaaaaaaagagtattctccttacggtcgagaaagaaaggacggaaaatcctcatcaaattccttcacttcattcaataagcttttcacagcaaaagatgtaaatataaaaaagctcttttcattaatcattaaaccatatcttacacctctgagaacactacacatctatcccaatcactgcgaaatncanatacnantacccacccaacgaccaacccaaaacacacacaagcgctaaatggcgccacnnncnnnnncccccnncccccccccccncncccctcncttcnnctcccgtgcagccccctcctngcaaaaagaacccccaacaaaccaacaaaacccaacaccccaaccccagaacaaacaacccacccaccgaccgacccccccaaagcaaantagaaaacccccatgtagcacccacaaaccacgcaagacaatacaaaaaacatacaacaacagcaaaaacaaaaaagaacagacacccccccccccccccatttcgcctgcaaagggcccaagatgtcggaccatttcgcatcgagggggggccggtgtaaaagaggtgggggggtcgtagcgaagggaaaagaaggaaatttctgaaaaatgtacctattttttcttaacaaaattagcccaaaatctcaaaatttggtcattttttaggcaaaatctggtagcaaatggcactaaaaatacaaaatttttcccggcggcgcctaacggcaccgccggaacccccccccaaaaaaaaagtttttttaaaaaaagcgcgtcgcaaaaaagcgttttttaaagaagaaaaaaagtcgtcgcctggctaaaaatcgcaaaaatctgccaatttgcgatgaaaatctgttacaaaatccacttaaatttaaaatttttcccccccgggggcgcctatcggcaccgccggctccgcgttcgcgtattttttttgagaaaaccgcgccgcaaaaaaaaaagagatttaaaaaaaaaaaaagtcgtcaaaatttttggaccccgtcgtaaggaaaatcgcatatgaccaccccccccccccctggcccgatcgtacgtcgtatgacccttggaagtgaccaccccttgtacacg

SEQ ID NO: 22515 - DNA, 2366 bp, Heterodera glycines
tgtggctcagtggttttgtaagatagaaaggacaatgggtggtggttcgagtccgttgtgcaacatgaatatttttatttatttttgtccaaaatattaaaaaatgacgaattttgggaattatttttgaagctttttgccaaccaaattggtaaatcttggtatcattcgaaagccctgcccttgatggggagaagctttttctaagcaaacattaagcaatttgatgggttagaaaaaagatatgatgctttgaaattttgttttttgaataagttctcgaatcgacctattttaatattaacttgacctattaaccgatgcggaatttttttctctatcggtgtgcaaaatttggagtggatctaacatatagaaaaaaaattaaacgtagcgaagtaaattcggtttttctctattgacagagataaaaaaatagtacgccaaaatgagagatgtttttttctctgcactctctctttattgacacatgtctcgttttttgactcggtgtgtataactgattgtgagagtatcagttcataatttttggcctttggtaaaacactttttccagcaatttcacataaattcgagatttagcactgggaaagtcaacgaatcagaaataataattgaataactgtttggttatgctctgctgctagtctcttccagtggcatcgcttttcggcattttctcagtttcacttttcaattggtttcgttcgcatttatctgtttcctctgttcctttgccaatgcttcaaaagcactgctcttcccctccaattggtctctttcatcctttttttttgcaaaaggaccgaccgaaaaactgttgcaagttttcaatggtccgactaaagaacagcgacggaaggaggagcaaagaatggacaaactgaaggggaattaatgaaaaacagtgaatggacggagaatttcattttttctgttaaattgattcctttgtaaatcgatttgatacaacggccaaaacgaaatgttgcgggaggcgattgatcaaggacggacggcgcctttgctggccaaaggccattccgcaaattgcctttctccgccgcaatcggtcggatttaaaccgctctcttccgcctttcttctgatcacttctttttgtctttgctaaaaaccaaaaatgtttttaaatttccttttcctttcgctttttgttcttttctcgatcgacttttgtggtgagttcaatccgttggtcattctctgaaatgcgtcgttttgttaagcctccgtttgccccgccggttggacgcatttggcaggcggccaaaagtgtgtgaaggcatttccgtcactgacagattggagctacggcgcatgggtgagctgacaatgggtggggcggggtatactgtgccatcaaatgttacggtaccaccctttcccttccctttcagttgtgcgcttaccaaggagcacagcacatttcggtcccaatttgacttcccttgacgtgtgattcaattttttgtttaggttaaggattattatgaaaattattacattgccgagttggccaaaactttgcccggtcgccaagtttggttgggtgcgtctcgcgccggcactccgtattattcgtggtccgaccggactccctttgggtctttcgtccgttggcgcggaagtcggtcgaatggcattgccaattccaatccgtcttttcagatgtccctccgcctcgcaatggcctcggatgtgtcaaattggacggcgtttcgggcgaatggtttcaaaggtaagcggaagcgaacggagcaacaaaaacattgaccaatgctttaagctgttgtcggaagagtgcggcaacaatctgtcagaaaaaggctgacggcacggggacaattcggctgcgatgagagagaaaagcggcggagagggggggggggaatgatgatcaaaacgatgaatgatgatgatgattacgaagttaatgatgacaaataaatgatggatgatgaggcggtgaggcggaggaagaggcaaaggaataaactacgaaaagagactgatgaattcccccaccccccaattttttccatgggggaagagcttcgccggattgaattggctaattggattcaatttgtggcgctttgggtttttattcccttagggaaaattatgagagaatttaatttggccgcggggggaaaatgcaaaatgaatttgccgctttggcgaattcatttcatttgtgttcatttcctccaaatatgggtcgaatgacatgtgatcagcataaaaaggcattggcacgggcggaaagacgccgactgagaagggtttgccggtaatttcaacatattatgggattattttaa

SEQ ID NO: 22516 - DNA, 2353 bp, Heterodera glycines
  unsure (1)..(2353): unsure at all n locations
ttttttttttacattttttaagtttatttatttaagcaaataaattntcggggttaaatgtattttttaaatcagatttatggtagaattaacaaaaaactaaattggtttaaagccgtattgagtgcaaaaatggtcgattttttcgatttaaaaaattataacttggcttaagaacatttgaatgcagttttttgcatcttgtagagaattgagtatagaatctcatattttgttcccattttgccaaaaaaaaattttagaaatttagaaatgacatatttttaactgaatttttccaaaaaatgttgaaatatgtaggtcaactgagatttcgaagcggtgaaatagaattgtagaataaaaatttagggaacaattattttatcttaagactattcgtaaacattttctttttaaaatgtagaaaattttgaataaattaagtattattgatttccttgaaagcccataatttatgaattaactgaaaatctctctttttaaaaccaatttagctaatttcttggtcaaatacgttaataaatcgcaaatatttaaaagtgcacaagcctcgcctatcatcaaaaattaaaggaaacctgttaaaacaaagaaaaaaagttaaatagaacaaaataaccgacactttgttggaaaatgtaaattgatatgcaaaatattaaaaaaaaggtttgaaaaaattaattaattgcttagaaacacctaaaaatatctaattaataataataatgtatttttaaattaatttaatctttttttgaaaatttaaaaaaacatcggtcacttgaaataataaattctaaaattttgtccaggaaaatccaggttttccgtgttttgcctggacctggatttttttttcacattggacctggacctggatttcctggacaaaaatccaggaaaatccaggtcaggaaaaatccaggttgccgaaaaatgacctggacctggatccaggaaaaatccaggcctggatccaggtccaggccgatctctagtgaaaatagttcagggcaatgccgaaggactttcccacggcgcccttctcaaattcagttttggatattttataaatattaaagcttaatttatcacaatcatgattaattatgatacaaatgaatcgaacattttattcttcaataaaataaagaaatcaaaatagtaaggaatttatatcaaaaaatattttttattcagaaagtagtaataatagagaccgaatttatggatttttcataattgataaattttagaatagatgttttatatttcggcattgatatttttcttttattattttaatgaattaatactaaaactttatataaatataaaatttatttttgggtcgtttcttcactcattgtcatttcaaacatttatattcactattaataaaattgcgttgaaaattataagaacaccctattttttgagtttaacttcaaagactgtgaaaaagcaattttttgcgaacaaatcgactgaaatataggcaaactttcttaattttacctaaaagcaacaaaaaactaaattaaataagtcaatcaaggccaaattttgtctttaaactaagagggatttatttacctaatgaaaaatcgaatgacgattgggcgtttaaatactgtgaaataacaatttcttgtgtaagagtcttattaaacgatttcttacagagcccagagaattgtttaatttaaataacaataaacgaaaatagtttaattaaaatataaatataaaaaagacgcgaacacattccaaatttaaaagattttaacgtatcgagaactaaaaaagaaattaaagttataatggaaaacctcaaatcacaagtaaacaaaatagagttttagaaataaaattttctattaaaaattaaaaataaataaaaaaattttacggaagataatatttgaaacaaaagcatggattagaatgacattcaatcgaccggcaaaatggtcataataattgatgaagttttgtgggatttcattcattcgttaatttaaattgcaacgaaacgaaagaaataacgaatttgaatgagaacattaaaaataaaaattataaaattaattgaactcatacaaaatattaaagaaaattattttcaacatgttaagaactanaaaaatanatttaaatataatggaagtcattaaaaactanaaaaataataagaaattcatcaaagcacgaaagaaatagaataagaatcaaataatattggaaaaatgtacgaaaaagacataaaacaaagcttgcaattcaatgaaaaataactatgcactaatgaaagtttttaaaactg

SEQ ID NO: 22517 - DNA, 1671 bp, Heterodera glycines
attcgggatttgtgtttaacggactttcgccaattggacgacgatggacgtgagaaaagggcggggaatgacacaggacagtcgcattaatcaccgcagggcaggcattcgtaccagcgaatgttcggggaccaacaagacggggagttcctgaacggagcgcgcatcgactgggttctgtctcaagagcaggtggaccgcgtgatggcattcactttgccgttgcatgtcagtgtttgtcattcgaattgaaaagggcaaaaaataaacatcgaattcaatgggccgttcatagtttttactgccctttcctcttctgatcggctccatttccttctgtcctttagacgtgcattaattatccgctggatgagcgtttcctcgaatattcgcatgattacgttcgtttccttttaacttttcccaaattgagactgttcaggtccattattttataagcggggacatgcaagaacggttcagctccagcaacgacccaatcttcttcatgcatcacggttctgagtgtcttaacacattgcgaaataataactaattaattaatgataattaattaattaccatttccttacactgagtaattgtcaaatcgattaattcccttcatattccaggcttcattgattggatatgggaggagtggagacaaacaaagcaggttggtcggtcagactggccactaaacgattcaaatgtgccaaattcggcctccatttgtttgttgtgccatccccaaaatcacactcatttgtcagaatcgtctccaacgtgaacgcgattatccccgtgacgatgccgactgcatgcccgaatggcacttctcatatgcgtacatgcctttgttacaacctttgcggaacatggacgctctgtccaacaactacacggaccacatgtacgaatacgcaccaaggccgagctgtgccaaaagtggaaaatcatccgaatgcggcaacaccgagttggtggaagagagggggaaatagagaaggagagtggagacaacgagagagagagagagagaggaggagagagaacgtgaaagagtgaaaaggggcgtagagacaaaaaagaaacaagagagctagagagagagaggagaaaggaaacggagtgtccgaaagggaaaaacagaggcgaaaatgccgtaattaaacaaattgcctgcctttcagttttgtttggtgcgacaagcgaactcacccgggccacgccgtttgcagctccaaagtgaagccggggggaaattgcaaagggttcgaatggagtgaggagatttgctacaaggggaagtgtgtcgggggacgctgctcaaagcaaaggacgggggacggcaaaaggacggggaaaagcggaggaaaagcggacgaatgggcgacggacagttttatgaaatgaacggacggacgagcgactgaccgatggaacaaaactttaagcatttaacccacgaatccttccattcgctagctttcccttctctttcttttactcagctttttacctttttagtctgtcctcacaaaattatgaattttagcttttcaaaataaacgaaaatggatagaaaatgggcaaacaatggaaattaagtgaatgtccgttttaattaggcacaaataatcgaaaataatccacagagaaagcgaa

SEQ ID NO: 22518 - DNA, 980 bp, Heterodera glycines
  unsure (1)..(980): unsure at all n locations
ccaaaatatanaggaaaaattttttaaaacattttttctccatcttcctttttgatactaaagcatcagagtgctaaaattaagttctaaataaaatctgggcgcatcggttcgggggaaaatatccccgaaaacaaaaaaatcgattttttcaagtgtccgtttggggtactcaaacaattatggggagcaaaaatccaacgcagaattaaagtacaggctatagggaagctattccggaaggattcggtctccccataaatctgggcgcatcggttcggggggactgccccgaaaacaaaaaaatcgattttttcaagtgtccgtttggggtactcaaacaattatggggagcaaaaatccaacgcagaattaaagtacaggctatagggaagctattccggaaggattcggtctccccataaatctgggcgcatcggttcggggggactgccccgaaaacaaaaaaatcgattttttcaagtgtccgtttggggtactcaaacaattatggggagcaaaaatccaacgcagaattaaagtacaggctatagggaagctattcccgaaggattcggtctccccataaatctgggcgcatcggttcggggggactgccccgaaaacaaaaaaatcgattttttcaagtgtccgtttggggtactcaaacatttatggggagcaaaaatccaacgcagaattaaagtacaggctatagggaagctattcccgaaggattcggtctccccataaatctgggcgcatcggttcggggggactgccccgaaaacaaaaaaatcgattttttcaagtgtccgtttggggtactcaaacatttatggggagcaaaaatccaacgcagaattacagtacagactatagggaagctattcccgaaggattcggtctccccataaatctgggcgcatcggttcggggggactgccccgaaaacaaaaaaatcgattttttcaagtgag

SEQ ID NO: 22519 - DNA, 865 bp, Heterodera glycines
atccctccgccccgccccccgttgaagcccaatgacccaccgattggtgaacggcgactggacggagagactggcggccactgtgagagcaatgtccagctggttgagcacacacgcgtagatcaacatctgccaacgaatgggcggtggtggcgaattatacatttttcgctcttttcgccctttggctctttccctccctttaattaccctttctccctcactttgctaatggccacatccaccggcaatttggccaaaattatgcccagcggcgtcagcgtccgttcgctgtgtgtgtccacgacgccctgcgctttcagtgcctccagcgtttcgttcagtgttcgcatgtcgggccgctccaaaaagggaaagtcgcgcacgtcgacttaaaggagaaaatgaatttggacgaaattgccacggggggagggggcaaaaacgtacaaaattcgatgccatttttaaatttgaatttttaaaacaaattccaactttccaacatttagcgacgggtgcccttctccccccccccccccccgaaacgggccagttgcgtctgagccaagtttagagcatcataacttttttctttgttgaccaaatccaacaatgttggtatcattcgaaagctcttaacaagctctatcggctatccaaaaatcacaaagacgtaccgacatataaaaaagttataaattaaaatatgcaaaaattctgactttttggtagtgttcatgtggcaacttttttataagtagttcaatcgcttaggaatatcttatcaaaagcttctaaacatggagagcgtttacaaagatgccaaaaatatactgtttgacaaacaaagaaaacagttatg

SEQ ID NO: 22520 - DNA, 1720 bp, Heterodera glycines
atcgtttgggtgaattcggcgaattctttgcacgcctcggcgacaatcgaaatttcggagattccgttgagaaacaccagcacatcgccactgacaacaaaagaaagaatgaatgaacgaatggatgagttttgttgtagagggagagcattgagacgagaaaccaccaaatttacgagtttttaaatgccaaaaagcaaaacattcgaattcaatggcaaaaggccgtcccatgcacaatttgaattttaaaaattgtgatggtttcgcgcccaccgttccgtggaagggtatttcttgtcgatgagctgcaaaatgttcacgaagggtccggggtcaattcgaaccgcccttttggaggtgtccacttcacggatcagagggggcatatacctaaaagagaaaggggagagaaaatatgaaaaaacaatggaagtgtccaaaaggaaaattatttaaaaatgagagcgacgctagactaaaaatgagtcaaaaaaagttcgaccccccccccgccacctgagttcgatgggatacaatcggccgggcaccgaaatgaccggcgcctccgggaaatagccttggaacaggtcgatgttgatggtggctgacatcaaaactaactgggaaaacaattattaaaaagagggaattggtactgaaaaatgccaaaaaatgcctttaggtcgccacggcgttggcacgcactgcgcaaaagcgcaaccaaaaggtcgccggaaatgttccgttcgtgaaccttaaatagaggagaaaatagtaaaacgaaagagggacgaacaaaaggagggaaataatggaaaaatttggaccaaaaaatgaaaaacgccgtcctcctcccctcacaccctttcggtgtccgttaatttgccattggccaacctcgtctaaaatgaccacgtcgtaccgctgtaagcccgggtcgtcgaccatttgccggagcagcacaccctcggtgaggaaaagcatccgcgtggcactcgtcttggtcttgtcaaagcgcgtttggtaggcgatgtgcgagtcgaactgcttcaaaagttcgcaggcgacgcgttgggcgagcgctgaaaaaaaagaaaagggaaatggagaaaatgccaaaaaagtgggaaatgccaaaaggggaggaaaagccaaaaactataaaattgacaatgagaaaaaagtaagactatattcctaacaaaaagtgtcgtgatttttcggatttgtcgagactttctaagtcattttttttgataaaaccagaatttgtttttgtcaaagtctcaatttaaaatctgagaaaatgctttttttctcgccccccccccccattttcgacctgtgcatgcaatccgtcgcggctgagtgcatgcgattttggcataacccgcgttcaacaaatattggggcagctaaacacgaaaataaagcaaaaacagaaaaacgtaaggtaaagggggcggaatcctttcttttttaaaaatttggcacttttaccccaaatttgtgtccatgcctttcacctgtgtgcttttgccgcagcccgtgtcccccgcaatgattatgatttggttctggaaattcatatttatttatttttgatttccccccgaatttccgcccacttcttccaatttttcgaggatttccgtccgactttggtaaatgggcagttcgagttgggactgcttcagtttcttcagcttttgaagtt

SEQ ID NO: 22521 - DNA, 2356 bp, Heterodera glycines
  unsure (1)..(2356): unsure at all n locations
caaagcgtgccacaaaaacttccacaacgcgggctgttacaatcaccacattcagtccaactattgcgcgcgttcaaagaagtgcaaagactgcggtgttatttgggacgtcaataacaattctcaaaaagggcggaaggtaccaaactcaaaaaaaaaaattttaaaaccataaacactttaagggacacgtgtgcggagaaaaattctgtcagctctgcaacaacttccacagcaccgagcgtggctgtttcattgcaccacttgagcctaaggaagagatggagtcctatcggttcgtggcctttgatctggagacaatgcagcatctccctgttgaccctcgtgtacctgagaggcgcaaccacgagccaaacttcattgcagcgaaagtgatttgtccaatgtgcattgaaaatgggagctggaagcaaggaactgccgggtgttgggtgtgcggcccacaccgaaccgttgccttctgccaacgaccatttaacggcacttctgttgacaaacaagtggtcaccgacaatccaatgcaagcgtttgtgggatggctgatcaatgacctaccgaagaaagccaacacgtacgcatactcccattttggcggacgctttgatatggtcatcacattccgtgaactatttcgtcgcggatttaacccggaaatgattagacgagtgagaggctctctttacttttatttttacttagtgaatgtttagggcaacaaaatgtacgagatgaagctaaaggcacagaagaacaaaaatccgaacatcattttccgcgactccttcaatctgatgccctgtgcgctcggacaactggtgccagcatacggcttggacgtcgaggagaagccctttttcccgcacatggccaatcggccggacaactatgggcgcgaaatttttccaacacccgaagactacctggcccaaggaatgatgccggagaaacgacgtcagttcgaccagtggtatgaacaacatcgacgagagccgtttttattggatgaggcgttggccagctactgcaccaacgacgtggagatcttgatggcagcgttggtggcatttcgacgtgaattcctggaaatcactaagcggcaagaatatgtggatggtgtcgacaaccgcgaaaatcacgatggaattgacgttctgaagcagtgcatgaccatcgccagcgcctgcatgaagcacttccggatcaatcatctcccggctaaccatctggccatcgtaccggaaagaggctacgacaacgcccaaaaccaatcattgctggccctccgcttcttcaaatggtatgcggagaaacacggagtccaactgcagacggcccacaccgctggaggtgagaagcgcgtcgccaactactcactggacggttggatcgaatccgagaagagaggcattgaagtgaacggtaattttagaaaataaaacatgtgctagaaaaatttgtgtaggctgcgtttggcacgggtgccgcaaatgtttcccggaggacaacatgctactgcctaatggaaagtcggccggtgaagtgcgggagcgggacgcaaagcgccttgaatttttgcggaaccaagtgggccgtgtggacgtctactgggagtgtgaaatcgagcgcatgctgacgacagaccctgagatgcggcaggccttcgcaggctatgttgatgatggaccattggaaatccgcgccgcgttcatgggcgggcgcactggtcctctgaagctctaccacaaggcgcgagaaggggagaagatttcgtacttcgacttcacttccctctaccccttcattaagtgagttttagcattaaaaatgacacttaaaaatttatgtatttagttttacgacacgctatcctgttggccacccaaaagtgcacgttttgaacgaggacgtggaatggaagtgcgcagcggacaacccctacgatttgtcgctgctcaaagtgtgggtcgtgccacctcgtcgatgcgatgtgccggtgttgccggtcaaggtggatgagcggctgtgcttcccgctgtgcttcaaatgcgccaaagactacccgaccggcggagttgacaacgaatacaactgtcgtcacaccgatgaacaacgcggctgggtcagcacctgcacttcgcttgaattgaatgccgcattggatgaaggctaccgagtcaacaactgttccgtgtgctgcaatatgagcagagcgacgaccaactattccgctcctacatatcccgagtcatggcgctcaaaatccagncagcggcttcgacgccacatcaaaggaacagcgagatggaagaagatttgtcagcgatgctatgaaaag

SEQ ID NO: 22522 - DNA, 2709 bp, Heterodera glycines
ttttaaaaaatattaaattttgcaaaaatttaagtcgaagcgatacttgaaaattagatttgatgttttctataaatttcggtgtataccgttggaacaaaaaacatagcgaaatttttaaataaagttctgaaattatatgatactttttatacccaacagacctctaaaatcgataataaaacaatcgtaccctcaaaaaataagagacttattttcagagaaattacggttacataagcttgtaaaaaaattcccggaaaaaagtgatctcatcttaaattacaaaattatttcaagggaaatgaagaaacaattaaaacaattcagaaatgaaaaagattcaaaaattatttcccgggggcaaaattcagttaacaaatttatccgaaataagttatcaaaattttttgagattcctactctaattgataatgctggaaatatgttttccagcaatgtacaaaaatgtaaaatattagcagaaatatttcaaaagtcttttttaagaaaatcaattgttaatggtccacaaactcagtcaacacagaataagaccaagctttttgacattgaattgaacgctggcataatttggaacatattaagaagacttccccggagtaattccacttcacctgataatatcccttatattttattaaaaaattgtgcagaaccaattacaaaaatattagcagatatatttaggctaattttggattccggtcaaattccggaaatatggcgaacatcattggtggtaccaattttcaaaaaaggcgaaaaaactgatccattaaattacaggccggtgtcattaaccagcactgtctgtagagtttttgaacgaattttgagtagcaaaattttagaatttctgaacagtacaagattctttgataaagaacaatttgggtttttaaaaaatagatcgactacaacccaaatattaaaaacaatggacgatatatataattctctacaaaaggatcaacaaattgacataatctatattgattttgtcaaggcgtttgattctgttccaattgatttattacttcaaaaaatcaaaaagattggaattgaaggaaaaattcaaaattttttaactaactttttaaaaaatcggcgttttaaagttaaaattggcgaagaattgtcagaaagtttcagaatattttcaggagtgccccagggaagtgtcttagggccattactctttttaatttttataaatgatctgccgtcctttattacaaatgaagcggcatcagttggcataaaaatgtatgccgatgatgttaaattatattatgcccatgaaaatgatgaccattcgaatcagttggataaagaaattgaggctttggaaaaatggtcaaaaataaatgggttagaaatttcaactgaaaaatgttttgttttatatttagggaaaaataatatgaaaaaagaatattttattaactcaaaaaagatttcagaatcggataatgttcgtgacttgggaattataattgaatcgaaacttaatttttcagaacacataagcaaaattatacgaaacgcatatcttagaagctttcagattttgagagtgttgaaaagcagggaaataaagactctaacagcagcttataaaacttttgtacgacctcaattagaatacgctaccgaagtttggaaccctaatttaaaaaaagatatagacaaaattgaacgggtacaaaaatttttcacaagaaaagcatttcgaaaatgtggatttgtgtacaaaaaatatatggaaagacttaaaatcacgagtttacacaaattggaagaaagaagaaaaatcaatgatttaacaacagcttttaaaataattaaagggttcaccagcctcgatactgggaaaagtttcgttttctcagaaaggtccaggaggcctttacttttacgagtaaagcgccacacggccaaaactcaaaataattttttccataggatagtaagaaactggaataaccttccagttttagcggtgcaaattaataaggcaaaggaattcaggggtttactaaaagcaatgagttctgagtaggaaatttctgtgccacaattacattaaaataatcacctgtgaatttaacatttgatttatttttatttcacatttattacatcattttgtatttttaatttgacactttttatttgtttatttctttttggcgccatataagagcactaatgtgcctttggtttgctcgataaattaaattaaattaaattaaattaaacaaactttttattttttaatataagataccgtattatctcccttttatccccccgtctccattaatccccctgtctccatttacccccccccccctttctgaggaggttgaacaataatccccccgtctccatttatccccccggggggacaaatggaatttttattttttcgaaaaaaattttcttttaaaatttataaaaattaattacttcaattcggaactcatttaaaacataagcaatttgtaaatttcagtgcattcagaatcaaaaaataagatttttaacaatttttttcggcgcatttttccgaaaaattttttgggatgggtgagggaagagagtccggcggtgccgataggcgccgccggggaaatttttgtaatttttaatgcgatttcttaacgattttgttcaaaaaaa

SEQ ID NO: 22523 - DNA, 1583 bp, Heterodera glycines
  unsure (1)..(1583): unsure at all n locations
tttaattttcattaaaataaaaaaacccgccgacgggcatcttttggtccatttgaaattatttgttcccttcaaaattgtgccccgtaggtgtgctgtgtgcccagcgggaattgtacggcgcccaaatattgggccatcgttcagcagcaccagtgacagacgtcgcttttgaacaaacgacatttgcaatgcttttgattcatttgctttgattccgacgattttttttaaattttcaaataatcgccaaactttttttttaattcctctcttttcatatttattcattttatcgtcaattattttgattttatgccttttctcaatatcaaatacttttgcttctcctgtttccgatttaagcaaaatggaaaatttcaccgtagatcataatcatttagcttttcataaaacttttaaattatttccatttcttgtgctcattttacaaaaaaataaataaaattttttcagtgagttccccccatacaccacaaatcagttcaatctccttaatatggtttgttttcaaaccagtaagccaaatagtattcattatgtttatttttttgccagtgaagaaatgagtaatgttgaattgaaaatggtgacgcatcaaattgggagggcattaaattgttaaatgatcgttgatcgctgctctaattattttttttttgggggggggggggctcaagcgatcaccaaaattgtttctctctctgtttctacactgagcattgggctgttgctgttcgttggttgggatcatgtttagtttaggtgactttgatctttgcgcagacggcaggcgtcaaatttctgaagaaaattaaaatggtaattggcaattagtaccaattactaaaataataataatcactcacttaacgcccgcggcggacgcgcatttgcacaacgcttgcacgttggcggtgttcagtccgctgttgagggcacactgcttcacctcctggaccaacacattgtccgacggcaagtccaagccgcacctgagacaaaattaatgtgccgaaagagcggtatttttgggttgatggcaattcaaaaatgggcgcggcactttttgaaggaaaaacagaaaacacagtgccactgacaaagcaaatgaaaatgccaatgtaagcaatgttgtttttaggggtatttgttttattaatgccattcgagggtctgtctcggttcgagaaaagtctcgtcttttttttgtcagtctcaacaatcaaaacaaaaattgttgttgttcccacttgagcgacttctcagcagttgcccgccttgctgttcatgcattttcgcgtacagccgaacattttcttgccgaccccgccccccccccccacgtgtcgttttaatcaccaaaaaatttttttgagcaattttttctttaatacatatttggaaaactaagcaattcatcataaattttgaacaaatggaaaaaatttttaagtgcattttccgttatttttcatataaaagatttnnccttttcttnaaaaaatcccattttaactaagtaggaaatattgagcgcgaaggcagggtgacactgcaca

SEQ ID NO: 22524 - DNA, 991 bp, Heterodera glycines
cccttcctccgtttttgcagatcaccaaccaaatgatttgcactttgctccgactgtaccgcaacgtgctcgagttcggcccactgtacgtgaaccatgccattccccggatgctttccgtctggttagacttggcgcccaaatgtgccatcgccgaggcgatcgcctcgggcaccggcacaactgttggcggtactgctcgcacttcggctagcaaaaggggaggcaaagctgcagcagcagcggcggctgccgccgctgttgcaacacaaccacacgacccgaacagagaaatgcgtgacgcgttcaaacggctggacagggcgtatttcttctcctcctactcgcaaatgatttcgcgcatcactcactcggacgccgccacatatgccctgttgaaggtccagcggggaaaataaaaatagcagtcgtttccatgtactgtctacccaatccactattagagggtcagcagaagtgtcgttcggctggccatgtaaaacgatgggttttttgtggcgcttttttcaaaaaaataatttttttgggaacataaaggggtctgccgatgctgatagcaccgcgccggggaaaactttttgaattttttaatgcaatttgctgcaaaaaaaatttttttttttgaaaatgttcaaattaaagcttttgtgttttctaaacacctaaaatgaatcagaatttgatttttcaggaaatgttgtccgaattgatcgtccactttccccaccggtgtttgtggctttctcagtccatcgtccgctccacgcgggtcgccgtccgttcaaagcgttgcctggagatttttgaacttgccaagaaaaaagcgcggagcaacaatgacaacaacgctgctgttgttgacctgaatttgctgatccaacaatacgactatttgaccaccttgctgatcgggtgggtgcacggggaaagttatttgaaaatttgacattaaatagggagatcttattat

SEQ ID NO: 22525 - DNA, 1551 bp, Heterodera glycines
acataatttgataagttaagctgttatgcgcaagaagggtccactgatgactcccaccgaattgcaacggtgagtcatctattgctgcacaatttggcactttttgacaaaatgccatgcgattagccattttagtcagtaataattttttatgcccacattacagtcttctcggagatcaaacatccagaggtgatcggttgaaggcttttcgtgaagtctgtgctcggcatcccctcgcaatggcacaatggattcggtacggtcgcactttcacaaaaatcaaatccaaaaaaaaattgttgtgtcaggaccacctttttggacgcctgttcctggtacaatgctcggcttgcattcactcgcacggccgccacgatgagcatggtcggctttttgttgggcctgggcgaccggcatggggagaacatgttgttggatgtgaggacgggaggtatacggaaataaatccatcattattttccactttttggtttttaaaaaataaacctaacaacgtactttgggtgtaccccaaaatctcgtcaccaaaattcaccgagacaaaatcacgcccacgaaattgtttttataagaaaattggcggcgagattttgggtgcccccaaaaattctttgtccggtttttcgatttatttattcacaaaccgaaaattatctgaaatcaatcatgcaattagaaacccttccaagatttgatccacgtggacttcaacattctctttgacaagggcgaatatctgaaggtgcccgaggtacagtcattccgttacaatttgtttccaaatatttttttttttaaattttgcgataaaattctaatacaaaatcacactccttctggtttgtcaatttcagattgtgccgttccgtctcacccgcaacatggtggacggatttggcgccaccggtgtggagggtacattccgaaagtcgtgtgaaaaggcgttgaaggtgggaacatggatggatggattcatccgtcaatcattgtctaattgatgcactcgcttcacactctcgacaggtaatgcgggccgagagtcgcatgctccgcaccgttctgcacgcttttgcgcatgacccgctgctggaatggaccacaaccgaggccagaaaccagcagtacagacaggtgcgtttggttgcgcgggcggtttaccgtagtccaaccaatattttttttatattatcctattttcttaacaaatttaaccgaatttctaaatttccctgcggtgcttaacgacaccgccgatccaatctttgatcacttttttgaaaattgttaccccgaaaaaaatattttgtgttgtcccgccccttactacaaatttacaatagttttttataattttacgcatttttttttagtacggtgggaccacactccaatcacagcagcaggacaacgccaaccacacaatcggaatgattaaagtgcttttttccatatgcctttcgctgttaaattacattttgaaattgttcagatgcgccttgccgggacaattgtcaccgcccgcttcac

SEQ ID NO: 22526 - DNA, 1988 bp, Heterodera glycines
tttttgaatttataaaaacgagtttttgatatcacttttttaaatttttagaggtacattttcaaaaaaattaaatttttcacaaaaattttttaatttagggagaaatgctaaaaaaatccaaaatatgtaccaaatatgtataaaaacatttcacggaaattctgttctaaaggtgtgagtccacccatggagtaatggaaatggccgaagcgcccgtgtggttatgagctctgtgttggtgagggcgggcctcaacactttggtgctctagccgcaagcacgtaaaacatatgacgacttccttcaacgcgcaagcggcgcctatcggcaccgcctgaccctaaaatctataattatcttgaaaaatttgatcaaaatcgctaaatttggtcatttttgggacaaaatttgttaaaaaattgcaatagaactttgggcctcggaattccgatttcctaaaattttttgacactcggaattccgatttcctaacattttttaatcctcggagttgcgatttccgaatttttttggggcctcggaatgccatccctgctccccacccccaccccccccctcgctgggaccgttcccgagggtagactttggcaacaattttttaagcaaaatttttctatattttaacaggcaacaacgacatgccgatgaaatgagatccgagttgcaaatggagcaaaatgagcctgaggcagacaatggacgtgcggcagacacattgtctgcgttcggtgacgacgaacaacacctggagattttgaacattgttgggacagttgaggccttttctgtggaagtaagaatattaaacttaacttatcagagctttcgactgatatcacttttttgaaaaatttatataatttggtgcaattacatggggccataattgtgctgttaagtaaatttattttatttttttaaatatttgaatcactttttccttttttaacattattcatttcattattttggattcaactaaaatgatggaattatattccgtgaatttaaaacgtctcaggacataatttaatcaaaataagttactagagtattttcctggcattggttaacccacacataatttatttttcagcatcttaatgcgatccacgcacacatcatggaaggacatccgtctgctggcgaaattcgcactgttgacgtcaacattattgatagggatggaaacgtcatttaccggccaccaccacattcgcacgttttacaactgatgtctgatttctgcgccaacttgaacgaagcgatgaaaagcgtgaaaaagagacgcatggaagcattggcagttgctggtgggcccaccaccaattggtaatataaatgaataaatgtttgggtcggagaatataaaattggtgacaaatgatgagggaaaggcacattttttactttttcattgggactcagttgtcccaggacttcgttggcaacggttcgaattcataccttgatttttagaaaactcatcaaaagctttcgaatgataccaaatttttctgagtttggccgttttaaataagtcaggagtccattttccccacaatcctcttgacgaatcgattggtacattatctgtgccattttttctgggatgttgactaaaattcacccaaatttgcttttaagaatatgaaatttttaggcccgtatccatcctttcgaggatggaaacggcaggatgtgtcgccttctcgtaaattttttgttggttcgaaatggcttccacgccatcgcgctggatgatgataaattccgagatgattattatgagatgtttgataatggagatttttcaaaatatgcttcccagattgcttatttggtcactctcccttctgaacaagcccattcataggcaatggagtgaaggtcaaggagaattaggagtaattcgtaaaatgtttaagataaagccgaaaaaagaaatcctcaccaaaagtcag

SEQ ID NO: 22527 - DNA, 1179 bp, Heterodera glycines
gttttcggggcagtcccccccgaaccgatgcgcccagatttatggggagaccgaatccttcacgaatagattccctatagcctgtactttaatactgcgagggatttttgctccccatatttgtttgagtaccccaaacggacactcgaaaaaatcgatttatttttgttttcggggcagtccccctgaaccgatgcgcccagatttatggggagaccgaatccttcgggaatagcttccctatagtctgtactttaattctgcgttggatttttgctccccataaatgtttgagtaccccaaacggacacttgaaaaaatcgatttttttgttttcggggcagtccccccgaaccgatgcgcccagatttatggggagaccgaatccttcgggaatagcttccctatagtctgtactttaattctgcgttggatttttgctccccataattgtttgagtaccccaaacggacacttgaaaaaatcgatttttttgttttcggggcagtccccccgaaccgatgcgcccagatttatggggagaccgaatccttcgggaatagcttccctatagcctgtactttaattctgcgttggatttttgctccccataattgtttgagtaccccaaacggacacttgaaaaaatcgatttttttgttttcggggcagtccccccgaaccgatgcgcccagatttatggggagaccgaatccttccggaatagcttccctatagcctgtactttaattctgcgttggatttttgctccccataattgtttgagtaccccaaacggacacttgaaaaaatcgatttttttgttttcggggcagtccccccgaaccgatgcgcccagatttatggggagaccgaatccttccggaatagcttccctatagcctgtactttaattctgcgttggatttttgctcccccataattgtttgagtaccccaaacggacactttgaaaaaatcgatttttttgttttcggggcagtccccccgaacccgatgcgcccagatttatggggagaccgaaatcttccggaataacttccctatagcctgtactttaattctgcgttggattttttgctcccccatatttgtttgagtacccccaaacggacaactggaaaaaatcgaatttttttgtttttggggcaggcccccc

SEQ ID NO: 22528 - DNA, 1267 bp, Heterodera glycines
gaaaattttcaaagttaaatcccaacattctttttcttatgctgttctaagatacattcattctaaaattgtatcttacaatatgttatgctatttctattaatttttaatttgtattttctttttcactaattttggttttttttcccaatacattttcaatttctccttttttgtttcttccattatatttttattgaaaatggaaaattgtttcttccattttgtaattattgttcaatagctaactccaattttctaccaatttcggcataatttttgttccattcattttctgaatattgtatttttgcttattttcatttttcatcaataaaattctgcgcaattcctaatttttcttcaacagtttttgttttgtaacttttatgtatttgttgattaagacttagttctttaacccatttttgaatatatgaatttttcactatttttttttttcaattcttgcccattcttttgttgaatattttcttgcttttttgcctaataatttttgatcaatcaaatcgtccgtccgtcccaatccattttttctgcttcttacattcgcttccaaccccgacaaccccgaaccccgacccttaaccccgatcggggtcggggttaaatatacacccctaagaatggaatttttgtgggggaaaaggcaaaaaagttataagaaatttgaatttttttaaccattttgccaaattttattaaataaagtaaatttttttttgtttattgtgtattgtgtggtatagtggttattgttttaacaataacaattcttttcttatgagttcgataccggttgacttttctttttaatttatttttttgtgattaatatacttttttaaataagattaatatttttcaaaatattttttacaaaatataaaatattaaattaaatttcacagaaattcataaatttttgctgaaaaactattagaaaataaagattaattttgacaaaaaaaaaacaagaaaaaaacccaaaaatttatctgaaattcataaattttttggtgaaaatctgttacaaaatagaccttacatttcaaaattcgcccggcgctgcctatcggcatcgccggtgcccctcaaaaaccttttttttaaatcagctcaaaatcgaaaaaatttatcattttttggagaaaagatgttaacagacccatccaaattttcaattttttcccgggcggcgccgataggcgccgccggacccctttcacctaaaggtctttagaaa

SEQ ID NO: 22529 - DNA, 846 bp, Heterodera glycines
  unsure (1)..(846): unsure at all n locations
ctttcccttttctcttggtctccttctctctatttctttctctccctccctctctctctccattctctctcacatctgatctctctctctcacccctctcacttttgccttctctctcgctcctccaaatattttgccgccggcaaaaacaaacaaaataattaaaacataaaaatctaaatgaaaagcaccgccgccgcttcaattaataaaaatggatgattaatgcgaaagtcgcgcgcgggggaaaagaaaagggaaacacaaaatgacaaaatgcgaaagatgctgctgcataatgatgatgatgatgctaaaggttcactcacaatcagcagcagttatttattatcaccattcacttttattgctcggcgaataaataatagaataattatttctgcgcgcacaatttttattacgcctcgggggcacaacgccaaaacagcgcaaaattcaatttgcaaaaatgaacagccgacgaagcgaagggacggcgcctattcgaatcgaccggcggcgcttcatttgcatggaaattgcctttgattgtaccgccgcggggaaagtgcggcggcgcggggattcacttggtacggtaggaaagtatgaataaataaatgcataaatgaatgaaaaggtgcaattgcccaaagcaattagtcgcccattaaaggctttggcgttgtgccccaaaaaaacttttgatggagccaattcgaattcaccaaaaaattatttgcgctcaaagccccaaggggtcgccgacggaataatgggaataaataatgtttggatgacccggnntttcggggtcggacagcgaaaagaaaagcagcaaatttt

SEQ ID NO: 22530 - DNA, 1871 bp, Heterodera glycines
  unsure (1)..(1871): unsure at all n locations
gaattttgggggatgatgaaagagatccgccgggggagcagcngggagataaaatcagcagagggaggggcgcgaatttgaagaggacggcaaagcaacagaaaagggggggggaagaagaagtacatggggaggggggggatggccttggggaattatgacgagcattgccctaggggacggcgattcgaatcggaaacagaagaaacaaactcagagccagccgggcaataaaagcgcaattcaaatgcgcacagattgacaaatgcaaagactgatgagtgatgacggacggagggaatggaccaatttgggggtttcgattatcggtccctcaatgaatgcttaaccaactccttttctgtcccttccgtctttcaatttaggcaaatcattaccgcgcggggggaggttcctttccgcttcttcctctttccctttctctctctctccctctcccgctcctctctctctgccctctttttctctctaccaccatcctctaacattccctctttctctctctctcactttccctctttctctctctcactttccctctttctctctctcccatactctctctctcccatactctctatctctctcccgctcctctctctctctctcttaccaaatgctctttcgtgtcttcttttctttctttctttctttcggcctcttttcctcgtccttccatcttttcccctcgttcggtggcggcagtcgcatttaatgaaataaaaatggcttattgaagaaattatgcgctggtggatgaaaaatggacgtgtcggaagggggggggtgattctgtgggggaggggccgtcccgcctacggtagcatttccattcactcatttctctcatccgcctgtgccattggcgaggagggcacaaatttgccgaagtgcccatttcctcgctttctttccgcttcggtgccaacaccgccgcttataataaggggccgaaaggaaagcgaagggaacgataggaaagaaaggcacttttggggcggaggcaaattgaaattaatcgccccggggcaaatccattcgacgcaaaatgtgccgcggtgaaatggcaaaaagggcactccataaattccatcgttggatgaaattaaatggggaaagtgccggacgatgaatgaatgaataaatgaatgaagttgatgggcgaagcgaagccgaaacgaaggggggggggggtacggtattggcaaaacgcaaaatgaaattacatattcggcagggcacggcaaaacccccgcagcggaagcgaaattttatgggctggaaaagttggcaatgagtgcttatgagggaaagaaaagaaaagggcatatttgggggaagggaaagagaggaaattggcacggggagagagagacggaaagaaagaaattggcaaagacagaaaaaggaaatttaaaaaggaaaaggaaatttatttttggaatttaaaattgcgaaaacagcagcatttttgttgatcgattcgataataaaatgggcaaaaaataagcgggggaagggtaaagggttaagaattcaaatggaaaatatgagcgaatgggggagggagtgatgtacttactctctgatcaagcaaacagatgaagcgaaaggggggacaaaaggggcaaaagggggcaactgacggcgatgacaaaacattgcgacttgcgcacattaaaagcggccttttcgaaaccgatgatttttcgcaaaagtattatgttttttttgcggtcgctgcttcttctcaaaagctttcgcaaaagggaggcgtaaatttatgaattgaaatgggaaaaggggtaaaggagacgaagtaaaagcggggggggggggaatgaatggaa

SEQ ID NO: 22531 - DNA, 1368 bp, Heterodera glycines
tttaacttacaacattgccaaatgttgctgaagaaccgtttgtccatgtgctttggtagcgatttccgacgaggacacggcgaagaccgatcctgaaaagtaaaaaatattgtaatttaaggattaacccgctttaaaaaaataataatttaaatttattaattcaccaaaatgcggtgaaaagtgttgttgccaaattataggtctgaatccactgcacaccgacgcactagactcatcaaatgttgacgactcttccgtgactgatgataaatcatccgatgttgacgactcttccgtgactgatgataaaccttcagatgttgacaattcttccgtgactgatgataaatcatcaaatgttgacgactgttcagtgactgatgataaatcatcaaatgttgacgactgttccgtgactgatgataaatcatcaaatgttgacgactcttccgtgactgatgataaatcatcaaatgttgacgactgttccgtgactgatgataaatcatcaaatgttgacgactgttccgtgactgatgataaatcatcaaatgttgacgactcttccgtgactgatgataaatcatcaaatgttgacgactcttccgtgactgatgataaatcttcagatgttgacgactcttccgtgactgatgataaatcatcaaatgttgacgactgttcagtgactgatgataaatcatcaaatgttgacgactgttccgtgactgatgataaaccttcagatgttgacgactcttccgtgactgatgataaaccttcagatgttgacaattcttccgtgactgatgataaatcatcaaatgttgacgactgttccgtgactgatgataaatcttcaaatgttgacgattcttccgtgactgatgataaatcatcaaatgttgacgactgttccgtgactgatgataaaccttcagatgttgacgactcttccgtgactgatgataaaccttcagatgttgacaattcttccgtgactgatgataaatcatcaaatgttgacgactgttcagtgactgatgataaatcatcaaatgttgacgactgttccgtgactgatgataaatcatcaaatgttgacgactcttccgtgactgatgataaatcatcaaatgttgacgactgttccgtgactgatgataaatcatcaaatgttgacgattcttccgtgactgatgataaatcttcaaatgttgacgaatcttctgtgactgatgataaatcctcaaatgttgacgactgttcagtgactgatgataaaccattcaatgttgaccgactgctccgagagtgatgataaaacttcaaatgttgacgactcttcccgcgactgatgataaa

SEQ ID NO: 22532 - DNA, 1659 bp, Heterodera glycines
ttcttaggccgtaccggaccagaatggcttgcggcgacggtgatcaacccgaagaatggagaatggaaaagccgaacaataaaagtgaaggacttcaacagcctttacccatcccggtaagaaatggcacaagaaatgactttaaaaatttaaaatttttaagcaacatgttcaccaagtacccggttggccacccaaccgtggtgcaattcgacaagaaagtggattggcgctgcccggcacatattgtaggcgaggacggcgtccggcttcaggggatcatcaaatgttatgcggtgccaccacggcattgcttgtttgacatccccgtgctgccgcatcggaacagcaagcgcactctcttcccgctgtgccgaacatgcgcgaagatatacccgaacggcttgattgaccccaactacaattgtccacacttttcggacgcagaaaggggtaaaatgggcaaataaagtaatttttacagagaagaattcacaggtttttccacatctgtcacgcacattgagttggaggcggcactccgatcaggctacaaagtgacgcacgtctaccgtgcatacatttggccgctggtgtgcgattggagcgatagcgtgttccattcgtacatgaacaaatttctgaagatcaaattcgagtgtacgcatttttttaaagtaatacaaaatttaaaaacaaaaatgcttcagcaagtggatacccagcaccgtgcagagaagtcggcattgacgaagaggagcgtgagcgtcggcagcaggactacatcaataagccgtgggagggcaacaaagtgtgcctcgatgcgaacaacattacgccaaatcccgggctgcgttacctgtcgaagctgtgcctcaactcgttgtggggccgttttgcactcagaaaccggctcacaaagacggagatcgtggaatgccatgccgagttggccaagctgctgaacaacaccaaaatagaaatcagcagcatcgaccagctgacggagaaattctggatggtctgctacaaggcctgcgatgaggatgtagtggagcacggcaccagcaatgtaaacttggaaacttttgtttttaaatgcaaatatctcaggttgccattgccctctggacaacggcggcagcgcgggttcacctgctcgaatcgctgcatttggtgtataagcaagaaaatggggtgcagcgatatgacacgcaccttctctatatggtaaaatcaaaacaaataataataataataataattgctaaatttaaggacacggacagcatcttctacgacttcaagtcagaactcagcgaccctcttcctggcggccagcagcttggggaactcaccgacgagtaccccaaccacaccattatggaatttgtgtgcggtaagaatttgcgcaaaataactttaaaatgatttgaaattttcagctggacccaaggcctatgggctgcgcaacaacgccacgggggaggacgagtacaaggtcaagctgcgcggcatcaccctggactcggacgcctgcgagaggatgacgttcgagaagatgaaagacatggtgctaaataagttggggcaggaggacaacaacgtccgtttcaactatccgacgaagaacttccggataacgaagaagggcgagat

SEQ ID NO: 22533 - DNA, 1236 bp, Heterodera glycines
atgataagcatccaaccattgaaaatctctcttctattgtcgaaattcttaccaaagatttttcgaaaatttttggtaaggaaatgaaccaaataccttggtaaggaaacggtggtaaggaaacggtggtaaggaaacggttggtaaggaaacggttggtaaggaaacggtggtaaggaaacggtggtaaggaaacggtggtaaggaaacaacaccaacccctaacactgggcttgacccatagtgccccggcgatacaattatactttacttctaatctttctcttatttagaaaacaaaaatctttttgtaaatgggaaaaaaacggttgttgcctttgccttcaacaaatattgagcaagaaaattcgtcattttcctcttgtaaaaatgttgaatacgaaatcattgatgaacgctttcaaaatgaccatcgcatcaaacagcagaatggaagcaacaacaacagctatgagctcagaagtggcaccaaaaaggcgcgccttgaaaagcctgacgaagtattggaattgaattaatttttggaatttttaatttttaggcccaacaaaaatcaaacaaaaaaggggggaggaaggccaatcggtttgtaaattcctttttttattcaattaggttttcagggtctaatccaaatataaaaaagcctcccgccccctctcatagttttgcattgggcccattaaagtaaaaagtgcccaatatccctttcaaagagcaatagtgcctctttttcatgggtttttacaaatttgtttagagcatgttgtgcgacagcccatttgttagtcggagccgaagaagcgaaagaatcttggaaagcaatgtccaattaattacaccaaaggttttgtcaatttttaaatttgaaaatccaaaaaatcaaaatgttaaaaatgtgaaagtcagtttaaaaagcatttctaaagttgaataagtcgaaacaaaaaattgaaatttcatcgttttgacatcgattttcgcgttttagctaaaaaacgaaagtctgtcaattttttaaaataaattttatgagtcaatatgcgccattcttacattaagaatattgaccgggtttattggcataatgcccagttttagagtctaaacggaaacacaaatggaccagcaattgggaagcgcaaagaaaacaacaacaacggaaagcaaacagcagcaagaacaacaacagcagcagcagaaagaacaacgcca

SEQ ID NO: 22534 - DNA, 2282 bp, Heterodera glycines
  unsure (1)..(2282): unsure at all n locations
tcctctcgcgaactatcagtctcgcccagcactaatgtgggcnaaatttttggaatttaactttcgagagtcnagcagaaaaacaataattttttagggtttataagttttttttaaatttttttttatnttcgcgcgctgctgaaagagtaacagaaagaaaataaaacaaactttgataacaaaaaaaaatttcgcaaacaattttttggcttttattttatgctcatcatttccaaattttgcacaattttttgcattatttttgcgaaattcggccgattcatctcacttttgttcagcacccaattgttgtacaaaattcgccattccttcagcaatttttccatttctttctgggtttgccccatcttggcaaggtcaattctgagcagattccattcgattgtgtgcatacagtcaaaagtcgcataatcccaatccttgtttcggaacattttgttgatttcattttttaaaatgggcacaatttggttcatttctgttttgtagaaaatggaaaattttggtaaaatgaattccataaatacggtgtgaaacattaggcacaacattaacacataataaggcattttaagcgaagtgaaaaattcgaaattcattttaaaggaattttaactcgaaaaaaggcttttactgaaaatgcgcttttcttataattaatccgtaaaatttttccagccattatttcgctttctcatttcaacagttttaattttggggtgccgcccttttaatgatataacacatttacatattaacctttgtacggatcaaactcaattttgacagctttggcgtattgcaccaaattttcgccaaaataattattaattaaattcgctccgctgtaaatttttataatcaaaaaattatttaataatttaaatttaaaaataatttacgagtgttctgtatcactgcacaattcctgctttatcaattcaaatttgctaattgtcacttcaattggctcgacgccattaaacagaatattttgattttttctgtttttcataattcgttccaacaaatcatttgaaaaattcaccaaaacgcaaaactcactttttcggattggcactttcactttgtcgtcacttatttctgttgacatcgaaaaatttaaaattcgtagaaaaatttggggcgcagaaggctcaacccaaaagtgtgcattgtttgcttcaccaacaattttaagcatttgaataatttcgtaaatggtgggagaataatcggacaacaaacacaaaaagtcgaaattttctttatttaaaaatgatttaaaaattaaaattagcttcccactttttatttgttctctttgcaacattcccaagcttcttgcaaatagcaaattgtccttccaattcggaagttcaatttcaataattttttggttaattttgatttgcgtttgaagtaaactaaaaatttaattgaattaaatattacaaatataaatttattattatttaaattaattaaacatttaaatttgtataaatattaaataatgttttatctacaaaatcaccagtaatccgttatgtcatctgccgaaattgaaatgcatttattgacagaaatgaaaaggttaacatatttttctgccaaacgctcactttccatttgtgccgataaacgaattgccaaagagaaaagcaatttgaacaattgcgaattcactttcgtcggcattgtctttcggcgtggagaaaataccagaggaagttgtgatacgatattttctaccgtaatcacaaagtaaacgttttcgccaatttgacaaattgatgaatttaacctttgattaattgggcaaattttttaaacatttaactaattatacagataaataaaataatgtatttgaataaataaattaataattaggcacatttgaaccacagtgtacagtcgaaccagcaaatgttccactaatgagacgggcagtgccattaattgagctgttccgtcatattttactgatttcgatgcattgtgcaaaatttcggataaaatttggccaaatttcggcacatttttcacaaataagtccaagtcccatttatagtggcacatcggtgaagaacttgagcagctgtacactttaatgatttgactcaacaattcaaccatctccttttgaatgggcactttattgatgaggcctttcttttgctcaaaattgtcttttaattctttcaatttttaatagttttcaaaatcgtctattttttgaagaatttcaatta

SEQ ID NO: 22535 - DNA, 2344 bp, Heterodera glycines
tttgtttttaaagtttttcctgtcaagaataatgaaaagtgcgagaagcattagcggttcttgagctcctacaaaataaatatttgttgggatttttccattagcagaataatgcacatattaatttgattataaaacccattttaaagtactaatggaattccaccaaaaaattaatttactttatatattacaaatattcaacaaattctattgaaataaatcattattttttagtatttttaaaaataaattatacatttttgaattttaatttcatattttcgagagttaaaattttcattttttcctttttagtaaaattttctatatattttgtaatgtcttggcctgatcttgtcaacaacaatttgatcggtaaaattaataattttacatataatccgtgaaaaaaatttttatgaattttttttaaaggcactggtcatgtttctaaggctgcaatttgtggcttggacggttccatttggggaaaatcggacaattttaatgtcaggaatttattttaatttaattttaattattaaattaaaaagatatgatgaattattaattaaatatttttttagaaaattttcccaaaaaatcgcagaatacttttgaaagtttctatttcttgaaattttcttattaaaaaatttcttaacatttttttgaaaatttgttaagtttgaaagtttaaaaaattttcggggtagggatgaagcaaacgcatttttttattgaattaaattttacttctttgagcttcaaatgtttaaaaattaaaaaaaaaaattttaatttaagttggatgccacggaagtaacggcagcgatgaacggactgaagcaggtcatcgttttcaaaaaaactaaaactaattttatattaaaattttagccggatgctgtgctcgcctctggacttcgtttcgaaggagaaaagttagaaaaagcgcaaaatttggcgtcggacaatgggcgccaacttagactttttttataagataattaaatcgataacaaattttcaaagaaaaattttgttttaattaggcgcgcttcagttcgaatgagaaaagttcgacaaaaaggctccaaacatttggcgccggacaaatgggcgcaaagcgccagcttagcctttgtgctttttttcaaaaataaaaccaaattcggtaacaaaattttcaaagaaaataatagttggcgccggttgagtcccagccaggcctacgttaaaaataagcatttgtaagaaaaattttcctagattttttgttctgcaagcggacacggatcggatcatcggtgtgtttaaataagaaattcattcatttttataaatttatttcatttaaggcaaaaagatggccaccgggttcttcatttacaaaacgggcaaaggtgaaaaatgatgaaaacaagaaaaaaaaattctattaatttaatttattaattttttcataactttgctcaagaggaaccaaatttttgtgattttcaaaaaaattatgtccagatgatttaaaaaataggtttttcaaacaatattgtcataaattttttgaaaattaataaaaaaaaatttattttttggcaggaaaatagagaacatttaggagcttgcgaatgatatcaagaattaaaattttattgctttcaacaaaattataggcaaaatttttttattttaatcgttttttgagtgtcataattagggttatgatttgtatggttttgcatattttttctgcgcatatgctatgaagaaaggggctcaaaaatagcatttctgcgttaaattttttgatttggtgaaggtttttagtgcatataaaagcatattttggggttttttgagaataaatgcatatttcgtcatttttgggcttttagagcataattcggtcatttttaacaaatattcgtaagaaaaatgcaataaaaacgaaaaacacacccctaaggatcgactttttggaatttaaaaaaaaatacacccttaaaaattgaaaaaattttaaatttttgtaaaaacttttggaaaaaaaaaaatttatgtatataaaaatgtaattttgttttagcatataataaaaatttatatatttggaaattcaatatttttgcaattgtctaaaaaatggtccttagcccttgttttggtgttttaaaagtcaactcttaatttatacataatttttggcattttttgagggctaaaagccatttttggcagttttttaaggcatattttagtgcatatttgggcatttttcgggtttttagggcatatttggtggatttttagtgcatattttatgcgcattttggcattt

SEQ ID NO: 22536 - DNA, 945 bp, Heterodera glycines
tgatgatgacgagcattccgtgccggacttggagccgctgtcacgcgcgccaccggccaaaacggaggacgaaatatacgaaaagcacaacaaaaatagtgcaaaaagtgactttcgatttttttgaaaaattgctaaaaatagctttcattttagcattcgggggcatatatgatagataacattctcacaattttgtcgagaaaaatggaataaaatgccaaaaaagtcagtgttagggaaagaaaaggaaaagccaattggcgttaaaatcaatgaatcatgtgcacgccaggccttgctttttttcaaaattaaggctgtcatcaaaattccaattttagcttccgaaattttctataaaatttcgctcaaccccctcttttaaatttgaaattccgcccgcacagttacagtatgcaacaggaacgggcagtgcgcggcgtactgtgtacggaatcggcgctgccggccctcttttctccccaaaagtctttggaaaaagcgcgccgcgaaaaaatgttttgaaaagcaaaaaaagaagtgatcagaactattttattgctgattatccccccccccgcccccggcgctctcctctattcctctccatcccccttttcaacccctccccctcaatccctctcccattttcactttcttttgtcccaccctcattgtctcgctctccttcgcattcgccaacccttctcccctacccattttccctatccccccaatcatttgtctagtgatataatgatgagaactagcgggtgcgtgaaccgtcggatctgtgcctgggataaagcgcttcgcgcttgttgagcttcgctacctagataagttatgggttgtgaagatattctgaatttttaaaagattatctgggatttttgggccgcttcgcgacctcaaacgggcgcttcgcgcccgtttttaaat

SEQ ID NO: 22537 - DNA, 1194 bp, Heterodera glycines
ttttcatcgttcatctttgtttggttctttcttcctctattcccgcattttttatttgtggcacacaaactctggcaaaaacaaaggagttgatggccccaaaaattcagtatttaatcacttaaatctttcttcccaatcactgcaatatgcttatttctagatttatgtacctcttctattattaccattaaaattctgaatctacaatttttctgggctccaataaccaaccaccgggcgcctcctgaaactgtttttcatcgttcatctttgtttggttcttcttcctctattcccgcattttttatttgtggcacacaaactctggcaaaaacaaaggagttgatggccccaaaaattcagtatttaatcacttaaatctttcttcccaatcactgcaatatgcttatttctagatttatgtacctcttctattattaccattaaaattctgaatctacaatttttctgggctccaataatcacctagcgcttcctgaaagtgtttttcatcgttcatctttgtttggttcttcttcctctattcccgcattttttatttgtggcacacaaactctggcaaaaacaaaggagttgatggccccaaaaattcagtatttaatcacttaaatctttcttcccaatcactgcaatatgcttatttctagatttatgtacctcttctattattaccattaaaattctgaatctacaatttttctgggctccaataatcacctagcgcttcctgaaagtgtttttcatcgttcatctttgtttggttcttcttcctctattcccgcattttttatttgtggcacacaaactctggcaaaaacaaaggagttgatggccccaaaaattcagtatttaatcacttaaatctttcttcccaatcactgcaatatgcttatttctagatttatgtacctcttctattattaccattaaaattctgaatctacaatttttctgggctccaataatcacttagcgcttcctgaaagtgtttttcatcgttcatctttgtttggttcttcttcctctattcccgcattttttatttgtggcacacaaactatggcaaaacaaaggagttgatggcccaaaaattcagtatttaatcacataaatctttcttcccatcactgcaatatgcttatttctagatttatgtacctcttctattat

SEQ ID NO: 22538 - DNA, 1665 bp, Heterodera glycines
  unsure (1)..(1665): unsure at all n locations
gcattccaggccttgactgatctgtttacaaaagattcattagattttttagattgtaatttaacatttaaacggaaaaatgacttatttcgagtatttaggttatggtccaaatgtgtaaaaccatgtaaaattttataagtagttaggaggtcaaaaatttttcttcgtttttcaagagtagctaatttaaaaaaccgaagccgttggtcatagggaatatttggaagacaacattttctgaaagcgattcgagtgaaatatttttgacatttttcaattttgataatatgcgattttagttgcggattccaagattcaggggtatattcaagaagtgaacgtatataactatcataaatatttttccaaattgcaattttctttgatttaataacacggaaaagtaaacgcatacggtagtaggcgttacgggtaattttgcttatgtattcagagaaagtaaatttattgtcaataagaattcctaaatcacgaatagtttcaacttcacaaattgcattatcattatttttatattgttctctggggttattttttccgaagtaaatgataaaagttatattaatagaaattttaatataccatttcttataccaatcagagagaatatttaaagcgtggtgcataacaattctatcattttttgttttatgtacagaatataatttgacatcgtctgcatataattttatagaaatttgtttaggaattaattcaggtaaatcattaatatatatcaaaaacaaaagtggcccaagaacagaaccctggggaacgccagagctcattttatattcagaagagagagtactatcaacccgaaccctaaaggtacggcttgaaagaaagtcagatatccaatttaggattttacccctaataccaattttatgaaccttatataaaagtaaattatgggggattacgtcaaatgctttcctaaaatctatatagacacaatcgatattcttattattataaataccatcataccaattttcaagggttgaaattagttgtgttgtggttgatctaccccttataaatccaaattggtgttccaagaataaattgttctttaacagaaaatcagaaatagtccaacaaataaatttttccataattttacataatgaacaagttaaggcaattggcctataattcatagggttacttttgtccccttgtttatgcagggggataataatcgattgtttccatatagtgggaagttttcctgtatcaagggagagtctgaaaatttcagtaacaaaaggagtaaacgaaagaaaacaattttttaagagtctaaaggtaataccgtccggtgatgtgttatttctgttaggtaaggttctaagtactttaccaacagaaacaatgttaaattctacgtcgtttattgttgaagaagaacaagaattatcaaaatcaagagaataattattaacaatataattttcagaaaaaaattttgcaaaaatttccgctttagaaattgaatcagaaataaaagaagtattgtattgtataactggcggatcttctaatggtttaaagtattttctaagatacganaataatctggtcttatcacggnatagtattttatttctttacgggantgatatttcttatttg

SEQ ID NO: 22539 - DNA, 909 bp, Heterodera glycines
aatatattttaaaatgttaggattggcaaaattataattatttactctcaaaaatactccagaaaaatttctcgcgtgctttctttctgatgactggttttgattgggtagaatggtgatttatatacgcttaatatattttaaaatgttaggattgacaaattataattatttactctcaaaaatactccataaaaatttctcgcgtgctttctttctgatgactggttttgattgggtagaatggtgatttaaatgcgcttaatatatttaaaatgttaggattgacaaattataattatttactctcaaaaatactccataaaaatttctcgcgtgctttctttctgatgactggttttgattgggtagaatggtgatttaaatgcgcttaatatatttaaaatgttaggattgacaaattataattatttactctcaaaaatactccagaaaaatttctcgcgtgctttctttctgatgactggttttgattgggtagaatggtgatttatatacgcttaatatattttaaaatgttaggattgacaaattataattatttactctcaaaaatactccagaaaaatttctcgcgtgctttctttctgatgactggttttgattgggtagaatggtgatttatatacgcttaatatattttaaaatgttaggattgacaaattataattatttactctcaaaaatactccataaaaatttctcgcgtgctttctttctgatgactggttttgattgggtagaatggtgatttaaatgcgcttaatataattaaaatgttaggattgacaaattataattatttactctcaaaaatactccagaaaaatttctcgcgtgctttcttacagatgactggttttgattgggtagaatggtgatttaaat

SEQ ID NO: 22540 - DNA, 1074 bp, Heterodera glycines
ccttggcattttcaccctttattttccttggcatttttcccgtttattttccttggcattttccacggtttattatccttggcattttcccccctttattttccatggcattttccccgtttattttccttggcattttccccgtttattttccttggcattttcccggtttattttccttggcattttccccctttattttccttggcatttttcccgtttattttccttggcttttccccgtttattttccttggcattttccccctttattttccttggcattttccccgtttattttccttggcattttccccgtttattttccttggcattttccccctttattttccttggcattttccccctttattttccttggcattttccccgtttattttccttggcttttccccgtttattttccttggcattttccccctttattttccttggcattttccccgtttattttccttggcattttccccctttattttccttggcattttccccgtttattttccttggcattttccccgtttattttccttggcattttccccgtttattttccttggcattttccccctttattttccttggcattttccccgtttattttccttggcattttccccgtttattttccttggcattttccccctttattttccttggcattttccccgtttattttccttggcattttccccgtttattttccttggcattttccccgtttattttccttggcattttccccctttattttccttggcatttttcccgtttattttccttggcttttccccctttattttccttggcattttccccgtttattttccttggcattttccccctttattttccttggcattttccccgtttattttccttggcttttccccgtttattttccttggcattttccccctttattttccttggcattttccccatatattttccttggcattttccccgtttattttccttggcatcttcgccctttattttccttggcattttccccgattattttcctcgacattttccccggttattttc

SEQ ID NO: 22541 - DNA, 1529 bp, Heterodera glycines
aaaaaaaaggacgcttaggaactctggattaaagctttaggcctatttttttccagagttccctttgtctgaaacgcacgaaaaatttatttttatgaatatttttctctttaatttacacccattttaaaatttaaataaagcggattgaaaaattttattataaatttaatttgcacaatggattttgattattagagctaatatttttaggttttgacctatttttcctgtgctccttcccaatggcctgaaatgcacgaattttaaaatctaaaaataattattcaaaatatgcaatcttttaataataatacatactattgtaaatcactattatatttctaagaaacaaaagattggaaaccacgaaaaaactggatttcttatggacaaaagattgacttgagtaaatcaattgaataaatgttgcaattaaatttatttattttggtattttatattatgttggtagaaaaacatataaatctgtaaaatgaaaagtcaagtgtagccgagtataaaaatttttatttttaaatatgaatacggagaaaaaaattcaaaaaataattataaattcctaatataaatatatttcatttttttcaaataaaatcatgttgaaaactagacattcattttagattaaaaaaacgaaaaaattaacttgctaaaaaatgttatgaaaataaataaaaactaaaatattaccaactgttgatataaatagaattggcttcgtcatgaaaaaaagaaaatgtcaaaattaaaaggaagccataaaatgattatattattattttttatataatttttaataaaaaaatatataaattataaggatattaaaaattataataaaaaggctttttcaataattaaataaagtaattttaatgatattaaatatataaccataaaaatatcgcgtgatttttttgctaaaattatattttatgttttattttatttattaaattaaaaaaaatatttgttataaatattttttagtttgtaaatattttttagttaattattatatttaatgaaatttatttaagtaattcaaggagagtactatttatttgtaatgaatcgcatcactattttgtttttataagattttatttaattcattgtagttattaaaattttgttaaaaatcaaaaaaataatcgattaacttttttttaaaattttataataacgtatatctctaattatcccaccccccccccccccggcggaattattgttgaacctcctcagaaagatgggggggggggattattagatatggggaataaatgtagacggggggattaattttcgactaattattagtgaaaattttttgaaaatacggtatgtctaaaattataatcaaaatatttactccatttcacaaatttaaaatttatttatatattttttcttttaattatttttgctgttttattgtaatgtgttttgtatttagcttaaataattttagtttcaatttttattatctcaatgatgatata

SEQ ID NO: 22542 - DNA, 1046 bp, Heterodera glycines
agagaagtcagaagaagaagaaggacacccgaaaataggagaaaaaaaactgtgaaaataaatatgtattgtaaaatgcacataaaaaacatacactggtgatgcttcacaacggacgaaactcaactcgtacaaggccaatttgtactgctccaactcgtactgttttgatttcgacaaaaaatcgtcattacttttgtcaaaatcgacaaaattaaacatttttggtgccattgaatagcgcttaatgttctctattttcttgaaaaatttcaaaaaaattgattatatttgaaaaaaattatggaaaaaatatttttatgcgattttcgtccaaaattttttttaaatattttttgaaatttttcatgaaaataaagaacattaagggctattgaatgttactaaaaatattgtattaggttttttctttttttgtcgaaaaaacagtatcaattggccaagtacgagttgagtttgttaccgttcaaataacatgtagcctacaggaaaaaaaatgtaaaaaatgtgcaaaatgccaaatttaaaaatttccctgcggcattcttttttgggttgttctgttctgttttgtgtctaatggcttttcctctgatcacttatcacagctgataccatttccgcctttcatacttttccaataatctgtaataataataataaataaatttaaataaaataggaaaaataaattaatttttaaattatttttacttggccgatcgggactgaattgcctgcgcattgttccgcagctgttcagtggcatcaacagttgagttgaggcgatcgccacgttcacccaaattctgaaaaaataaataaatttaaaaataatgaattatttaaatttgtttttttgtaaatttgatttcaaaaatgggttttttaaatcattgaaaatttctatatttaatctctcatcaagcagctggggcgggggaggattaaatcaagcttctttgataaaggatttttcaatttcatttaggatttggagtacattatggcagggacatataatg

SEQ ID NO: 22543 - DNA, 2581 bp, Heterodera glycines
  unsure (1)..(2581): unsure at all n locations
aataatgataatgcaaccttaaataaaaaagaattactacataaatctaacgtaaataaataaatattcgttcatcctatactggatggaattggacgattctcttcgtgaattggaaaaaaatagtaaaagtaaatgagaatttaaaagataataatttaacgaaatattattaataaagaaaacaaaattcatttttataacggaaaacagaacaaaaataatgtaaataaaacaattaacagcacataataataataataataataataataataattgatgaccaatcaaaaagatgaataaataaatttaaatggaaaattaatttatcctatcaaataattgtgataattaaataaatttttattcataatgacaaaaaaaagctaaaaattaaatattattaaaaacccactaattaaagaaagcctattttcattaaaactaaataaaatatttaaaaaaaattacaaaataaaaacagttcgtgcgaataaatataaaaaactaaaataattatagaaaatgataaatttactattaaaatctggttaatgattatttttaattgcaaatcataaagatataataataaattattttgttcataatgtattttatataatttgtattattgaaatcattttataaaatctattttattatcattttgtaattaaaaagggaatgtgaaataatataaaacaaaataattagcacataatgagtgagtgccaaatcaaaaagatgaacaaataaatttaaaagaaaaaattaatttaccctattaaataattgtttataaattaaataaattttattaacaatgatttgtttaatataagcgcttttccttgccattccagtagttaccccccaagattttggcccttaattttcagccccgccatttcagtcccaatggaaagggacgtttcagtaccaaatttaaacctttaaaaaacacctataataaatatatccaatcccagaagaggtaaataattgaaaaaacatctgaaggataaaacccaacgccaaatcctattagagaaggaaagggaggcagagggaggacgtcagctgtcatgccttatagggaagggaagggacgcatgccacctgagcgcccgcgtgtgtgccatttaaatgctcgcgtatgccatttgagccccagagttatttttacagcgcagccatcattccgtttggcgttttgttgatttgcgcaaattcaaaaactatgagtggcattcaacatacaaaactttgcgggtactgtatgattcccaatcattcaggtaaaaatttagatcagtgatcatgatatgatatatcttcctctttcgctatgcaagtccggcattttccattacaaatctcattatatattaaaacattgtatgtgtccttgcaaattttacgagtttttcccgttatgtccatggcaatcattacccaccccgntgcaaaattaaagtgaactaaaaatttaatctataaattcacagagggggggggacggggtacactaaattaaaacaggttgtaaaaaatgcaaaattcacagaaccgggggtacaacaaaaatttaatcaggtttaaaaaatcattcatcttccaattccaattcgaatgtcgtgttcctggagttcgaggatgtgtcatctaatgtaggatcaaaaaaaaaaattttttttttctaaaataccttcattgtaattcatttgcacgcgacgtttattcacccctttcgccacttcgtctgcggtccctccaacttcgcctcttcccgcgtcattttcgagaatctgaaaattcgattgttgatgatgctcacaatcaggcattgtgtaattaatgtaggtatttaaaatgattaggattgcaattttcacaaaactcaccggtcccagtggaattctgttccgcagctgcaccaacagcggattgtcaaaattcgttgtccgactgctgctgctgctggttgatggcggcaacgctggcattggtgggaaaggcatcgacggagtagccggtggaggagaagcccacggaggcactatctaaaaaaaaattggttgaggagtaccatcgccagtattacccatttttcaatataattttttttcacagcaaaatatttgaaaaaatagtttattttcaaacttacgtgtctgagtttcggcttgtcccgaatttgttgcatcatattggtccatttggcggtggatagcagcgccaacggatttaacggattttgcggccttgagagaaataaaggcggagggggcggatgccgacgagcattcaatgaactggccttaaagcaaataagttaagtgaattccattccaaaattttcgaaaaattatttttatggacgaattatagatttttcaaaaaaaattccaaaaaatcgctcaaatttttttgaagtttttttttcttagaattttcttataaaaaaaatttctaacattttattcatgaaaatttatttctaacaataaatttgaaaaattgaaaaaaaaaattctcggtgggcagaggagaaacgaggcccgtcccatacgga

SEQ ID NO: 22544 - DNA, 1672 bp, Heterodera glycines
gcattcgcatcatcggcagtggcacgtgcccaagggcgatcgaagtgaaagggacggcatttctcgcagtccaatccggtggttgcgtgtttacagtcacaggaatatctgaacggatgggatggataaaaggcactgatcagaagaagagaaagaaagaatgtcgaacaaaaagtgtaacacgaaaagaatgttttttttttatttaaaaaaaaaaattatttttcttgctaatgatgcaattcaatgggttcttttcaccctcccccccccttccgttatttatttttcccaaattcctcctttctgatcagtcccccgcccccgctcaccgtcccattcggtcgatcacacatctgctggcgtgtccattgcatttgcaccgtccgcccactgccaactcggccattgcataaaaatacctttcccggactctgtcaggctccggcagttccaacaccgatccgttgtcccttcggattcgctcggccattttgtcggattcagccaatccatataattcggcctacaaactttgatcaatttcagtgtccgccactttacattgagaattgcctgatccatgctcagtctgttgaacaccacgcgaatgtcagtggccgtaacccaatcctaaaaaaaagaaattccaacaaaatggaaaaatgccgtgcctgaaggacgggcgactgttcgaattccatcgcagatggacgcccttcgagggttgcgaaagcgatgcgatcggaaagaggcgacaaaatgtgcgaatcggtgcaacgggcgacctcaatttgtaagagctgtctgtctaattgggtgtttcagctgatacggtcaatttgatcactttccttttgtctgatcactttaagttttgatcactctcatttggtctgatcactttgattttgtctgatctgtctcatccctcccacctgctcattctctttgcttattggcacttccttcgtcctttgatacactttttcacattcggtcgaataaaattgcatcggtgtccaagttcgacccctatttgccgatttgaaaatggccaatgaatcggccaaacggccgcaaaaatgcagcgatacataagtgatcttaatgacatcattaattacacaacgaaacttaggaaaattaatcacttcaaattttttgcccaatgacaaagtcaacgaaacattgtggggaaatgcggtggtcggttcgctgacccaacaagtcaaattgttggcattgttcagatcagtgagcagtgccgccggatgggccaattgggccaccgatgggtcgcacaattcgcacttttcccggagaaggccttcagcggagtttgccaacacacagaaactgaaacgaaagtcggggaaggcatgaaagaggaggagaaggaggaggaggagggcagattagacgatgatcagactgatcggaccaaatggaaaaaaccaaacgaagtgccaaattatgggagtccaatggccaacgttatggattatgcaaatacggcgaatggagccaattttgatgagaaattggagaacaatttgagggcccgtaccaaaagaacgaggtaagggtaaagttaccctcacaaatcagctgcgggtaacttttaacccgcactaaaagaatcgagtaactggtaagtttaccctcagct

SEQ ID NO: 22545 - DNA, 1936 bp, Heterodera glycines
aaaaatttccaaaatattatcaatattaaaaaaacaacaaaaaaatgatcaaggattcatctgataatttcgggaaatacctttcatatactcaatgttacggggatgtcggttaacataattgtgatcttcgttgttgggaaggtcggcgtaatagttttgaacttttgcaagaattcgggcattggcttcacggtattttttctttttttgaggcggctcaattcctttgataattttgagtaatcggcatctgtagtcttaaatgggaagtagttacaagggggccagggtcccacttttggcgctaaatttgaattcaaaaatttgaattcaaatttgggcttgctttttttctctgcctatagggctatttcgtttattggctcgtgcctattgagcggttttgggaggtcagaaggtgtgggacgtgtttggcgccaagtttagaatttaaaattttctttttttctctgtcagaaagactgtttcgtttttcgtcatacacctattgaatggttttgggtgatgtcagtggaaatgaggcgctttggcgccaaatttaaattcaaaattcctgaaagtgttgaaaattgaataatttatgttttaaaccaggccagcgaccgagttgcggcgccggtcgtggcgctaaatttgaattcaaaaattcgaatcaaatttgggcttgctttttctctgcctatagggctatttcgtttattggctcgtgcctattgagcggttttgggaggtcagaaggtgtgggacgtgtttggcgccaagtttagaatttaaaattttctttttttctctgtcagaaagactgtttcgtttttcgtcgtacacctattgaatggttttgggtgatgtcagtggaaatgaggcgctttggcgccaaatttaaattcaaaattcctgaaagtgttgaaaattgaataatttatgttttaaaatattgtactattatttttgtaaataacaaaattttttattctcctagaaacaggaaattttttaattgttttcagcttttgtatcggaatgggaaattttttttctacgggaattgctgaacgtaattttacaaaatttttaatttttctaatatttttctacctaaagctgacgttgaacagccgtttggaccagaccagcggccgagtgcgccggtcgtgtgtgtgtgtcgtcgtgtgatgacttgggcatggaatgaacgagtaaccatgctgctgctgttcattctgctcgtactgatgtgccagttcgttttttggaacatcaccatttgagatttttttgaatttttaaatgattcgatgctttcaatttgatattaaaaaacttttttcattctttattaattttattaagtgtttttcctcatttaaatatcgtgaatattttcttagcagctaatttattgtttgtttttgtcagtggccgcacttcgaagaggccgattgttttgcaggtttgattgggtttagatgaaaatgaagagaaatcagggcactaatttggtttaaacatccaatgatcattaatgaacatctcagttatcaggtcatttctattttagggaattgttattagcacatgtttaaacacttctaatgactcagctttcatttgatattgtgaatgttaatcacgtaagaaaaaagttatggtccgataactgagtatgatcattgtatgactcataaagtgcaattcgttttgaactgattaggaactaaattcgtaatctaaaacaaaaattataatttacatagtcatgtgtgctaatattggttgtatgatttacaccgaaatcacccatggcttcccctattatttagattgtcgtccaaaaaattgtgagcacggtttgctttcgtcattatcgtcgaccatttgaccgttgaccatcgctgctgcaacttttgtttgg

SEQ ID NO: 22546 - DNA, 2174 bp, Heterodera glycines
  unsure (1)..(2174): unsure at all n locations
aaaaaaaatgtaatttttaatgcgatttgtttacaggtttttgtccaaaaatgaccaaaatttgcgattttgggctaattttttaagaaaaaagtgactttatgcaataaaatttcaaaaaattctcaatcatgagaaaaaaattacattttattcaagaaagattcctaataccatattaataataataataataaataataattctcaactatgagcaaaaaaattgacataatgccataatataatcaaaatatcgttgaaaattacaaagatttctcaaatttctttgaatttttttaaaacttttctaaatgttcattttcaaggacgtccttggcatccaaggacattttttatttgcaagaaagagggcccaatttcaaggacgtccttgccattcaaggacggatgggagccctgaaatatgttatgtttatgcggttatgacaattttgtgcatcgatgcttaaaatcggtttcaaaattttcatttttaaataacattaaataacatttaaattaatggaaattgtctttgacacaaatagaaaataaccaataaggtttaaataattgttgatattaaaaattccttaagaattaaagtatcgggtttaatcattcattatcaacccatttgattttgaataaaaataattctcaatcaataattaagaaatttaaaaaaaaaatttaacccaaaaatctaaaatttttttcttaatttgaggaaattatttttttgaaatgcatgtgcatttttcttatttcgttgtacatagcccaaaattagccaactgaaaataagagggggccagggatgggtcgaaatttctcgttttttaaatttacagagttttttcaccgccaataaactttcaaaacttaaatccaatcaaatttattatgaaaattggccagaaatttctttttttaaagagtgtaattagcttggcttttgatattttttttgtttttttttgaattttaattttcaattcttttttcgacccaccccaaataggcgtcactatctaaaaaacaacaaaataacttctaatatgagttaattaatgaaattcacattgataatatggaagagaaagagcagccaacagatgcaaaattacacattgaacgaaaacggaccttaattgaactagtatacatatttatggattagtgaataaatatgattttactaataattttttatttaattatcgaaccgtaagtttactaaattataaaatgtcccaaaatcttggtctttggcttccaaattgcaaaataaaaaatcatgacggctcaaattaaattaaattaaactaaagtaagttatttaaatttttcttagaccataaaatatgaaacatttaattctttgataacttttcagaaaaaaactaatataaatttattttctttaaaaattaaataaagcaaagatttctctattattcagttaaatttgattaaatccggttaagtcattgctttattattctgcaaataacattaaaagaataattaaattttaactattattatcattgatatttttttaccatcgatacttttaaggggatttgacctaacaccgtacaaacataaaatatccttgttttgtcttggctcccagctaagaaaaaagttatgctgatttaaggctaaacatcgctttattattctgcaaatagcattaaaatactttgttcgagttcgggttccggggttcaaaattggccgaaatggatacctgcattcttgttcaatgacctcgaaaacgcaaggaacttggttttatgacaataaactttccacggacgcatcatttcccgggcgcccttttttcccattgatactttttaggggatttgacctaacatcatacaaacaaacatacatatccattgtcttgttttggctaacaatttcatactggtacttttaccagatccatttggtccaagctacggaaataggtggaaagctccatgggacaatgcactgttcccaatgcaagtggatgggcatgatcccggtaagcagcacgttatatgttacgcttttcccttgtttaccttgtgcacgcatcatatnntgggtaggcatacatgaaagcatatttattttctcacttttttgtgaatttttgtgcgtaatgaatt

SEQ ID NO: 22547 - DNA, 1364 bp, Heterodera glycines
tgagaaaagttatgtgttgatttagtcaaaaatgttgcaaatttgcactttttgtgaagtggccaaccacgctttcgacctacccggggtccacacgatcgggcactccgttgcaaaagtcgtcgcggcagcattgaatattttcgcatttgatgaatttattgtcaaagtaggcaaggtcacaaactgagctgttgggttcacaacccattccaatgactcggatattgtcatctgaaaattttcctttttatatgcgcaaatacctaaattggaaatgtaaattaaatctcgcttccataaataaaagatggtttaaaaaaaaatttttttttgctgctcgagaccaaagaatttcccaaagctcgagactgaaatttataattaacaccgagaccaaaaataatccttgtttttttgtcgagaccgagacttttgagcagcacacaaataaatccagtaaaatctttttaaaagataaacatttaaaaaaaaactttttattaaagttttatgataaacttctatataatttataaaattttgtttaattcttggtcaaaatttgttacaaatgctattttttctccaccggcacttaatttttgaaaaaaaaaaataattaaatggtacatttcctcaggcagttagcctttgagcagaagacagtgccaggcttgcactggtgttctactttgccaaacacatcattgccaaaccaacacttcagtgctaaattagggtaattactgcataagagatttcaaaatgccattttttccaaaaaagaatctttattaaagctactaagaataagcatttaaaataaaaaaaacttaagttatagcaaaaaaaacaaattattttttgtaccgtttattttgccataattttccaaagattgtttttgtactaaagacacttacaatttgaacttttttcctaaaaaacgatttaatttctttttaaaatatgtatttataacaacaaaaaacacaagacggattattcctcaatccaatcaactctctgctgctgctaattactcactgtttgcagacatcgccaaacatgccaaaacaacaaccaaaaaaagtgacgatgaagccgacattttgattttaaaatgattaaagttggaaataatataaaataggaaaaaattaaaaatgcaataaataaaaataacatttttattgtttttgctttcactatacacaaaaagagcagcgctttagcctaacattagaataaattattcacttatttttataaaatgaatcaatcggttggggaaatcattgaaatgatgggacgtaacagaaggaatttagtaaattaattatgattcattcacactcatt

SEQ ID NO: 22548 - DNA, 1817 bp, Heterodera glycines
taaggaaacggttggtaaggaaacggttggtaaggaaacggtggtaaggaaacaacaccaacccatcattcgtttcatttatttgttttcgtctctctctttttcgaccttttctccctgacaatacctttccttctcattttttctctgtgacattttacaattccaaatcaaaattctttcaatgcttttttaaatttgtataattttctttttcagttcgcctatttttttttgttgtttgattaccaatctcaaaaaaatgtctgacaatccaaaggaagcggagaaacaaatggaaaaagcgatgtaataattcaaatttggattgtccatgctaattaatcattttgcttctttttcagctttatctctgccgactgttggctcaaagtgttcgatttgcttccacgctctcaacttggctgtggcattgcgatggttagccgccgttttgactgtttcgtcgacgaacacttcaaaacgcgcaaatggaaattgggcgacatgattattgaaggcaaaattggactgaatggcgcaaaaggaatgaaaattgtgcaaattgccaatctcggtggaaaagaattgccaatcccacaagttccgttgccgaacaaagtcatcggattcggacgcatttcgatcaagtaaaaaatgaatttaaaattttttaaatgttttgtgaccgtcaacacttgctaattacatttcagcttcatcgaccaaaatgtgctcactttccttcgccgttttgaccgctttttcgcttcatgtacaacaatctttgacatttacgttgaaaatgttcgcatttcggagttcgttctgcgcaacatttggccgatgctcaaggacaccgttctttatgtgcaaacggaggccatcgtttttcgtcaaatgcgtcaattgggcctgtcaacgctcaacgattatccatcacttcgaattttgtcgttgaccgagattttccccaaatttccgcccgacgacagtgccaatgcgtcggatggccaagtggtgaccaaatggctgttctcgcctcgtcccgacaatttgccgaaggtgttcacatgcattgtggattcgccggagatggcatcagtgggccaatggttggcaacaatggaacaaatcaaaacggtgattactcaatttaattcgtctttttcctttttatggtcaaattgaaattacctctttttatcattcgattactctcggtctgtaaagcacgaaaatgaaaacgaatttttggcggaaagcattttgtactttgttatgggcccggaatttactttttttttactcttttcaggcattttccatcgcttcttctcctgtcaatttcggcttctctgttttccttccgccgtccgatccgcctttgaccgttcagccctttgatctgactaacgaattgactggggagaaattgacattgttagaagaagacgacgatgctcttgtggtcctccgttgtccaacagcaagcgatgtgctcaaatggagaaagacggctcatcatggaatgaatgatcgacagaaccaatcggtctcgatgatcacaggagacgttttcgactaaaggagaacaacaattaatatgataaataaatcaatgttaattggttttttcagtaaagaagtgttgtgaattgatcgtttaaatggattgaggtggagaacactgatcagaatcagcaaaagcagcaatgaattgatgaatagaaatatgtgatctttgagtaggggtgtgttttgaggtttaagtgcagttgtattcgatttcctcatgaaaagagatgagataggat

SEQ ID NO: 22549 - DNA, 1441 bp, Heterodera glycines
  unsure (1)..(1441): unsure at all n locations
gcatgcctngnncaggtcactccttaaaaatttcaaaaaaaaaaaattatacgaggaaatgcgaaattcctgttttattaatgaacatttattaattcgttaaaaatcctcacaaattgtgtacgaaaaaattcagaaaagttcaaaatatgtgcaaaattcaacaaacattttctggaatttgccaatttccgcatttttatgtgtattttcagtacgaggtgaactgcttcgccgagctggtcaaatacccgttcggctggtccgagcacactttgcccgccattatcaccggcattcgcagcaaattgccgcaacagagcgacgcgcagagaaaatttgtgagagagcgtttctttagggagggggggggggcaaaaataatttcaaaaaattcattaaaattcaaaaaaaaattaatttattacaatttccccctgtcccctacaaacgtgtacaaggggtggtcacgaccacccccccccccccctcgttcgtcgtaagggggttcgggtggtggggggggggggggtcgtcggcgaaggggaaaagaaggaaatttctgaaaaatttggcttttttctcaaaaatttgctagaaattttcaatttttcttccggcggcgcctatcggcaccgccggctcccgcgttcgcgaaatttttttgagaaaaccgcgccgcaaaaaaaatagattttaaaaagcaaaaaaaaaaaaaaggtcgtcaaaaattttggaccccgtcgtaaggaaaatcgcatatgaccaccccccttggcccgatcgtacgtcgtatgacccttggaagtgaccaccccttgtacacgtatgattcagtggattttatgaaaaattaagcgaaattttttgaaattttggtgaagtaagggctttgaggggtaccaataaggaaatcaaaagttcaattttcaccttttttttgccagaggctgtgcaaccgcgcactccgacaatcgatcaccacaattgctgaagtgtgcggctttgcagcaaccaacacggagctgtgctttgagcaaccaatgcgtgatgccgttgcattgttggcacaatcggcaagtttatagtgaaaaagaaaagtaaaatctatgtttttggaatgttgtgacgtcaaacagcagagagcaccctcccctaaaaaacttttcttacaattagatgactcacaattagaaaaatttttacgaattttaaaactaaaaaaattacattttttaattagtctagggaaggcggggcggccgagtgcactacgtttgacccaccgccgtacgtccccccggcgggtgggggtcaaatgggcaccgctcaattgggccccaggcggggtttttggatataactcctttcataattgacctaattgaatgaattaaaattctttaaatagccctaaatgttctctatttgcctgccaaat

SEQ ID NO: 22550 - DNA, 1121 bp, Heterodera glycines
aaaagcccaaacacttttcggtggtgccattttcgttttttcgtcgtatttattttggcacatattttccacggaagtgcctttatgtgcactttgccattgctaagtcggcactttccctcgtcccttcgcgcaaatcgagaaaatttcgtaatttccaacgcgagagtccctgcgtttcccttgggggtattattccacgtggaaatccgtgcatggcttggaaatgccaccggagataaaagcccaggcaaatgaaactgacaaatgccgacagattcctctgatgttaaaacgccataaggaactgcgaaaattttttttttttaaactttttaaaaattatgaatagagcgttcaattatatgcacaggcattttcttcatgaactgtgaaaggcatatgaaacgtagcttgttaggaagattctaggacgttttccatatgcatatttcgcgatttatgtgcgttttggtgcttatttgggcattttccaacaacaaaaaaaatattttaaaacgcccccttattaaagcggcctttttgaccaaggtttggatgaattatcgataaaattaaattaaattcttccatatttaccaatattttgcgtaaattcctcatatgtgatgagagggaaacgaattttgaaaagtgccgggccaagcgcagaacgacgattctcagcggaacattcgatggctttttgacggcatttttcgtcggcccaacggagtgccttaaatgagtcaaatgatttgaacaataattcttattcgattttgaaatattaattatcacgctattccaaattgtgagctcgtcgctgattctcaattgatcactttcgagtatttcacacaacatattctgatcaatttgtgcaaattcctccgattgcaaaaaaaatttcgcgtttcggtcaatgaaatccaagcagcgaagagcaaaatccttaaaggcaattaaaaaaaattaaattaggattaaattcatttacaaaaaaaattcttcaaaatcagtgccaaaactttacatgttcactgagaaaacgagcatggtcaatggcaaggaaaacattggggcattgaccaattggaataatcccagcaagctttgat

SEQ ID NO: 22551 - DNA, 870 bp, Heterodera glycines
  unsure (1)..(870): unsure at all n locations
ctgcannggtctgcacaanggattacattctcttcaatctaaggggtaagggttgcgaaatattgccaaaataaaccccaaaagatatttatctagcaaatattattagcattaagttgatgccaaatgtattgcattagttagcgaacttctttaaactgaggaagggaaggccattcctcgcgcggtacttccactgcaagtgctggtaaaacggcactttcttcggctccgtccgtcgaagttttttgctgctgctgcttttcttgagcttctccagccgacgaattagcatttgattcagacattttgttaaactttttctttgaccgacccattttttctaaattcaaacagataaaatgcttatttaagtattgcatctttgttttcaaatattatacgtaaatagcaaaatttaatttaaattaacaacaaacagaggtaactacaacgaagcctctagagaccggagggaacgggattaccgcgggaaaaacgggaaccccgttttttttttgcccgagaattgatgaagtgggtttttaagtgaaatttatgatgcaactttgggaaaatgtttatgtttttagttttttatacataaattataattaggacattgaattatatgggatcgacgccaaccccccacattggccccggcacggttgggccccagcatgtttttagactataacttttttctttgtcaaccaaatccaacaatcttggtatcattcgagagcttttcagatgctctaatagcctgccaaattccaaaaaatttcgtcaattttgaacaaatttatgggcaataaagttggaaaatttggttttttgtattcttcaggccctaacttttttaac

SEQ ID NO: 22552 - DNA, 973 bp, Heterodera glycines
  unsure (1)..(973): unsure at all n locations
ttattttcatgttctgatttttaaaattattcatcaaaatatcgctttggcttaattttgttacttttaaaaataaatttaccgttatcatttattagtatatacttacctaacagtttaaagtaccattaattttttagccttgcgaaaatggaaaatgctgaaattaaatctcaacgaaaaaataaaaaaactcgaacatgaaggctgcctgtatgtcttccatttgttgaacgccgatggtgacgtaaaattttggcgctgtgaacatcagcacggcgaattcaaatgtcgagggcgcattcacacaacgaattcaacgccctaattataatacagtttggcttaagggcaatggtgtggaattgggtgatgtgacatttgcgccgcagacacttgcgccgcccagccaaagtgacacttgcgccgccgacacttgcgccgcagacacttgcgccgcccagccaaagtgacacttgcgccgcgacagttgcgccgcagacacttgcgccgcccagccaaagtgacacttgcgccgccgacacttgcgccgcgacacttgcgccgcagacacttgcgccgccccccccccctattttgacataagcgaaacaaacatatactaatttttaacaacgcaacaaaattaatattttcaacaatattctaatcccatccttcgaatcccttcatccccacacggtattgcaatgcatgaatatgtcggatcaaatcatcgtcatttttttcttctttcgcgtcataagcaattaccaattgcctaatagctgagtcattttcgatgtattttttaagacgtggtcgatcggcaatgccccttgtctgatcaatttcgaaaagccgaacacgattgttttgatattcctcttcatctttcattgcctttatgaatctgacataataattttaagtgggattttccganaaatttatctaattaagtttaatataa

SEQ ID NO: 22553 - DNA, 1490 bp, Heterodera glycines
cgacataaaacaataaatattattttaatatatatttaattaattaaacggagcaaaaagatggggagtaaacaggggtggcatcgaaaaatttccgaaatcaaaacttcagacatttttaacaattttggagaggaaataaacatatcgaacacaattcttttttttttactttcaccgcgcattttgcggagcattttttcaaaaaaacttttgggtaacattaggggagggttgtccggcgatgccgataggcgccgcggcaaaaatcttgttgtatatttttttaaacagattttgtccaaaaagtgtccaaatgttgcttttctgagtaaaattttgatgaaatataagagttttgtggtccgacgtgctgtaaggcgccgctgggagaaatttcgttcaaattttaacacgttgttgtcgaaaaattgaccaaattttgcgattttgaggaaagttttggggaatcgatgccgggaaattttgctctatttgttacaaatttcataaaaaattgcactaatgcaaaaataaataaataaaaaatatttatggaaatatttttagtttcttttggcgaaaagtgtaatatcttgaagaaaaccgtcggtaattcccagcgaaatgccatggtacccccggtgttcggttcggcctgttttcgagccgctgcttttcgattttggtttcagttcaatgtgaacaaccctagtttttattaaattatttcattttcacaataatttacctaaaaaaattattttttataagataattcgctttcggataaccgccattttggaattttttttcaaaaatatgaccaaaattttctgaattgctcacttttcattagttttaaattacctaaaaaggcatattcccccccccccccccgacgcataacttttgcaaatcgtattgtaaacaaaaaattggaggaacaaaaaaaatctccaaattagcccagcccatctgattaaacgggcctgggcttccagccagatttggcttactcaaacgcgtctgcgagtttgaccgtgatcgatgtcgtccctgcctcgccttcccctttctttcccttgatcgatctcgtcttggcggcatgcgtccttcaggtgattctggctgaatttctcgtgccgctactcttctgccattttcgatgtcttctccttgctgattttcgggcgaacaatctttacaatatttcccgatagcccaaatagccaaaatgcaaaaaaagccgccaacaattagcacgccaactgtgcttcccactgatcgcttcttccggcgtctttgtcgttggttttctgtatgaaaattgaatgaatgcaaaaactattcaccatctcaaagtttttaaaaacgaataaaacttcgttgaatttttgttttttatcgttttaaatataattaaaaattcagttgataataaaattaggaaaaatcactaaaacagtatctgtcatgacggggacaaa

SEQ ID NO: 22554 - DNA, 1012 bp, Heterodera glycines
aaactcattatcagctgaaagtatgcgcttgtttcgttgttgatgttcgcgtttttcatgagcaaaaaacaaattatttttgaataaaaacacaattttaatgttaacaaaaaagaattacaattttgctccccattttccctaaatttgtgccaaaatttggtcaactcttcgagcatgcttttctgatcaatttgttgtccatctgccggtggcataatttcatttgttgagatttgcaaacgatttgccgtaccaattgcaatttctttaatcaaacttattaaattttgaatttttgcattttggtccaaagaatctaaataaataaataaataaattatttttttaaatacaccttcattaattgaagcacttaattcgttgactgatttgtgcaattttcttattaaatcagccataggtttgtcgagttggtcaatccatttcaaaatttcaaatttatccattagagttggcttcaccgaagaatctgatttttttattattagatatacaaaaaatttaactttttaccattttttccttttttatcaaactttgtcaacgtgatctttccaatcccattgacaatttcttcgatatttgaattggattttgacaaattatttatctagaatgatgattattggtttgcattttttcaattttcttccagccatcgcgaaattttgatcccggacttttgtatccccaaaagttgggtagcaaccctaatttgaactatacatattgtaaaaaaagtggtcaattttagcccaaaaatcttctctgatcacctttgtctggtcacttttgtacagtatcgcttcaatcacactgtaatcgattgcctggctctgatccacaaacagtactttgcctaccatgttgtaatgatccaacagatctcgcacaaactgtttaatttccgtatcatcattctttccgatttctttaggtgggtttttcattatggttttacggtttgaaagccaatttgtttccctcc

SEQ ID NO: 22555 - DNA, 1666 bp, Heterodera glycines
ttacataaaatcttagaaccatatttctccacttaaatgaatagcaatctaatcaataaatttagtaaccaaagttgaataaagcagtacagaaaataaatatgttttaatgaacgaaaataaaatggaaaagcagaaaagattggaaactgtggatgagaatataaaagaatttttaaaaaaaattaaacttctgcaacaaagaatttttactacatcggtgccgtaaaaaattttattaagaaaataatatacaggatatttaattaagttattttatacataatttctaaaaattaacaaaattggtatctgtttgagctcacaaatttacatatatcatttatagaaaataaatattttttcttgctttaaattttatcataatatttaaatgaagaaaattaatatgaatctatttgaagaaaagcataaaattttaataaaaggacagtatacaaattattatttttgatttaaatttatgatttcttaattgaaactcgttaatttaaaagatgctacattttattgcttgaatatgctcagaaaatgtaaataaaattaaatgtatatgataaaaaatgcaagacaaatggcattcacaattcatggtactaaaaatgtacgtaatattaaataaaattaaaaacgacagttttagtttcaataataataaaatataaaacataaagtgaatcaattttaaactgaccaaaatttaaaaggatttttggaattttattattaaatctttgctatttaaatataataaaaaaacaaaagcaatgattttacaaataaaacatactaacaaaactagctgcaccgaacactaataactgacaattttttattagttttttgagtttaaagtaaatgtatttcataaaaaaataaaatttattaaattgacttatattttataaatgcaaatcacaatcaattcttaaatttgcggaattcaatagaaatattattgctttaatttttatttatataaaatatgtactaattataattatcatttattttctttaaataattgtaaaataggtttatttatgtatatttcatctattttgcccttttctcacgtgtatgcgagtcgaatcgtattatagggtaataaataattaatatttgttttttatttaaatttcacttaatttcctatttcctatttttagttttattttttatctattttaagaaggtatgttttaaaataaaattaaaataaaatagttaataaatccacaaattattctttcattttattataaattttaaaaagaatcctttttagtttattttcttatatatttaataatacaattattatgttgaaatttgtattatttataatcttctgctgatttctgacttttttacaattgtattgtatcagaaatattaaaaaattaatttttaaatagctaggatttaggtttttacatgtttttagccaattatatttcaggctattattattatgattatcatgaaaatgaaaatatcgattttttttagacaatttactaataattattcgaaattttcaattttactagcacaaatttttttgatttactcattattaaatattaatcttattgttttgaaatggaatttattatgcattaaattattggcaattagtaaa

SEQ ID NO: 22556 - DNA, 1598 bp, Heterodera glycines
  unsure (1)..(1598): unsure at all n locations
aaaaatttcgtctttgaatttttttgcaattgttggnccagtgtttggtcaaaatgcaaaaaacccacaaattcatctttagcatatngtacttcatggagaatgcccactttaaaatcagataagcatcttttgaatcgtcgttttggctaagcacttggaaataggcaattccgccnacacatttnacaaatgtcaaattgaacactgtccttttctgcttgtctgagtaattagtcaataatatcgttgacggatttcgtagaattgtgtctgaaagtgtatttatatccaaaaaaacaaatccaaaaaaataataattttttttgctggtaaatttcactaaaatatattttttattttacattttgcattgaactgacccatttttacagtcttcttgtattccacataaagatcatccataaatttggcaaacgtttgtacattgttggccaaattaggctctgatttccaagtgtaagatgaagccgtacaaatggaaacaccgaataaaatcagaacaattagaaaattgaaatttggttgcatttttctaaattttaattaaaaaatgatattttgcttgcgttttttttctaaattcttttattaataatctacatatgttgggacaggatttttaagcaccaaaaaggtgaattaagcacttaattatctatatcaaaaattccaaaattaagcactaaacaaaaaaagaaaaaaattttacacaaaatatagccaaaaccctaaaaatatgcgctaaaaatcttcaaaaacatcaaaaaaaattgtttttgcttgaaaaatctgcaaaaaaatttaaaagctttaaagacttctcctgattacatttgaaacttttagctgcacctcttaaaaaatttctaagttattagcttgattttgaataggttctatgctacatacattttaagaattgcttaagaaatgtatttggctttatgcaaataattttttagaatgatggcttctgcttgtgccatggcccatattaatgccgtccatcagtcattgtttggcattgtgtgcacgtgcgttattatgccatagaaagaagcccttggcaaacgaatgatgaatgaatactacacattaatgcttaaaaataaaatcactctttttcttttcctgccttatatttcgcatattaaaattctctgtttcttttcctgccttatatttcgcatattaaaattttctgtttcttttcctgccttatatttcgcatattaaaattttctgtttcttttgccttatatttcgaaccttaaaatactctttttcttttcttgccttatatttcccatcctttgtgtgcaattctttttttgtcacatcatttctttattaattctttccatgccatgtgcaatacaaaattatatgcactttcataataatttattatatgcaattgacataatatttttttattattattgattaatttaattttaatttaaatttaattaatttattacaaaaaaaaatacaaagtcagtgattgtctataaaacgtaataattgcttttattattttaaaaaatatttttttaatttttcataatttt

SEQ ID NO: 22557 - DNA, 2018 bp, Heterodera glycines
caacaacaaaaacaacagcatcgggagaatatattttgtttggtattgtatatgtaggtgtgtatatatgcggaaaaatggtcgggtgtgggggatggggggggggggtaaggtaaataaaagcatcaaaattaaaaaaaaaagaagcaacaacattacccattagggcgaatgaatgaatgaatgaatagttagttaatttaaatttttgagcccctcattttcccatgattccataaaaatgaattcgatcattaaatcactttggcattggcattctgttggtggtactgtccaccgttctcttcctcattttgctgcacaaatttgtacgcccggtacacaattgagtaaagccaaattgagacaattacggccagaaagtaagtcgacaacaaataataaaagccaaatgcatgaaatcctacaaaatttttcgggtttaaatatttaaatcacaaaaaaaaaataattaccttaatatttcataattagtttataaaatatcataattaggtgcgattcatcagaattttttgataatttattttagaaacattcccatcaaaatgttttcttggaaaaacattaaagacttcattataacaattaatggtcaatttcaaacattaccggtttctgtgaaaaatgttattgtagcaattattccgacaatcgctgttatgacctaaaattcacgaaattaaatattttattttattttaaaaaatatattgccaaaacatacggtttaatgaccagaaattattgccagaaaaaacatacggtagcgatcagaaatggtcgatacattttgctggttctttgcccgcgcatttcgccaacaattatcggaaaacttccgcacataagcaaaatacccttaaaagaaagggataaatgaaatatttgaaaaaacaaatttaattaattaattttttctgacggattttggtgcaaaaattgcaaaaaacggttacacctaaaaaatagattgttgaaaagtgccaaaattggtgccaaaattaaattaacggcatttctgtgccgaacattttgctttttatataatttcgaggaaaaaattttaacgattttttgtttaagaaaattattttcttaaaatttttttgtcatttacaaaaatggtaaaaaataaataataattaccgaaatcatattaataaagtggactatggaaatgcgataaaaaaataaatttatggcagatagaaagccaaaaaagccggccaacaaataaatccacgcgacgacaagtgagccctgacagataaaataaatttaagcaaattttaatgaggcaataattaattaatcaattagacaatgagccatgacaaataatttaatcaaatttcatgaggcattaattaggcattaactaatttagtttatcagtgattaattaatcaattcgagattaatcaattattaaattacttaagcttaattattaattcattatttagtgaacactgttttaatgattaattaattaattaggcccacagttgtcacgtgaaagccgcacaaacacatccatttgcttgagcagctataacagcacaggttcatgcgtacaacaaaaattactgtaaatctgataattaactgtataatttgagttaatataggaaaaaaaattgaggcattttttcagctttaatttttattaattgacacgaaatcgtcaagataatttaaaaatgaaaaatttaaaaatttgcatttcggtcaaataattgatttgctaattgcacaatttatgtaattaaatgtttcgtcgttaattgctgtccaaattgttttgttcaacacattatttaagcgccaaatatggccttatcaccaccattaacacatatgacactaattaggccattaattggttgacgattaactgataaattttgaaaaaattacattaaattttatgagtttggcaaaatcaacaatttgctggaaaatgaagcaaatgaatatttaaggcaaaagct

SEQ ID NO: 22558 - DNA, 1517 bp, Heterodera glycines
gtagagtcatggtcaaaaagtagggatactttgcttcattattaaatatttgttttggtaaaaatattatattgaatttaatagcattttaatgacttttaaatggaccaattattaaaaatatgcaaaatcatagatagtaaatgagaaaagaagggaaaaattaaaataaaaagatgcattttcaaaataaaatcaattgcttttaattaaaaaataagaattttttaattttaaatttttaaatttataatttttaaaataatttaataatgaataattaaattaaaaaatgttggaggctagctattttgatgcttatgcttaggctttcattttatatttgttttgctagaagcactatattaaatagtaaacataaagtgccccaaatatattttgtagcattttaagggcttttaaaatgggccaattatttaaaaacaactgttttaacctcctttattgaggcagcaataattgttttaggcttaattctgaaataattaaaatgtgatttaaataactgcaatgcatttttgaccactcaaaaaatgttaaaaagatccttgttaataatttgtatgctgtcatttatgtatgttgttgtcatcatttaagaaatgaatggttaaataaattcatttatttcatttctatttgaaaaatataattttcttttttaaatacaataaaaatgtaaatttgtctttgtaatttctgtttttctatttgattactctaattgatcaaattttatccgacaaaaatttacattcttaatttttggcccttgaagtcgggtgaaaatttgattaaaatagtccaaatcggtttatttaaagctgaaaaaatggataaaaattccatgaattttagttttattttttcaaaattctaaaaattcaaaaattaggcccgaatctttttgtgcgccggaaattcaaataaaaatagaaaattcataactccgtttaagcgtttttctataggccatttttattttgaaaattttcattttaggttaaaaaataaatttgtcccattgaaaagaaattgaatttttaaatatttcaatcatccttcatttcttccccaaattgttccttccaatttcaaatattctttctagcaatttttagtatttcagcaatttttccgttcgctcatttttggatttaccatttttattgccaataaattttcatttttttcattttttttcttttcaagtaaaacatttacccattccaaatagtttcttccatttgttaattctatcataacttacagcaatttttatacaaattttttatatatttttgccattctttttttgagtattttcttcctttttgcttaattttctcttttattttataatatttttcaattatttctcttttttcttcttctttttcttaccacttttctccaaatatttcatcaaatgacttttgttgtagttttttattttctgttttaattggaataattagggtaattaaaagtaaaat

SEQ ID NO: 22559 - DNA, 1523 bp, Heterodera glycines
aaagaaacaaatatatttaaatgtcaaaaaccagagattccatcaaatacccatttttcgaagataaatgtgttccaaaaaccagtgcgaaattgtcgatttgacataaaaatgttatacactaaaattaggataactgcactaagccatttgtttaaacccgaaaacgaaatatttttagcccttttagaacttttccaaaaaaagaacttttttacagcatatttcgtacagaccccaaaaaggaaattttttattctaccttttacaattaaatattaggcattaacgttgcataatttgaaggtcatatattttttattgaaaatttaaaattcagaaggaataattaatttattaaaacattttctgtgggtgatgtgccccccaacgacgaaaaagaaaaaatattttgttccacttaatgttattcctagggtctcaaattcggtactttttgttaatataatttaggcctagaagactatggtgggccttcagttctcaagcggcacacaatgggggctgaagatgtcgttggggcgggctttttgggcggactgccttttttcacgctaaacagagaaccctttcgtaatattccccctcccccattaaatttttatttttattttaaggcattgacgaagtgtttttaaatgataacagctttgtctttccgacgtttcgatgatcggcgaaaaaactactgcgatcgttaataccggaccaatattcttgtttaatgttaaaacattatttatgccgttaaccaaataggcccgtaaaaacttttagaaggagcataaagaaaaattttagtaattgttttcaaaatttacaactcaagaagaaaaaatagtaatacgattaaaaaatagttaactgttgaattttttctttcggagagagtgttgaggaaaattccctccctttggtaactggtataaaccaaatattttttattgtttgttgttgttgaataaataatgttgaatttgaccagttttccctttttaaccaaatttggtaaaatgaaaaaaaaatgtggaaaataaatgtttgtgttttatttaacaacagttcaatccaaaataaattaggatttatatattttcgataaatttttgtaatccgttaattgccttccgctttattcgttcttcagtacccgatacgaaagaaatgtcaagcttctttatttttgtggttttgaggccatatttttgacgaactaaagaatttgaaacacaatcattttaatggttttcgtcccgatttgtatctaccttggacatatttcggacaggtttcgacgatcttagccaaatggtgcgcaattggtcgatttaacattgagttcgaagattgcttccactgtaaccatttctgggaatggtttactttggtcatggtttcgcattcctcgattggacccactcttcaaatccgggccaacctaagatttcccttttttttacatttttttagtaaattatgaaaaaaatattttgttgattttt

SEQ ID NO: 22560 - DNA, 1439 bp, Heterodera glycines
gtttttttcccggttttcccagccaaaaattcccggggtttcaacccgaaaaggtcccggtcccgggtttgcccaaaaattccggttccggggcactcttataggttagaataaaaattttagcagtaatttgtaatttttgtttagtttctccaccgatttggcctccctttacccgacgatggccgaacttcgcgtcatcaaaactgaattagagttggctgtgcttcgttatgcctcaaaaattgctaacgaagcgcacaaagaagtgaattatttgtagtaaaagggattattcgggttttctttctaatctctgccgaattaattttcggcttttttcggttcgtccccaaattctgactaaaaattatgctgggaaatgccgttaaactgcccccatttggcaggtgatgcgacacgttcggcctgagatgtacgagtaccaattggaaaggtgcgcatttggtgcaattaaattctcgctttttggttggatttgtaatttccaaaaatcctcccttaaaaaggtctcatctatcaaacctgtccctttgtaaaactaacaacaaaagtggccaaaaatggcacaaatttcgtgtctctttcggcaattatttttattttttgctcttttttttgggcctctgtttccgaagtttctccccaaaaatgccggaaaaggacccctccaaaattttgtcgaattctgtgccttttcagtctgttccgccacatttcctattacaccggcgggtgccgtcacttgggttacacgtgcatcgccgcgtcgggcgaaaatgcggccgttctccattatggccattgcgctgcgcccaacgacaaagtgataagggacggcgacatttgtctgttcgacatgggcccggaatacaattgctacagtgagaggggaggggggggggaattcgaacaatcagaaggggaggggggggatgttcgaaattcatttttaataggatcaaatggggcaatctgattacccttgggagagttttcaatcttttctcccccttttgctagtatccgacgtcacctgctcattcccggccaatggaaagttcaccgaaaaacagaaaatcgtttacaacgccgttttgcgtgccaatcggactgtgcttggcgcggcaaagcctggtccgtttgttttgtttactttttaaaagtcgaaaatattaaatgttttttcttttttggtgtccgatggactgaaatgcatttgttggccgagaaagtcattttggaggatttgcttcgtgccggcattctccggggcgacgttgacgaaatgttgggaaagcgaatgggcgctgtttttatgccgcatggccttggccattttatggtgggcgaatattataaatttctaaataaacataaaaggaattctaagggttgggtgggattgtccttttaaa

SEQ ID NO: 22561 - DNA, 2148 bp, Heterodera glycines
  unsure (1)..(2148): unsure at all n locations
aaaaaaaattttgggggttttgtcagtaattcgctcctcaattaaaattaaaaataaataaaatcatttaaaattgtcaaaggaaattcttttccggaataataaatgcccccaaacttaaattgttagcttaagagattaaattgtggacaattgaccacctaaaatctctgagttggtcggtcggtctgtttgagtgttgtgaatgtccaaaattgtttgctcaacatcaaaacaattttctcgacaatgtgggtgaagttttatagtcaatctgggagagatattgaaaaaatatataaaaattaattttcaatttgaaaaattcgaagttattacaatttaatattaaaaaaaaattattttataaatttattaatcaactaatgcaaaggaggtcaataaaataattgaagtattgctttctcaaatcaaagtagaaccttgaaattttaaaaatatttaaattataaacagaaaaaataaataaatttatgaaattttttctcgagaatttgtttaaacattaaatttcttaaagatcttcaaatttgggtcaattatgcaacaaaaaatggagattgagagcaacgatttttctggcatttttaattaaaaaattgataaaatgatttttaattatctatattcaaccatcatatagatttttttttgtttctaaaatgtaataaagttgcttgcactaattggaaagatttattttcatatttaaattttattgaaaaacaatttagataaatctttcaaaattcaattcgaacaattttgcattatcatctccggaacaattcttaattatcgtcaattatgccaccttcacgtgaagtgtgaactcgcactgaaactttctttttagggtcgtcgtcatttttctcatcttttttcacttaaaatttttatttatttaaaatactttttagataaatttaatttttattttttaaattaatttgaaatttactgaatttatcgtcatttttctcatcttttttcactttaaatttttatttatttaaaatactttttaaataaatttaatttttagtttttaaattaattcataatttactgaatttaccatattcatcttgaacatatttgcggtggtggtgtggtgttttaactttaagcagcaaatgctttttgagtccatgttttccgtctctttctaaaattaaaattaattcaattaaattaaattaaattgcaaaatttaatgtttttaccacggtacaattccatcaatcggtgacctctcactttaagcaatacgtgcttctttctgccgttcacttctgaaataggttacacactcacaagttgtcaatcatatttattcaaatttatattttttttaataatttatatttttttaaaatttaaattttaaatgcaatttaaatgttttaactaaaatgaatttaccatgttggaccaagacaaatttgtgtcgtttgtgtccatttttttcttccgaagatgctgatgatgaggaagaggcggttgatttttcgttgtacactttttcacctaaaaaaattaattttttaattccgaaaatcataattaatatttctaattactttttgcggtcgtggcttcatctcgttcgacattattatggtgatgcttaacattcacaacaacattacgatgatcttcatcaacaccagatgatgaagccgttttttgaggatcattattgacttgaacatctgaaattaataattttacaaataaattttataattaaaaacagaaaatgcaaaatttttgaaatatgaattttaccaatttttgattccgcttgcaaaaaatgtgcagatgccaaaatcagcagcagcagttggcacggacgacttgcaagcatttttttatcttagtagaagtatatttaaatttaatttaaaaaataattatttaattctcttttatactgatgggaaatcacataggtaattgggattaattatttaaatcttattttatgaagaaacactactanattaacacattagagattgaatggtaatcgcaagaaacgattagagtaattaactaattaattanattttttaaccgaaggcataagtggtgatgaaaatgttaactaattgctttatatga

SEQ ID NO: 22562 - DNA, 1335 bp, Heterodera glycines
  unsure (1)..(1335): unsure at all n locations
cattattattcacttacggggtaaatgttagcgtttttgatcaaaaagcgtctttcaggctttaatttgaggtattcgccacgaaaaggcacaatttttggtaattttgggcagccggagagacgcgcgactctatcggagaagagaccggcgcaagtgatcagaaatttggagtcgatgatctgacgatgaaattaaagggagctcgaaaaacgaggaattcacttgggcgccgttgggggcaccgatcagtcgcaagggatgggcggagtcatccgaagggccaatgccctcgagggaccaatcgcaaaagacagtcccacccattctctggaagtctcttaaagacaccaatcagtaaatggcgaagtgatcgaagcaaactcggcgaattttctggtgaccatcgtccaatcaacaattcccgtgtacggcgaccaaattgcctttcgacccttagatgccaaattgttccaaatttggccaaattggcattactaacgcgacagtgcggctcaatttgacggatgccgtcctcgccaatcatttcgatgcttttgcattggttttgtttggcacggtcgaacaatgcctttggcaattaatttgcttaaaattcttcttctcctccctttttcccacttccaaacggcgaatttccgcctcgtcaagggccacaatgagtttcccacattttttgtgggcgatttcattgtcctccaagtatttgtaggccaaatcgatccctcaaaaaagtaaaaaatcgcactgaaaaagtcggaacgaaccgctgacgcaaagtttggccttcaaactgcccggngcataataaattcctaagttttaagttcaaaagtttgacgctttgtgttactaccggcatgaagcactccgctgttatggccactctgatgggaagctgaaattggcattggtaaagcaaaaaatgggggaggggggacggacggaccgaggcgactctctttctccagaagaacgacgctcagattgggcttgacaattttgagctgacgggctgaaattgtctacggactttttggggaaaacagagaaaagcgaagccaaaggaaacgaattgcaaaccgacggcacagccgacaattccgccaccgacgatggcaacgtcaaacaatcggcggatggcactccgatgcatttaaattcttccaaaatttaaaaatattttattttgcagaatttacataatattttgaccagacagacattcgaacagaaacccattcaaaggtattaaaaatgaactcaaacaaatgactgaaaatcattcatttgccatcgcttcggtcactttct

SEQ ID NO: 22563 - DNA, 1007 bp, Heterodera glycines
ttttttcaattcttaaatagcgtgaaatgcgtaccatctggtaaaaaacaaattctgtataaaaatacaaaaaaaaaatttcaaaaaaaagtgaaaaaattttcaagagggctctttgcaactagcgcctattattccgtcaaaatttaatattttttaaactaaatttaggcattttttggcatcgttctgccccgccattttcatcctcccattttccccattggcataccttttcaaaatgcaaatggccaatttcccccaaatgatccgccaatttgttcagtcgattcgtcaaagtgctcattttttcgattttttgcaggtcgaatttcgcttcgacactttcgtaagtctgtaactttttcctttcttttttccttttctttttctaactttgtgattcgttctgagtaatccttcgaactctttgaagcgtttgttgtggacaaaagcttcttcaaaagagtgaatctcagcccggacgaattgcgaatgagagaagagatgggacgaaggcaaaggaattgtccgctcaatttcatcgattgacatcgaattgaattgaaaggatggaaaagggaaaacgatgacagctgaaagaaaacgatgaataatgaacgaaaaatattttcataaattccttttaaattttaaaatttagaaactaaaatttgaaaaattaaatttaaaaaaatgttaaaagtaatcaacaaaaagagaaaatttaatcatttgaaattacgactaatgacaataataaatctacgcgttcagttcggccgtcacgatttggccccagcatgcttttccactataacttttttctttgtcagccaaatcaaacattgttggtatcattcgaagctcttcacatgctctattagcctttacaaaaagcgaaaagattttcaagcctggaaaaaattttattaacaaaaacttcaaaatttcgagttttttcgcaaatttcatgtataacttttttgttaattgtctaatcgcaa

SEQ ID NO: 22564 - DNA, 1878 bp, Heterodera glycines
  unsure (1)..(1878): unsure at all n locations
atatatttaaataaataatccaaaatcaatgtaaatttctttcctaacgatcttttattaaatttgataaacaaaagaattataagttaaactttcgtgatattccataaaaatctaatggaatttatttaaaacatttatttttttaatttaattatttccattaaggcttaaaatttctatatgttttatattttcaaaaagaaattatcttgcacagactcctttatttttttacattttgcagaaatgaatttgaattttatcaaagaaattatttttattgtattaacattatcatttttaaaaaatttaagccgctttatttactttttttttaaaagttttatttcatacaaaacatatttaattttcctttaaatgttttacagtaaagcttaaataaattatttgatgttggtaaactatgctaataaatcatttaattaatttttttataattccaagcaataaggactcaaaccgttccaggattctactgagctgtgacgttccttctgttgcgatttcaaattttcttattcctttaaaattaattatatttatttgtattcatctcccatttattaaagaataactgattattttattattcaaaaagtttcttttactacaaaatacatttattaatcttctttaaatgtgtaaattaacaagtgaattatgtgaaactttttaaaataatatctttaaattaataaaattttgttttatattttttacttgtttttaaatatattgatttttttatattgcattagaaattcattgtaatatcatttatttggtaaaaacttttctttttttaatttaaattacttttaatttatttagaatatttttataaatttaattccatagtgattttatttaaaactaatttttatttatttaaataaaatttataattcttttacttattatccattccatatataatcatattcatttatttatttctactaatatttactaatatttgttttttaatttagcttatttgttagaaataattgcccgaaatagtgacaaaaatataacttttttaattcaaaaaatcgaaaattaaaataatggcttagttttgcattttttactgccataatcaaataaacttttgcaaaattcggaaattttccatttttggcttatttttcgcacaaaggtccatttttttcatcgacatttttgttaatcattttatcgtgaaaacacccaaaataatttgtttttgaaaaattttggatccttcgagtgcaaaacttcaaaacaagctaaaaacatctttttggtggttttttcaaaattttgcaacggtattgacgcgttttgtaacattcgaatcacttgtacggcttctattttttccattagcgttttaaagagtgactattggatttcaaccgaaatatttaaattatttataaaaaatgtcaaaataggcaatatttttttttgtacttttactcgtcaatcgaaggaacatgtcaaaataatgaaggttaaaaaataccaggaatatgttggttataaaatttattccataaaatatcaatgtataattgctattatttaaattgtaattaattttgcgatgggttgcgaaaaatattgattttaactataattatgttttttaaataacgcccattttgatggttaaaatattattgtgtaattatttattaatttttaaatattcataaattgataaatacggagggtcaaaggtggagatgataaagaacaaaatacaagcaaaaaaaaggtaaaatttttgatgaaaatcattgaataattttttnnaagcaatatgcttnttaatagatcanaaaattttgagtcaccttttacttg

SEQ ID NO: 22565 - DNA, 1772 bp, Heterodera glycines
cgtccatatcctcgggcaaaaagtgccgttgctcatatgccgcggttgtcggttcgtcctcgtcgctgtgccgttttgtcgcattttgacgacgttggcggctctcctgctgcagagtggacagaaaattcagctcctcgttcagacgaccaccctctaaaaaattagaaaaaaatccaacgttttatgggcacttttggaccgaaattgcaaaatttgggttctccgatggcatttttcggcaatgccgtgtggaaaaaaagaaattttcataggatttttaataagaaaaccatgcaagattcaaaaattacccaaaaaattcattcgtttgaaccaaaaaaaggaggaaaatacgccttcggggaaggggtaggcccatttttatgtcaaaaaccataaattgggttcggtgtgtggatagagttagtcatcaatgaatttcaaaaaactcaatgattttaattgaaaaaattgttgattcttcaatggaaagaaacattttttccaattttccctttaaatttattatagtaaaaactgacggacagtgtccgacccggtcaaatattttttttcaaaatttttacaccaacctgaaacccacagcttgacaatgtccgtctcaatgtacacatagcgcagcccgcaacaaaaaaaggtgaacagcgaaagaacgaggacaatgatcagccaggcgtgccgttggacgaagcagccgatgccgaacagagagcgttggatgagaatgcgcgagtacaggggccaacggaagccgatggcacggccctagaaatttggaaaaaaatggattaagtcgatggaaatcggtggcacaattctgtaaattgaggaaaaatgcctatttaaaaaatatgagacgatggcacggccctggttatttggggaaaaaggttgatggaaatcgatggaacaattttgtaaatttgaaaaaaataaaatgctaatttaaaccgatggtacttattccatagaaatttgagaatttatggcagaatatagtgaaatctgcaggctatggccctgaaatccgtaatttgtaacaccaaaaattaattttgccacaggaaagtacccgcaaaatctggtggagtgccatgtccgcgttgaaccatgttggccgcttggagaactctctcttccacttgtcggaaaatgccgtttcatccggcgcttggccaaccgccaaacaacggtcaacacactgaaaaaaatgagtgagtttaattaatttggaggagtttgaaatttcaaagcgaatcaaaaaagggtttcaaatgcgtaaatcaaaaaaaaaaaaaaaattttttttgaaatttttcatggccaatttcatatgaaagttgaaatgggatatttggaaatgcccttcaatgttatagattaaaataaacggctctttcggaaatccgtattaaaatttgggattaactttcaaaaattggtgggggatgtagcgaaatttcagtcatccccccccctgaaaaaaaagtttaaatgtgtcaaaatggcatttttttgagaaatgccaccatttttagcacatacattcggttcgatgggctccaattcgtcctcctcgtccccactccatccatcgatttcctcctcatcgtcgtcgtcatcgtccaccgacatttcgttgttctgctgctcatcgtcaagcgatgcaaatccgcgccgggcggcccggggcgcctccagccaagtgatcatacaaaatgcaaaatgtgtattaaatcaaattgcaa

SEQ ID NO: 22566 - DNA, 1263 bp, Heterodera glycines
aaatcaaggaggcaagctgattattctcgagcttatgagttggctcagcattttgagttgttgttggccagtaaaagaccaactcaagtctcggttgccgagctattgcaaatttgaaatatttagcttaacatatataaataaattcaaatgataaataaataattaataagtttaaaaataattaaatgtataacaattattttagtttgaaaaaaagaatgaaaaataataatactaaacttgcttaagcaaacatcactcaatatatagttgggcaaaaatgataaataaaaatttttatgcataaagacaccggatccccacttttatagactaataaacacatttatgaacttcatttatttagaaaaacgaaacgaagagattcaatactaagcaaaaacaaataataaaaataatttaaacattttatgataaattaaaataaacaattacaaaaactatgttaatcaacattatttaaaagaaaaatatttgaaagataacaatattcctggttgtaaattcaaaattatacttttaaaaataaattatttttaaaactttgaacagataatgatttatactttaaatgttaaagtttagctcgttttattcaaaattagttttatacttttttatgaaattcaaataattttaaacactgaatattttataagaggacccagagaacttaaaaaaatctaaacttcaaaaattaagaaaattattataatgtgcattatagtataagtaataacaaaaaaataaaagaaaatgaatatgaatattatatctaaatttgattcagataaaagtgataaaatcttttgagtttctgtgttcataattaaattaaataagattaagttattaatccaattattaaaattttttcttccagagattaagacgaaacagtaactgatgacacaactgagcgtggtaaaaaatcttatagtcaaaatttttgagttcaaatttttgaaaattaatgattataaataactaactatatgttcttataacaaaaatataatttctgtaattttaatcctggaaatttttatttattttttttgttttagtgtggatataaaaaaaatccaaacaaaaatataataacaccataaacttttaatttaataaaaaatgaaaagatttaaataaataattagatgatcttataaaaattttcatatctcttttttaccgatttttaaggggagtacatttaaaaatttttctaaatattcacaa

SEQ ID NO: 22567 - DNA, 995 bp, Heterodera glycines
ctgcgtagcaaaaaaaaaaaatcaaaaacattgttatccgaataaaaggaaatacaagatttaaaacaacatgaagaatgacaaatgaatattagaaatactttactaaaaaacaaaaatgagatattaaataatttacaataaagaaaataatgagctagaagatatgtattcgatatttaatatttttattataaataaatattcatgctgcaaatagaactatagaaatgatagtgtaaaagtaaaaaatactctaacgatgcgaaaaaaattaattcaaaaatatattaaaaaatttttattttttaatactactttaaaaaataaaaaaatagatattttacaaaataaaaattgctgttagatggtaagggtatgcacaaatacaattccaaaacaataacattaaaaaataattaattcatgaaacatgattaataataagcgcatagatttacgagcacagtgatgatgcgccgatgtcaattaataatttctaattaatctatttaagaacaaactaaaatgaaaaataaacaaaatattaaactttaccaattaagaaatattaaacaattttaaattatttacaattaatgaaatcaaataatcaaaataaacaaataaagttatgagaataaaatcagagcccctttgcacaagattcagaaaacgttctattttgagacgtagatcgcaagttatatgattaatataaataatttaacttcaattaaaacaaaaaagatcgaaataaaaaagaataaaagccaaggagaagtaacacttgaaaaatcaatttaataaattattttaaaattcaaatgggattgtaatctaaaagttaaacaaacccataaaataaaataaaataatttcatataattgctaaaaaataaataaataacaaatcaatatgaaaacagtaaaaccgcactaatagtattcgtctattgagtgaagacgtcaagattaaaaggaaaaaattgacc

SEQ ID NO: 22568 - DNA, 835 bp, Heterodera glycines
  unsure (1)..(835): unsure at all n locations
caaaggatggaaagtganatagcatntaaagtgggtgaaaaatttgtatgtttttataatgaaagcgttaaaatcgttcattttttatataaaggtcaaattgtggtcatttgtaacaggttttttcaattattatgggtatattttactttattacttactgcatttttgtaaaaaaattacactaaaaaagcaaaataattgcaaaaatagtgagtgaaaaactgcaaaaatatttatttaaaatttaaatataaaaattttttcatttaattatgacattaaaataaaaattttggctcttataaaaatttttttcgtgccttttcatcaaaataactgaagaaacaatttttgtttaatcattttgcagaatgttaaaatcgaaaaatcattttttaaatacccttattttttcgatatttttattttgaaattttttaattttccttcactatgattaaaataaattaattaacaattggacaaaaattttttgttttttatcgtttttcgaaaacacaaatttgcgtcagttccccgcccccccnncccgcccttcaaaattttgaaaaaaaaaataaaataatagaagactcagaaatttgaaaattttttataaaaactgatgacaagctaatgtgataaaacaggttaattcttttcctttcagtatccctgcaaagtttggggcgcttctgataagtttcacaaaaaataataaaaaattaattttgcaaaaatcaataaataatgaaccctcctccttaataattttcctgcgcccatggtactcactcggccgcttcgcggcctcgaggggtccttcggccca

SEQ ID NO: 22569 - DNA, 1093 bp, Heterodera glycines
gtttcttttcttcgttgagattagtcacaaatcaaagcgaagtttcgctttcacaaacagaaaaatattaagaagaaaaacagtttttggcctggttttgtgaaattccgaaacaataaaagaaaaacgaaaaaagaaaaaagaaatccgattcttttccccgcggtcccttcgattcgctcacttttcttttcctttctttttaattttctgcttttcgctgcgttcgttagaaatggaatttcgtttaacgaattaattcaatttaaaataaacttaaaaatattttatgatggaacgccgaaacagcaccaaaaatggcggtctgtcccccacccctcaagagacgaccattaatttgcccgtttcctccaatcgaagggcttcgtccgcttcgattctttttgcccaggtccccaaatgccattggctgttttgtttcttcgtctgtttgaccttcacttccccccaggcgagtttcgacacgggcctcgacgtgagccgcgcctcgcaattgtcgtcccagcggaatgtgctgagtacgcacgtgatggacttgggcagcggcagaccgtgcagtggcatccaatgcaaagcgttcaaatgggacaaaagccattcggaatggattcaaatcggagacacgtaatttggcgcaccgtccgcccgaactgacgaacaaatatttgagggtgaccaatgcgcaggggcgcattccgctggtgcaccccggcacttcgctgtccaaaggcctttacaaattgcgttttgccacgaaggaatattacgcacgtcaccagctgaagtcactgtttccgcaagttgacgtagggaaaagaatgaatgattttgaaatggatttgccattgttttaaggtggtcattgaggtggacgacgccagcgaacattgccatgtgccggtgttactcaaccatttcggctactccgtttataagggacactgatggaatattccctctctcattaattctcattttggtgtatattaaaaacaaataaaataaagaattaacggtttgcctttcaatgttttgatgaaatcgaaaaagaaatcaggcaaagcaattggat

SEQ ID NO: 22570 - DNA, 1075 bp, Heterodera glycines
  unsure (1)..(1075): unsure at all n locations
tatattaaaaacaaaataaaataagaaattaacggtttgcctcnaaatgttttgatgaaatcgaaaaagaaaatcaggcaaaagcaattggattttagtaccaaaagctgtgctgaaatggctttttctttgtatcgacccctttttcgtctgtctccccccccnccctccctccgccctcttcgattccccacttctctcccttttctctctctctctttccctttttctctcccttctctctctgtctttttctttctctctgtgttagcgcccgggggataattagtgcgatgggtgcgtctgagtgttggcgagggaggagcattccatgcacttcatccccatttctctgcttctttccgctgtgtccaggcacaaaattcgaatggtgcgacgaataaatattttggccctcgcccaacccaatccccggagggcatttcagacagaaattaatgcgcgcgcacattaattcccctgcctcccctgagggcattgggggagtgaatttcgtttacgtcaatggacaacgaaaatgaaagtggaagagaagggaatgtaccggatgaagtcgaactctgatggtaatccaatccgatagccgaaaagaatgttaattaaacgtacacgtacaattgacaacattaacccctcgggggaacattaactaaactaactggtctaatccctccatttgcctctctaattatgactaattgggctttatcgattaaaattttggtcttttgggacactgcttttaatggctgcagaaacctattcatattcatccttggcttcgttctttgctctttccaagccaacgattaatcacttaatttattaattggcaaataattaattaattaatgtgtccgttgtgttttaaaaagggttttttgattgacaaataattgtttttcttatcactctcttcgcaaaatatgataatatgtctcatttatttttgttagcagcttccctttctttattgatcacttattttaattggtttgtattacttagggaggccanattaaattttaaaatttaattttttttttttgatatt

SEQ ID NO: 22571 - DNA, 1200 bp, Heterodera glycines
aatacgttttccctcttctcttcccccggggtaaagcacagctgccagctgctcgtcgctttccgatcggctggcagcaaaattgggggaaaacgaaccgtttgtctttcttcttcaacgaccctttgaatgttggctcaattttcgccgccacttcttctcttttcaccaacttttttttcatcttttttgtgtcggttttcttttttgattttttgttgcttaaaacttaaatgagtaaatgtttggttttttcgccttaaaaccccccaaaaaaaaaactctgaaattcagaaacaaaattcgtattttttagttaaattatttaaaaacattttttgatggaagaaatgcgttcagctttttccgtcaatggaactcctaaacgatgattcgctcatttgcgtgttcaatgaactccactttttgcacaaaatccctcttgagtcggtttgtcgccgatggaatcgaattttgagagtaatgtaaaaatattaataaaattcattatttttaaataattattcattttttaaaagagtcactcgccgtacagcaaaatgcaaagtgttaacatcgccgaatatgtcaacggacagaggcaaaattacaacaaaaaagatcattatcaggttatgttcattatgaaatttaaattaaatttgctcaacaaataccgtctctcattaggcaaccatttcgggcataattagccgtgccggcccccatatccgcgagttcgactttggccagcggtggccacaaatcccgcaaagcatcataagtcaactaacaatgtgttgaaattaattacatttaaaaataaataaagtattttttatttttgccagaaaatgcaaaaatataaccaaaattgagatgggatgggtgcgattggaggcggacatttcgccattacttgaacaaattgccgcacaattagttgatttttcgctggaagaaacgagttggacgaaatcggagaatgcggcaaaagtgggaaaagcaaagggaggcaaatgaatttaaaaggattttgatgaaaggttccgccttttttgccaaaaatgcgactgttaaaacggctgaatttgcgcaaatttgacgaggcattggacgaattggcacagcttgacagtggcacgatggagtgagcttttgcttaccaagattcactttttgtcaccaagattcatcccc

SEQ ID NO: 22572 - DNA, 2898 bp, Heterodera glycines
  unsure (1)..(2898): unsure at all n locations
aaattattttgaaatttatggcaaaaattttctcaaaagaaaaagtaggaaaaaaccagtgattatctgattaaaataaatcggtttttctcanataattcatttcttttctgctgaccaattggctgcccgtgttcattantagcaatcaattaagtgcaatttgacgaatggctatatatcaggactcgcattcgtactttgatgccaagtacgtacttgggatntgggctntcatgcttggaaaatgtaactgtactttttccaagaataatcttggatttccaagattagacttggaaattggcattttaacacatgattatcaaaaatacccgttgttatgaaaaaagtttacatttttgtcattcttctgtctaataataagcattaatttttttacaccatagagagtgcggaagaaaacattttggcatttatgccttttgctgtccgcacgtcaacggaattcacacagtttggatggcccgatttcgatggttttaccgacatgatgcaaattctgtggattttcctctgccggaccatccgctgtctaagcaaaaaaaaatctactccaaatcgcaaaactttgtaattttttttacccagtttgtctaggtttttggccataacttttctgaaatttaacaaaatttttcgattttggcatgctaatagagaatacataaggctatcgaatgctttaaattcattcacttcggacaactatgaaaagagttatgctccaaaaaccaggctggagcccagttggttgcagcccagtcaaccctcacccttaaaaattactagggttgtaaattatcgtggtgcgacttttggggatttgcaacttggggacccgacatttggggaactagacatttggggacctgacttttggaaatcccgacatttggggacccgacttttgggaatcgaacgacttttggggatccgacatttggggaactagacatttggggattttattaaaacaaaaaaaatatttaaaaatttatcccaaattagacaaatttacaactgctttagccagagttaattccattgcaagaaaaaacaaaataatatttttaaaattaactctaattactgactctaagaaacagaaaagatggcctcggcattttgttgctgtacgcaattagacagtaaagtcgcctttaactttttgaatgcccttgatgaatttctgttcccgttggcccttgggaaaggcgttttaaataaaaattggaaagggtgtacggtaaatactaaaatgtattgttatttctctattgggttgtggttagtatgggctcaaaattctgctacctcaccgctgtgagtccggaatagctctaactttttttttcgtacatctaaaaaatagatgtccagaatgtttgttttggactaaacctttaacaacagctgttttacctactttttcgaaaatcaagtaatttttgtaaatgctcattgtttttaggaaaagaactcggtataaaaaaaatataaattctcccacgttccaaatactaaaaaaatatacaactaagtttagaatttaaaaaagcaaaattttttagctattatctgtaaaagaccgttaagaccaccgttatataaaaaattaggttctacaaaaaaataaaaagcagctgttgtaaaaaaagaacacaaaaataatcttcgcaaacacaaaatattttttacattagtctttaaaataggtcctataaatttaggaacaataggaataggaaaatattaaactttaatctttaaggatgatgaaaattcaaagttatttattatattttgttttattttctttttcgttaggtgagataacttttcctatgcaattttcattagtatcagctttggtggaattgataacagatagtttaaaaacaaaaaataataaagatgtttctttaacaaaaattaatgacagagttatttaaaaatattgttttgtcttttcttgcatttgaattaactctggctaaagcagtcgtaaatttgtctaatttgagataaatttttaaatattttttttgttttaataaaatccccaaatgtcgggttccctaagtgtcgggtccccaaatgtcgggatccccaaaagtcgggtccccaaatgtcgggtccccaaatgtcgggtccccaagtttcaaatccacaaaagtcgggtccccaaatgtcgggttccctaagtgtcgggtccccaaatgtcgggatccccaaaagtcgggtccccaaatgtcgggtccccaaatgtcgggtccccaagtttcaaatccacaaatgtcgggtccccaaatgtcgggtccccaagttgcaaatccccaaaattcgggtccccattaaataatttttggacaaaaaatactaatttaaagaaaattttcaaagaaaaatataaagtaaagaggaatttattaattttgaagaaaaaagtaaatcgaaaattttccacttctggcttttttaagatatttacaaatttttagaaagttgaataagttgattttcgtatatttaatttattgctttaagttttgatttttgtgaataaaaaacaaagaaagtatttaattataatgtttttctttttaaaatattaaataaaaattttattaaacaaatcttgttccagttaaaattgatgagatttttaaggaaacgggaaaaaggcggaaatcccattctcgttcccgtaccgattttgctgtttctccgcttcctgttcccggaaatttttttaccggggctctaattttgacaaaattatttttgcatttaaaaaaaacattctttatcaacgctgacgcgattgacataggccatcagattttgaattggtgaggcgaacgataccaacga

SEQ ID NO: 22573 - DNA, 2226 bp, Heterodera glycines
aaattttcgaaaattttaaaatttcaaaaaatcgagctttcaaagctctacaataagttcgctggccaccccccgctcagatcaaagcctggcgcggcattcacctggtactgaagtgtactttttgagctcgcttcagttagccaagcgtgcaggccagggggtggctctaataaaaaaataaaaaataccagcatatagaggacccttcggcggagtgccctcacagcgggaagtttttgattcgggatttagaaaaagagttatgggccttcaaacgcaagcaaaaatggaaaataagccgctggtactcagttggccaccggaccggaaaacccgtatttttcccggatgccccgtcccgagatgcctatgtgtgcaaaatttcagccccctaactattcccgttcccgagattttggttttaaggatgaaaccccttatcattctaacatatatataacttttagaaatatttatttcttgggataaattatcaaagggttttggaaggaattaaaaaaaatttgacaaatccgtaagtctttcgtgtaaataaagaatatgtatacaaaaaatatcaggaatttttttctaaacaaaaataatgattcactactcatttttttatttttctataatttggaaactaaaagtgagtgaattttaatcaaatttacgactattttttttgctctcagaattcaggtaccagagtttactatggtttttattatattttagattatcctaatgcttttgagcataagaaaaaaaccaaaacaaagaatttaaaaacggaaatgttaaaatcttagaacttaacccaggccccattcctccaaaagaataattaggtctatagggtagaaaattttttatacaaaaaaatagacccgaagaaaaatgcgtcaaattccttacttgcctttcgaatgaatgtgtattaattctggtaaaagctgaaatataatcacagataagaaaaagaaagagaagaaaaagcaaaacggataccaaatgaatttttgtactatatcgtttttatttttaatgaataattttggcatttattcttaaatttttcaaaaataattaaagatcgaatagatgtctatagataaaattactaaatttaagcaaaacttgattaaataattccttcatattattctaaaaaataataaaaagacggtatttaaaatgtataattaaaattatgataaataaacataattcattaacaaaataaatggtagaagtacgaatttgttattctttttatcaatgatagtcattcttatggtgatttaataaaaataaataaataaataacaacaaaattaaattaaattaagacttaaaatgggtaaaaactttactgattgatgaacttttttttgggcattcaaattaacggcgcaccacatagtctaattatttaggaaaatccgggcctttgctggctcagctgtcaaacaaatggttgatgattatatttgtgcatgcaaaaattcggacacctgcctatttcgcaataagtatgtgacatacggtcagtcagtgaaatgcaccgcgcggaaaggaccgatcaatatcggtccgcttaatttacatattggaggaggaggtcagtttatgtcacttgtcagtcggtcggctggcacgtgatacttcattaatcgctataaaaaactcaaatgagcaacattccatcacttgaatcgagaaaaaataaaaaattcattgaatttaacaaataaataaattatatttactaatctggggtttatagacaaaaaataataaatagtaaataaaaagataacaaatatcacagaaaaaattgctgactgcccgcaaaaaaaagaaaagaagagatacaaaattttttttcaaaaatagtattaatgcattaaaattgaaatgaaaataataatgtcaatatattgaaaaaagatttgttagattacgggatatatgataagatgagtattaaacaaccgccaaaaaaaataaaataaaaatagaaaccgaaaatttaattagaaaaatgattaaaaataatgcttaaaaatgatcgggtgggaaagtaaatatatcctattgatttattttgtaaagttattaatgacccaatcattatgccacccgggacccaaagatttacaacaatgatatagggagagacgcaatctttaggatttgtttaatttcatcaaaaca

SEQ ID NO: 22574 - DNA, 2633 bp, Heterodera glycines
aatgttccaaaaaagtttttttgaaaaaacagcgccacaaaaaaagcgacttaaaaacaaaaaataaaaaaaacaagttttggtcattttttgaataaaatctgttaacaaatccgaagacaattttcaaaattttttcggcggcgcctaccggcaccgcccgaccccaactgtccccgaacttttaaaaaacgcaccgcaaaaaaaggtggaaaaaatggacaaataataaagtttgtttctaaaataaatatatttcatgaaaatattttttaattttcatgaaaaaattttaaagatttttgtttggatttttcatgacttggactcggtttaaaaactaggactctgacccggctttctgtacctggcaataccctgacccggtatttgcccaaatacccaggcccgtacccctaattaatatacgattttgaagttttttaaattaaaaaataaggctacagaaaaaaattgaagaactctcgcctctcgtcctctcgcctctcgccaactctcgtgtttttggggactctcgcctctcgccaaactctcgctctcgtctttttggggactctcgcctctcgccaaactctcgctctcgtcttttctgagacaagtcacacccctgattcttaccagtgcttgtttttcccggttcccgtttgccctaccgggaccgggatccggaaataaattttcaaaatccggggcttggacgacttcggatgaccgggaattcccgtcccggtcccgctctactctagagttattacgattaataagcaaaacaaacaaaaaaaaattaaaagaaaaattaattaattattttatttaattttttaaaatgtttaggagagttcctaaggtggactctccatgggtgaaatgcatttgtgaggtcggcgcagtgaaccagagtttggccgtcataccgccaagttgttgattgatttgttaattattgaataattaatgatgaatgtattaattgtttttcattaattaatcccccttttttaaatacagtgtcatttatgcccaccacaccaatgagcggaaacatgaccgaaaacgcaactgttgcgaccggtaaggctctgttctttttttttgcgagatgagtgagagtccggcgggggaaaggtggggtcagtctgaccattttcatgaaatccctgctggttagcatgggataaagcaaggatggcatggaattccgaggatttgatttctcgaaaatttttgggcatcgaaattccgaaatttagagaaaaaaaagacggtaattttgtacgaaaccgtatttagggagaaaagtttgaaaattcttttttttttttacattgtatttttattttactttttatttcatttaatgttttctaataaagcctatttaagcacattttgggtccggtggtgccggcccttgccccggggaaattttgatttttgataaatttcttaaaaaacgctacttttcaaaaattttacttgattttcataaaaaattaattttcatttatagtttaagggggggagggggctataacgccctttctctatgctcttgctataaattaaatttttcagatgcaagtggacatcaccatctgacggctttggcttttatcttgccatttgtcattggtagtaacattgctaaatttaaaataatttattcataataaacctccggggatcccccagcggaaaactttggattaaagggattttttaattttaaatttcattgagtaaactctaaaaatttcccaacatttgactcaaaaacaaaaaaaaaaatcatgttttcatttttattcttttaaattattatattttaagttaaaatgtgagactctaatcaataaattatttttaaaatatgcaatttatattaatttaaggaattttgccaaatttggccatgccattcgctaccaacctctagacgacctaattcaagagaaacaattgatggccagaagcagatcatagaaaatcccaaaaaaaatttatccatttaaaaaacaatagaaaatcccaaaaaaaaatttatccatttaaaaaacaatagaaaatcccaaaaaaaatttatccatttaaaaaaatttctaatatttttatttatatgtatgtaattttaactagagtagagattttgaaaaatcctgcacctggattaaatccaggttcagcaaaaacccaggcttgtcaatgcatcgactcaggccttggatctggattttttgaaaaccaaatatttgaaaaaattaattaattgtttggctaaaatatgtataatccaggaaatccagcttttcatgccgaacatggaattagatttatgaaaaatctgacctggacctggatccacgaaaaatcccggcctcgatccaggtcatgatcaaactctagttttactaattactatatccaatttttttacaatttacctatatgtatgtcttttctatatttcgggacatttctattctactcctttttcgactatgtttatttctttaatcaagcatttctttttgtggtgaataaatcatcttgggaaagatttggaaaagccaaaagtttaaatttcacaaacaaattttggcgtaatgttttca

SEQ ID NO: 22575 - DNA, 1114 bp, Heterodera glycines
  unsure (1)..(1114): unsure at all n locations
attgcttataggaaacaacattcaaattttatacgttttcgttcccttttaggtcataattttgccgtatttaattgttccattatgctcataatcttaaacaggaccaatttattagcgcactttggccaaacaatcgaacattgcgagtttcatttcattttcgttaagtgattgtcatttgtttttcattaattgaccaatgcgagcttaattaagattaaattattggcaaaataaatccaaaaaatcagagcactgatcattaatgattgcgaagagcacaaaaaaaattcaataattagattcttaaaactttttaagatttctaaattatctgagaaatataatttctttaaatgcattgtgagatgaagaagtcatttaactctcaaaacgatgatttttgattacaaactagagtagtactggactgtgacctggtactgaaaaacacgtacaactaactgattaccgaattcccggttttgactggttctgaccgggaccgggaaaagtcccggtttttaagaatttaccttcaaattttcgaaaacacactaaatcttaaccaagaaattttaaatttaactgtttctcactaaagtgtttgcacttattttaatttatttcaataaaaaaactattctttaaattttatacatattttgtaattttatttaaaaaaatgtgaaatcgagtaataaattgtgtaagaaatgacaacaatggttaaaaattagagaccggtaaaaaaaatttccgggagcgggaatcccgtaaaactcccgctcccgttaaaatcccgtccatttttaacgggagtcccgggcgggagcgggagcacttcgaaaatttaattaaatacccacaaaaaaattttaatgcacaaatttgaaggacaatccttttataaaatacagaaaaattataatatgcagaaacgaaataaaaacatagattttangctcgaaaatcagaaaattttttcaaaattgcttcaaatcattttttttaaatcatgtattcgaacaaaaaggnttaaaccttatatttccgaatcctttattaatttnntacattttttgcgccgaattttttgaaaaaacttttt

SEQ ID NO: 22576 - DNA, 1188 bp, Heterodera glycines
aaaaatcattatactttcgacaaagtcgaccaaaatggtatcattcaataacacttattattctttatccacatgcaaaattcaatcaaatttattgtattctttttaaataaattattaaaaaattctttaaaaaaattttgtccgtaactttttttcaaacttagacgattttttgtcgaaaacagtatgagtagagcggttagaattggccttgccataccaactcactgtctgaaatttctctgatttcgatgcaaagcgtcaattggtcctcatttttgttgtaaaagcctttgagcgggtccattagtagcttaataaccataattagttaatttggatttatttaaattggaacacaccgcaaatggtaagggacatataaatcgccggctgcatgttcattgttaaaaacgtgttcagagaatccagaaaaattgcggtacttatttttaaacaaaaaaagcaaggttgccgaacatttgcaactccaattttcttcttaataccctaatggagttgtttaatgactgaccctattttttgaagttttgctaatgactaaatattggtttttttccagaacatgacggcaggagtagtataggtgtaaaaaatccgcgcgggtacgctggcagaaagatgcgcattcaccataagagagaagagagaaacagagaaaaagagtaaaaaaatatgcgcgggaaacaaggaaaactgcccatatttttcatgaaaatcccccaatttccatggcatcgcttaatcgctcacttcccacctcctccaacgcaaattcggacactttttcaatttccatttcaattgtatcttcgttttgcgtcggccaactggtgatttttgaaaattttcattgagaactccgatcatgaatagtaagcggatttacagtcagggctcccagatgtgaggctttagtctcattttgtggttttttgataggtcaatgaggttttttttcaaatgaggctttgaggttttttgtggttttttgagaaattttgaggttttttgtggttttttgttaaattcttcataaaaactagaaaataatcaattcttttccgaaaatcacaaaattaagaatttttttcaatgaaatctgctaaaaatatagtcaaaattcttaaatttattggtcgaacaaaatctgttaacaaatcg

SEQ ID NO: 22577 - DNA, 1701 bp, Heterodera glycines
gggtccggcggtgccgataggctccgctgtgaaaattttttggaaattgtaagaaatatcataagaaaagttgcaaaattttcagaaaattttccattttttcaacaaaatactgaaaaaggcatgaaaaaaggcaccaaaaggcaaaaaaggcaccaaaaagttcaagctagaagcttcaaaccaagttaaaaacccgtttttcgtgcttattaggccgtagaaagctagcaaaaaaaggcatatgcctcaaaatccgggctctacttattaaataccgaatttacgatttgaagggatctaaaaatccttaaaaattgcgaaataggcgaaaatggtaaaatagggagcgaaaatttgaaaatcagtgcttttttcaataaattaaattaaaatcgatgtaaataacttattgagcaaattaatttcaaaagaattaaatttaattattttttgaagcaaaaaaatatttggttttcttatagaaaattgttttttttttcggttttttgttagttggtattctattcatttttcatatctttagtgaacctattcaatgttaagattttaatggttaaataaaattgaatgtctaactttgtgactaataattttttgcaatttcaattatttatttttgccgttggtttatagttttagtaaaacttattgataatagtggaattttaatgaaaataatatttttaacagcgcagcgcaaaaaaaaaagtccatttttgctgggcggcgcaaatatcgcggcgcaaatcagggatgttgcaaagagaaaaataaaaagcgaaaaaagcgaaaccaaaataaaaagcgaaaacgaaaaggcgaaagcgaaatgaccaaaaaaagcgaaaaggcgaaattttttttccaaaattagatgaatttgaaagtctaaaaaattcacctttttttaatgcttaactgttatgatgattgatgagtgctcttttgttttttcataaattctttatgcaattcctggttattagacaaatgggagggctggggtcggttttttaaattttttttcttatgccatgtagtaaaaagcgttctatgtagtatttttgcttaaaaatatttattaattttcataataataattttatttgcttttattttttatttcttttttatcgtaaatatttttgtatagaattaatttaaaacgcatattgtattttgtgtattattattttttccgttataaattaaaaaattattctattaaaatattttgcgacaaaaaaggcaatttcgagaaattacaattcaaaaaatagattatattaaatagaaatagtggtttttattaaaaaaaatgataaaaaaaatttcttattactttaatttttaaaacaattaaataaataaattaaaaatgaagccgtcaaccggcatagaactcatgacaatgacagaaagtaagtggaggttgatgcactaacctctacaccacactaaacatcgataaacagcagactaaattatactttatttaataaaatttggtaaaatggttaaaaaatcaaaattttgtgtaaattttttgctttttctcacacgaaaatgccattgttttattttaaaaacccaatcgttagggctgtactttttttttcgctttttagctcaactaaagagatgttgacataataattctttgtgggattatattag

SEQ ID NO: 22578 - DNA, 1712 bp, Heterodera glycines
ggagaggcaaaaagtggaaaaagatccccacactgacgcgggattggcgggagaaggaggaaaagtttgagcgggaccgaattgagtacgaaaaacggattgaaatgctggagagggccaagcaggagataaagcgtaattttaaaattaaaaaaagttattattttaaaattgaattctcatattaagagggtttgaaagtggcacagaacgcagcggcacaagccaaactagccgaacagcagcgacaaacggccaacagcacacaaaaaacaactccgacaacacaaacaactccaacggtaacagcagcgaaagttgggaaggaaaaagtgagggaacaacgggacagcagcaaacagcggacaacgcaacagactgacaaggaaatggtacggtgaatgggaaaaatgttgtaataattaattaaattaattaatgcacgatttgttacggaaaagcattaaagcacggaaaagggacacaaattttgatttattagcaacaaaagaaagtatttgaattgttggagaattattttaaatagtcttatattaccaaatatgatttgttgcctttacaggattccgttgactccgcttctgtcaattccgcaccacgtacaaatccgtcacagcagcagggtaacaaaacaacatttaaaggtctaaaacttcaaaaaaaattgcttacaattaagcacctccgaaaaaagcggtggcacctcccccaccaccgcctcctcctcctcctccgccgccaccattgtttgtacagcctaaaaaagttgtgcaaaatggccctaaagcagcgggaggaatgccaccaccgccgcctccgcttggcttattcgtctcaaccgctgaagcggtgccgaagaagaaaattgcgaaaattggcagcaaaatgccaatgatcaattggacggcgctgaacccgaaccaagtgaagggcaccgtgtttaacaacatgaatgacgagtgggtgatcaaaccgtacatataacatgtattttttccttttttcagaaaattggctgaagagcttgacctgagcaaattggtcaataattttcaatttttatttttaccattttctatgcaaaatatgaattcaggaagcaatgtttagtctggacgagaagaagccgtcgtctgaatcgcaacagcaaaatgtggacgcaaacgcagcggtcaaaccccgtggacagccgtcaccaaatgcgaccgtaaattgcggaaaaaacactgttctctcaactaaacggcttcaaaacatcggttgggactttttctcacactgggagggcggaatttgcaatcattaagccatagaaatttaaaaatgatttttttgcccacttaatattattttatttttttacagccataattcgtcggaagatcgggaaaagtgcaatggatgtgagtatcaattgaaaaggggcgggttcatgttcgggttccatacctttttgtgtcctttaaaagcaacaaaatttggatcattgcaattattttagaaattcctcgtgttcatttaacttaaaaaattttaaaattaaacaatcattccaatagttgtgtaaaatttcgcttttttcagattatgactgccgtccataggttcgatttctcagtgctcacttccgaccaagttgatgttctgcttcacaattgtaaggaattctttattccttatttaattaaaaa

SEQ ID NO: 22579 - DNA, 1768 bp, Heterodera glycines
cagcatttcaatgtcgacttccttccctttggtctcaccctaaaattccttttatggggttaacaaaacaaatgaattttgggataggcaaactcggacctgttcttgccattccacagcagcaccatttttctcgggaaaaattgtcgttacgagggcggtttgaacgcgtccgttgcttcgctcaattttgacgctcattccggcacaaattctcttgatgtcttaaagacaataatttttaacagtttatatatagattctgctacaacaaatacccttgacgggtgctataggctgcagtggtggtggtggtggcggcgacttgctgatataacccacggaagggccacaatcaatttgtcggccaacaaccgtttgcatgcttgatgaagcggcgatagagtgccgatttttgttcgagacaactccatttgacgcagttttcgggtcggcgcatgatttctccggtttgtgaacacgggaaggaaagagagatgggttgttcctgacaatcacttcaatgtccaactgtttgcccttggtttcgccctgaaattataattttttgttgggtattaattgttggcattaaatacttcttccatccattcaacactgacacctcgttcattgattgctgtgacgagtgccgcatgaacgcggccatccgatctcaaaatttggacttccgtcccaattcggagcttatccatttttgaaaaagatcgataataagctaaataggcaatcataaaaaactattcctactttaatgaaaacaattttctggttttcccactagaaaaataattcgcttgacagtaaaaaagcgcactaatagaaaatagatatcaaatttatttggttcaggtgaattgaagcgagttatgaccagggctgtaaattttatgcaaatgcatatttttttcctggattctacgtagtccaaatagaacgaaaaacaccttctttttggtatttgcttataaaagttgggacttttatttgcatatttcgggatttttgtgcatatttgcatatttagggtttttctgcatatttcatgcatattttgattttttgtacatattttcagattttttgcatattttgccattttttggaaaatttgttaacaaaaattcaataaaacggaaacccctaagaatcggccctaaaaaattcagaaaaatacacccataagaatcgaacgaaaatttttaaaaacacaccactaagaattggaaattttttcaaaaattcttcccccaaatttttttttcatgacaaaatttttgattgattgaaatgttggtgggttgagtcccagtgattggaattctggtgggttgagtcccagtgattggaatgctggtggattgagtcctggcgattgaaatgatgttgggttgcgttccagtgattgaaatgttggtgggttgagtcccagtgattgaaatgctgttgggttgacccagtgattgaaatgctgttgggttgagtcccagtgattgaaatgttggtgggttgagtgccagtgattgaaatgcaggagaattgagtgccagtgattggaatgctggtgggttgagtcccagtcattgaaatggttggtgggttgagtcccagtgattgaaatactggtgggttgagtcccagtgattgaaatggtgatgggttgtccagtgattgaatgcaggagattgagtgcagtgattgaatgctgttgggtgagcacagagtttgaatgctgatgggtgagtcc

SEQ ID NO: 22580 - DNA, 1500 bp, Heterodera glycines
  unsure (1)..(1500): unsure at all n locations
tctgttgtattcgcaattttcaatttagcattttgtcgcaaaaccctttcctcaatcccgcgttcaatccgctcgccgcattttcctctcctcctgacatcgctcgtgttcagcaatggtttcagcagaacagttcctactcgagtccgactgcctcctctgtttgtcgattcattttatttaatattatttttgtttttaattagactccttctctgatcagcaatctctccggcttgagtattttttctaccgacaattcatttacactcaattctcaacaattaaacaacaaatttgtcaggacggatgagacgttggaccccctaaaagatccaaaaaaatttcttgcatattttctcgaagctatcaaaaattgcgaccaggtgagtgtaattaagagttttggacacattactttacccttctttaccccctccattctttgcatcgttttaattttaaccgataattttacggatgcacttcatccccccccccgtcgtttctccccctccccctcccaaaaaaatttaaattttttcgcggagggacgacgcggggggaaacgacctgctgcgtaatgaatgtttacaggacaaaagagttttttgcgtgccatttaaaagaggttttttgaattttcataagggccaaagggactttttttgcaaacgttttttgtaggataatttatagtcgtgaccttttttctgaaagttttcgggattgttgttcgtgaatctgaaattcattaaccaattaacttatagacaaaatggtcttcccccctaataaaactcaagcatattttaatttttctttttttgtttaattgattttttaaggcaaataaagtttgctgatcagtgatcacgaattcaacatttagattttttaaattaaaaaactatcgaatttgttttgaattttggatttgtcaaaaacttgtgatcatccgggttttattagtgctaattaattaatcataggaaaaaaatatttttttagtcctgtaagtaaactcagaaaagtaccttttaacgcaatcaaaaaaaatattttttattggatgaaaattataatttcattccattttaggaggttttctttcattcattgaaaccactcaaagtttttgccttagcaattgctaaacgaaagataccaacagaatttaaccaaaaggattttcgggagctgatcaagttggtcattttgagattattcaattttcttttttcctttttaggattttaattgaacgtctcgctttgctcaaagaccaaagggtaagtgaacggaccaatcggtcgtttaaactttaattggttccccaaataacagttccatttaagtctctcaattatattctggaagtgctggacattcttgtcaaccaaccacagtttgaattggtctcttttctcgacnttttgtttgttccgcaattattttgttttttttangctatcgccgatcgcaaatcgcccattttgc

SEQ ID NO: 22581 - DNA, 1015 bp, Heterodera glycines
  unsure (1)..(1015): unsure at all n locations
tttttagcttntgatgggcaaaatcgcctcaattgcgcactgtcggaggaggatttcgtgaagcctttgaactgtctgaaatgaaaaagcgatgccaacgcaatttcaacacagaatttgtcgttggccataaattttgccattagaggcacttttccttcgcgcgagtcgaagccaattgtttattggacgaacattttaaatgcactgacattccttcgaaatgcaatcgttctgaacgaacaggcgagggtaggacagaaaacaattgcttttaattaaccaattaagtgcaatttgtcattaaaaaattttaaaaggattatttggcatcgatggacgagggccgtgccgcacattattttgccgacctttcgcgccaatgtatgctcgaagtggacgtgggggaggcggtgacggagaaggtcaaccgcctgaagagagcgatgttggacgattctctgatgattttggctgctttatgcaaagaaatgaatgtaaacggaaatttaagcgaaggacagaaaaatgtggcaaaaatcgtaagaaaaaattataaaatgatttcactttaattttatttgtttagtcatttccctttttcagatcgcaagcaatgagaccgttttgttcatttaccattcaattcttcggatggatacaatttccatgttcaaattgcaaaagacagttttattagtgagtaatttcatttgccatatcaaatggttttttgcccttggatgttgaagaaataatttttaaaaatttagaaaaagactaatttttggaaacgttttcattttcttagactttaaaccgaatcacaaagtctggcgctttgcccgctgtccttgacaatggtccgcttctctccgaagcattgctcaattttctattttcttcttttgactcgtccaatgtcgccaaattggtgagtttcgaagttcatttctgatattcaattattgagtcatccaagaatttgatgaaaatgtgtgctgaagtntcttct

SEQ ID NO: 22582 - DNA, 2200 bp, Heterodera glycines
  unsure (1)..(2200): unsure at all n locations
atatatttttaatctcttttcatgacatattctgctgtgaattccggctgattgcggcttttgtttctatattataatgcattatttatctctctaatgataataaataaaaactaatagatctcacaataaaatgattactgttttttgtttttttattaatttaaaaggttgtatcttacaaaattatctttttatgtttgtttttttttgaaattaaaaagttttactattgtataaatatctttataaattgtttagaattaatttaaatatattttaattttccatttattatttaattatttatttcattatttctttgaatttattttcttttaattttaataaaagcaaaatttaataataaaatattattcagaccattattatttaaaattttttaaaatttaaatctcttgtttctttatctaccatgatctcctatttgacgaacgactatctatatttgcattatttgtatttgtaagaattttttatgaatttatttttccctcttacaaattaattttcttttttttcaattctgtttctttaagttttgatttgactattaattttttaaacacgctggttctcattttacattttaatcagtttggatggcttaaaaattaaatttattagctaaaaaatgatcaaataaaaccccaagggaagtaagttttatattattttaaccttttaaaagaaacaatttaatcaaatttatatgaaatgaaaagaatatttttaatttataaaaacaaaaataatatatgtatgtaaaaattattgcataatttatgacataagattattttttaaaacttttaattcaaaaggaatatgtaaaagaattaccacatatggcataaataatatttgtgcagattccgccgctcgccctaaaagcgcaattaattattttgtacatttcatgaggctcaaaatcataattgaatttttgtcttgtatcttgagcaaaaattattttaaatgttagtgtcatggacagaaattttgttgaatccatatgtaatcttgatcgtataaatttcgcttttccttaaaagatttggattgggaattttgccctagtcggacttttttaaatatggggatcatcttcccacctaatccctgcgtttttcccatttttaaatatcttcgtggtcagtacgtagcgtaagccggtccttggtcatcaacaatttgccgaacgcccaactcaacggcccgcccatggatcagcttgtccgacggatggccgtataaaagaaagacgaaggaacgatgctcaccttcttccactacccttttccaaagtccaatttctttccccaaaatttgcttttgctatccaattttcaaagatcgtattcaagtgatcatttttcatttcacatttcatttttttggtgtgtaataaaggttttgcgttgtaaaaccttgcgttcaaagcaattgtgtgccatcccggccactcgaactccctgacattctcagggacggtcttaagccaatccggcaaattataataaaataaataaaaccaaaacaaaaactttttccaatcacttcattttcacataaaactttcatttcctaaaacgaatcaaaagttttggattcagccgcctcggttgacgtctgttctttaaaccgggtcagacgaagtcgaaacaaccgcagtcagcggccacaggacgggagcggagcggaaacggcggtaggaaatgaagtggacaaattttaaaattgtaccatttttgccattttttaggcggcctaaagaatcagctgaagccggaggactaccgggaggagatgcgcaagtggcgccaactgaacaacggtagtagcggtggtgccgttgtcgccgcttccggtgccgtcgccattggcggtggtagtgccacggccatccggcgacagggcttgtccgcaatgccatcctcgtcatcactttcttccgcttcatcctcatcatccgctcgaagaaattaaacgaacaaaaaaaccctcctcctcctctgtcctctttattttgaatgtattatttacctacctaaataaattgtcattctttttaaaatgtccaaattttgcgattttgagcaatttttttatcgggcggcgaaattttgttagatttttcattcgtttttatcaaaaaannttggtttttttggaatat

SEQ ID NO: 22583 - DNA, 2410 bp, Heterodera glycines
  unsure (1)..(2410): unsure at all n locations
aatgcaaatttttaaaataatttttaccaaaaaatgaccctccccagaaagtaaaaatttcaattaaaaaaatattattttctttatttacgatttatgtttggaaattttttaaaaaagtcggacagaagagaaaaggcgggtgggagggggtgaaagttaattcaaaaaaatttatattaaaatagcaataaaaaatagggaaaatgaaaaataaaacactgccctataaaaaatttttatttaaaaaaatgatgaatgaaacccatgcaaaaaaaacaacacctgcacaaatgagaggcgaaaatcgccatgaaaaagtgtggtggcgcagtgcccactaaacagccaatttgaaggcggaatgaccaactcggcaccggcacacatcgccacgaacagttcgaccattgacgggtcaaaatttgtttgtgtgccgagcagaacggtggacgaagtgccaatggaaaaacgggcactgcaaaatatgcattttaaaactcgcattcaagccaatttataataataatttggtgtaattatttctcaaacctttaaaattaaaaaaatttttttttgaataaaataatttattttttattttcattataaaatttcgcaaaagttgaaaagtttcgcgattttttgggaaatgtaaataaattcaaaaaatctataaaaaattttccctaactaaaatattaaattttctcataaatgtttttggggcgaaaaactaacaaaattcaaaaaatatttccattatttttgaaaacgaattttttttttcatttttgtcattaaattacagttttantaaaaagatagaaattttcgaagttttttgaaacttccttcacatagtaattacataaaatcctcaacatttggcaaaatggcagagaacggaaccaagacgaccttcggaatgcctgaaaatccgaaaaaaacgaaattttggcactttcacacaaaaatcggttggcacaaaaaacaaaaattttgcaccggtagagcccgacgtttgaatggcataagcaattggtccaaaatcggtgattgttttcgaattggttgtgtcatcatcaacgacggcactgtctttggcataatttgtggcaaaatgcccaatttttaggcgcccaaaagtgccataattgtcgtcatcaacaaatttcgtgccaacaaattgaacagcctcgttctgtgaaagtgacacggcgtcgaacagtgccaatctgatgcgaaatcgggcaaatcgacgctcgagaacatttgcagggcccggttcaaaaatggcaaaggcattgcccgactttaaaacgctaaaataaataattaaaaaacccaatttttatttcatttgaaataatttttttaaaaagtttatttttatttcattaagtaattttcaaaatttttattgaaaatataattgaaaaaattaaaagtgacttaattattaagtattaaaagtttacaaaaataaataaacataaaattcaaaatttctaaaagatttaaatgaatttcaaaataaatttaaaatattgcagcagatgaaaatattttaaaaattaaaatgattattaaaattagaaaaaaataaggaccttatgtggtttagaccacataaaaatttttttgttaaagcattataaacatgcttccaggggttttcggggtcgctaagcacgaatctgaactcagattaataaaatttcgaacccctaaccccgaattctaacctttttcgatttttttttttcaaaaaataatttgttttccgccgtcgccttcactgaaattccaatgaatatacatcgattggagaagggtgctgatcattaatattgtgatgaaataagaatatacagagcataagtctgagagacgtgcttttcttggaatgattgtatatttaagaaaagtccactaggtgttgagtaatttcccatgactatgcgaataaatgtcactctagcaccaaaaccaaatgagcatgttaatgatcatgatcttgatatttttccctatgtgatttacggatttaagaaaatcgaaaattaattattgaagaatttcccaagaccacccgcatacttggtacactggtgcctaaacggcattaaatgaccatatgtatgacgaccatgctattcgttcaatgactgaatggtttagaaagataaagaatatattcctgcggaatttccgctgaccacgcgcatctatgttatagcggtgctgaaatggcattataatgacaaagtgtcggacagtcatgctttgcttgccatgatcgtataattaagaaaaattaatagttgttgataatttcccagactatgcgaaaaatggcctctagcgcgaaacaaatgagcagttatcatcaagatcttgatatttt

SEQ ID NO: 22584 - DNA, 2333 bp, Heterodera glycines
  unsure (1)..(2333): unsure at all n locations
cctctttttccacttcaccaatggaaaatttgacgttcttttgcaggagangaaaaagaggagctgcgatggnaccaaagttttagatgaacttcctatagtatgtgaaaaagcccaaaatagaatgcaattcctttcgcgtttgaggcattggaaggtttgtaattggctgcactttgtcgacgtccatttttattccttcgcgagttagaatatgcccgagaaatggcaattctttagcacaaaaatggcttttggacagcttcagtttgagtcccgcctcctgaattcgttcaaaaacaagcgccaaatgttttaaatgatgctcgtatgagtcggaagcgataaggacgtcgtcgatatatacaaaaacaaagttgtttatgtatccgtcaaaaaggtgcgtcataaatctttggaaagttgctacggcgttgcacaaaccgaatggcattaccgtaaactcatgtaggccaaattcggtagaaaatgctgttttttcgatggaattttcgtccatacgaatttgccaataacccgtcatgaaatcgagggtcgtaaaaaatttccggcctccaagcattaaaagggtgttgtcgatgtttggcaggggaaaactgtcttttctggtgaccgcgtttatggccctgaagtcaacacaaaatctcaacgttccgtcgcgttttggcacgagaacgattgggcttgaccacggcgaatgggagggacggatcacatctcgttgcaaatagtcttgtaacattgccgcgactttctccctgtaggcatatggcacaaaacgcatcttacagcgaattggttccgcctcgcctgtgtcgatttggtgtttgatcagattggtttgtgtcaattctgcatcactaatcgcaaaaatactttcatattgcatcagcaattttaaaatatcatctgtctccttcttttccaatgcctttttgtctacccattcgtgccaaattttttcaatctccgcagttttttctgctctccgcacttcaagttttccaatcaatgcttttggcgctgctaaaaagtcttccgcatcgcaaacttcttcaattaattcggccgtgccaaatttttttcctccttccagcgttactgatgcatttgaaaaatttatgattggcaccacgattttgttgttgcgtccaatcgcgattgttggttccaaacgaatctgatcgttttcttgatcggatgtcaataaaacttctctcccttcatattggtcaggcaagccacattcgatgactttcgtggcccgtggttccaacaccgttttgtagatcacggtgagcgaatcgattttattttggttcactttttcaaaatcaattacagtgtcgctgatggcatcgtacagcttaaagcccagattcattaagcgcattcgtgccaaaaagaaggtcaaatccaatcgacgatttggcgatatgcatcgcgactttgacctcgctcgaattctcatgccgttttatcggcagacaaataactcctaaacattccaaaggattgccattcgcatcggaaatgcgattttccgctttcaaaacactcaaattccgaacgtccaattttttgtcccttatcaaattgtagaggaactttgcctcaattacagaaatttgtgcgcctccgtcgagcattgccttcgtcttcgttccaaaaacttcaaccaaaactgccattacttttccgacttttgaaaaattcgaatttttgtcttccgtcgcacatttccttatttcgtcaaaaaaatcttccaggtccctgcttcaattcaccaacaatgaaattgttttgatgaacttgttcctcttgcagaactaagcaattttgcttcaaataattcttttgctggtaaagccgatttggtgggttttcgttgggctcaggcatttgctgccgattataacccatttgttgtttgccttgttgattcattgtcgtagaagagttagttcgctcaattgcgcgaaaaatttttccttggggacaatctctggccaaatgtcctgggctgttacagttgaagcaactccaacttcggtttgattgggttccaaatttttgcatttgctggccccgttcctcaaaattgcttcttgagggcccattattcgtctgggaaaaatgttgcggtgtgttcgttctccaagtcctttctctgttgtccggcctcgaaaatcgttgtgttgccttttgcgtagattcagcacgcgcggcaagtgacacgaagtggtccagagtcatgcctggcgttctcacaagctcgaggttaacgcgagctcaggattgcccatcgctct

SEQ ID NO: 22585 - DNA, 1286 bp, Heterodera glycines
  unsure (1)..(1286): unsure at all n locations
agggcaatctctactgattttctcttttcattatccattagttatttgataaatttcccagaaatccttagagaccaaataattatttaatcaatcagatattaaaggaaattacgcattttgccgtcgatcattagacaaaagccaaattttcgtcggattcgttcactttggccatccaaaaattcgtacaattcattttggtaaataaatctgattttctgccatgcatttgcctttttctcggtgtaaatgttcaaaagtgcactgttttcgccaaaatttgtttcgtccgccgatggaaaaagtctttcccaccgccaattaatgccccatttgtacgtcaatctccagacaagcctttgcatgtgctggtaaagcagaaactcaacacaactgataaagccgttagtcaagggcaagctgaattagccggacaatattaactatgagcgcgtaattaggcacgaaataaccgaacgaaaaattattagacaattttgaaacagtggttttaaagcggatttttacaagacaatttagcaactccgacattttatttcccgaatagtttttgaaatattttaatggctttttaaatttctttcatcccaaaataaatcttcaactttgtgtcaaatgcaaaatattctgacccgttttcctccgtttttggcattttgttacacaaatctgtcgcaatggtcacaatttttctgccattttttaatatggtttttctttgaatttcttctttttttgaagttaaaattaatttttccaaattgttgacaaaatattcgacaatctctgccgccgatattttttcattcaaatttctgaaagatgcaaattcattgctattcaatggaattttgtaaaaaatttctgctgcaaattttgcgtcttcagttgtaaacggcttacaattaattgctaaatttttttaatttttcaaaaagaaatatttttatttaaaataattatttaaataaataaaccttcagtaattttgccagagtaaaagtagagaattaaaaaagttgaaaatggatgcattaaaaatttataagcaaaattaacggccattaaaaatgacaaaaacatttaattaaatggaatatatttaaaaacatggaattaaacaaatccataaattgattaatttttatattcacacagccaaaatgtgaaggcgacgacgacagaaaaaatatttataaaaataataactcaatgtatctngttctgatcaacgttgtgtataatttaaaatgatttgttaa

SEQ ID NO: 22586 - DNA, 1296 bp, Heterodera glycines
gaccatccgttgccgaacaaaattcgttttcgtatcatttctattgggtaatttgaactttatgtattttaagttttatttattttaataattttcttcaggtacattgaccattccgtcattacatttctccgttcgaacaagcacatttgggacagaatgggcaccaaattggagttcaatgtgaatacaaacgaaaccgaggatggacagcgaatttgggatgttttggcccgtcaaatttggccaatttttgctaccaacattcgccatttgtgcttttacgatagcggcaatcatttggacaaattgcgtcgccgtacttcgccgacacttctcaccgattcaaatcaattgatttcaatcgagtcttgtggccttttacccgatgcaattggcgatgatggaccgaatgcaactgctggccaagcgctgtccaaatggctgcacactccgacgaaagacggccaaccgaaggaattttgttcgtatttagctttaatggaaataaacaattggttcgacaatcacaaacaggtggtcgacaaaaaaatttttacgattttgaattgcatttggttaaaatttttacgaaaatgcactttttagtgaaaattttcggctaaaaaccgcaaaatttgatcgttttttgcacaaaatctgttagcaaattgcattcccaattttgtttagacatttctccatgccaccacttctgtcagttacaatgtgcgaattattttttataagacaacaacgccaattgagccatttgaattggtgaacgaacgaaccaaggaaaagctgacatttatgaagaaagatggcggtggtaaattgcttaatgcttggctgttgaaacggtgcccaattattgttggggagacggcggcggcggttcaaaaagacgaaaatttggaccatttgaacggagttcacttccgtctttatgatgattattgcattgggtgagcagcaaagaaggcgccttacttttgaataaaatacggacatgacgacagtatcccctgtacagtacatactttcccagaattttggcaggaccagcaagagcatacatgaaaggggggggggggggtaaaccgaaatttttgcgaaggggtccgtccatgtaaagaatttttaatgaatttttattaaatagtccacattcatttaaaattttgcttaatttaggccgatggatccaccagatcaaagcgacgaaaaattgttctcgactcccgggcccagtgatcagcagaagaatgagtgatcagttttgaaatgaccgat

SEQ ID NO: 22587 - DNA, 1495 bp, Heterodera glycines
  unsure (1)..(1495): unsure at all n locations
atcagtgttaattatttcttagaaaaaaaaatcgcaactatcatggctggaagtaattacgaaatactgctgatcgattacgaaattacgccgattcaagacccccgcgtcatgattaatgtttttttgggctgttgttaatctacttttcgagttattagcacctattttctaggtttttatttttagcacctaaaaacctaaaaaattttttaaaaacttattttcacctattttggggttttgcccaaaaatttgttttctcaaaaataatttaaaatgcctttttagcgcttattattgtgtggtcagttgagtcccggctggatttggcattccaatcccggcacttttttatcttgaaaaagggcaagcacgcccctaattctatttttcctacccatttctagcctttttacatcgattccgaccgtttttgagcaattttgagtttgggacctcaaagcaatattttccatttatttatttattgacagaatttgtgattttaaaatatttgactcaaaattgatttggtttaattttgttacctttttgaatagattttacacccctaaaattgaaacattttggcacctcttttcccatttttaacacctattttggggattttttagaacctaaaacctacctattttggcagctttcgcacctaatcgtatccctagtcatgattgattgagtcaaagattgaaattaaaattttaatttaacatagattagtttacatcttttttgaacttgtttgatttaaaaaaatgaggattgttttaccaaaaaagaaaaagcacaagcaatttttataattacatttaaaagttgaattaattagcgatcactttttcctttcgcgtatcgtttaactgcgcattcatcactataagatttttactattaaattaaacaagaagcttgtttgacaacaggcaacggtggttcagtggtagaatgctcgcctgccacgcgggcggcccggtttcgattcccggccgttgcaacttctttttgcattatcatcttaaagaattttttttttattgtaatattttggtttttatttattaaatggataacctcatctctcattttctaatgattttcttcgttttccgtaaaggataattactccaggaaaacttcaaattaatagaatctcaaataataatatttaccaaattaaaatcgatttttaagaataatttaattttttcatgcttaaaaaagcaatattcggttgaacaaattttacggcttttgagaaccaaatttgattgactgatcaaaattataagcgaacaaaaagcttttcgtttgcaactttattcacaataaacacaaaaaaaagatgtataaaaagtaaattatttcccaaaaatggcaattaatgaatggcaacaaaagggggaaatgtgcacaattcacaccgatgtnttgccgatcagtccgttctcgcgccacacaccggcgcccattg

SEQ ID NO: 22588 - DNA, 1366 bp, Heterodera glycines
ctttctcttcctctttctgttcctcttcactttctgttcctcttccactttctgttcctcttccactttctgttcctcttccactttctgttcctcttccactttcttttccacttccactttctgttcctcttccactttctcttcctctttctgttcctcttccactttctcttcctcttccactttctcttgcactttctgttcctcttccactttctgttcctcttccactttctgttcctcttccactttctgttcctcttccactttctattcctcttccacttctgttcctcttccactttctcttcctctttctgttcctcttccactttctgttccacttccactttctgttcctcttccactttctcttcctctttctgttcctcttccactttctcttcctcttccactttctcttgcactttctgttcctcttccactttctgttcctcttccactttctgttcctcttccactttctgttcctcttccactttctattcctcttccacttctgttcctcttccactttctcttcctctttctgttcctcttccactttctgttcctcttccactttctgttcctcttccactttctgttcctcttccactttctattcctcttccacttctgttcctcttccactttctcttcctcttccactttctgttcctcttccactttctgttcctcttccactttctcttccactttctgagggtgtgctatactaataagtactgatattcctatgcttgaaattttttctgggacaaaatttcaatgtgaaattattcacattaaactttgtttagcaaaagtgattcacatttttgctttgtataagccgcctcaatgttctacaccaaattttaaaaaattattagattatattatggaatttaattataataatattcttatctgtggtgatctgaatttaccgggaattgattggattaattatcgaatagagaacaataatcattcgaaattatttattgattttatagcacaaaaacaattggttcaacatgtaaaacaaataacacgtggtaacaacattttagatttagtgctttcaaatcctaagcaattagtttatgacacgaatgttacagaaagtttttcaacatcagatcaccacatgattgaatttaaaattaatgggagcttttcgatcaccaaaaaagacaaaatttatattagagagtttaaaccaaaaaattttctaaaacttagaaatatgcttcaccaaaaacgcattgatctacatataccgaatttaattaaagttaacgacaaataccattttctcgatggcgaactttacaattctttgatcaattatttc

SEQ ID NO: 22589 - DNA, 1746 bp, Heterodera glycines
  unsure (1)..(1746): unsure at all n locations
tcccgtgacaccctacttttttttttaaattgccaaacccttacaattttggncaatttaaaaaaatacaaaatgccaaatactttttttttaaaaatgccattgttttttgcctggcatgtcgcgggtgggtcgcgtcatcttccgtcttcatgatcatgtcaaatttggccatccatgaggccaacaccgtgtccttgcttaatccatcaatttcaggcaatgatcgaattctaaaaattaaaattaaattaattaaaattaaattttaaattaaaattaaattaattaaaattaaattttaaattaaaattaaatttaatttaataaaaatttttttaccttctctcaacgttgcagcgaaagacctgagaaaaaaataattatatttttatcaaagcttcgacggaagattcctttgtcagaaagaaattaaagcaaaattttgccaaatttaacattcatttttaatttgaaaaatttgaaaccatttttttagcattttcgggactaattaggaaaatacaatttggttgaaatttcataattatttattttctccaatttttttacctcacgaaaatcgttgctggaaaagccgccggcttgtatcttaaaaaaatataggagaatttaaaaaaatgtttttattttttaacaaattcattatttaccactttggccaccctttctgacttcagaaagccctcaaaatagctctcaattgcctttgtgaatgcttcgtccgcctgttgcacaaaaaaatggcaaatataaataataaaatgctctatttttattttatcattttaaaatttcccaattttccagcaaactttcacattgaaatgccatccccacccaccggaatttgtatgtcgcccttgagaaatgcgttgaagcgttcctttgtccttgaaagttcatgtttgctgaccttaaaatatcaaacattaatatttaccgatctattcagcaaggaagctgcttgagggtctcaattctcgattttcgtgtcggaaattcttagtttttttttgcattgtcccatttgtatggctaaattttaagtctcgagatatcagggtcaattctcggtctcgataggtcaaaattattggtccctgttttcgagtcgaagatttggtgagtttttgggcattagttttaattcttaggatcttttccagtcccgagtctggggggtcaattctcggtctcgagtgtatgagtcaatcttggtcgatctatgttttcgagtctcggtaaattttgaatgaatttcgaacgcccctactgatcagccccgccccttaagtttgttgattgaccttcaattgccttctggccatgtctgtgggctgtttggcgttgaaatggtaggcaatgcatttggccacaaacacataaagttgcagcgatcgcttgtgttcttcctcctcatcttcagccctggaaattagtttgatgagaatgatgatgaattgattgattggcggcaaatttgtgattaggggggggggggggcttgattaatttgatcaacggagctcaactgatcagacatggctccaactttgatcaattgttaaaatttgatcaaattgattagtctccctccttttatctttgatcatggcacatttcaatcgttctttcctgtcttcacccatttgatcagtccaacaaaatgccaagccgttgaccatcagcactgcaaatggcacttgccttaaccgatcacgc

SEQ ID NO: 22590 - DNA, 1567 bp, Heterodera glycines
aaaaattctgctcggtcgatttgttggggcaagaattggatcctttggactggtgaaaaataaacgagggtctgtttcccattctcgccgcgcttgccaaacgttatctttcggccccggcaacaacgattggaagcgagcaacttttcagtgttgcgcgtgatgtgtttgactatcgtcgatcaaatttgaaggctgaacacgccgaaatgctcatttttttgaacaaatcaattccgaaaattcaattttattaatttttttttgtccattaataaatgaatatataataatttacgttaaaacaatttttttttaatgtttaaaatataatattttcacttgaaaaataaaattaaaaattgaaaaaaaatcaatgttttttcgaaaaaaattttttcccgttcccgtcgggattcccgttaaaattggcgggatttttacgggaacgggaaaaaaggcgggaatcccgttcgggaatcccgccccgttctttttcgttttcccgttcccgttcccgttcctggaaaaatttgtttaccggtctctacaaaaaaaagtacgccaaaatgagagatgtttttttctctgcactctctatttatttacacatgtctcgttttttgagtcggtgtgtttaatgatttgaacatattaaatttgtttttcaattttgctaagctaatttaaatccgacgaaaactgtcttaataatttgatataataaaatgtcagacaaccgaaaagaagcggaggaaaagatggcaaaagcaatgtaaattaaaaatgcaaattttcaatttcaattttaaattttgttttccattttctttagtttcatctccggcgaaggttggctttcggtgttcgatttgcttgagccttctcaacttggcctcggaattgcgctgatcagccaccgtttcgacctttacgtggacgaacacttcaaaacgcgtaaatggacattggaacgtattcaaattcgaagcaaatttggagaaaatggcacgaaggaaatgcaaattgccaattggtatggaaaaccatcgccaattccgcaaattcaattgccacgcaaagtcgtcggattttgcgtccacttttcacctcctgctgtccaattaatttggccatcaatacggacaatgaccgcgttttggagttctttctgcacaacatttggccaatcctcggaaaaaatatttacggtttgaattcgaccgtcagatgtttccgccgtttgcgacaatttgtcccgtcaattctcaacggttgtccaccgcttcgctttgtcaatttgaagtttggcgatctgttccccgaatttccatgcgatgacagtgccatggcatcggatggacaagcggtggcaaaatggctgttcactccccatccaaacaatgtgccaaaaatgttcagaaatgcatatttcagtgagaaacatgagaattggccgttataaattgaagccttctaatcggtgttttcttttatcttttcatattaatcaatttttccatgttttaggcatttgccaatgcttcttctcccgccaatttcattg

SEQ ID NO: 22591 - DNA, 798 bp, Heterodera glycines
agctccttccaaaaattgtcaggacgaggcgtgaacagccattttgccaccgcttggccatccgacgcagtggcactgtcgtcgggcggaaaagcggggaaagtggcgcctttggaaataacagcgtgaaggactgggcaggttgagaattgacggggccaaatggcgcatttgatgaaaaatgatggagttcaaaatggtctcatggaaagtgttcttgaacattggccaaagtagtgaacagtgagtgacggctgtccgagcgccgactttggcattatttgcaggggcggagtatttgccaatttgtcaaaaacgtgtcaaaaaggttaaaatgtggcaaacactttgcgttgagattgagtgggaggggtggggggattaacgatttgccctcctccccttcttttcccccggccggaagggggcgggggagacaagtccaagagggtggtggtggtgctgcagtgaagagaacgaacgaatttgccatggatgaatagtagcattcattttctaaagaattaagagcctcgagaaaatattaaaaaaaaaaattacggttgcattttatagcagtttgggtttgactcccgcgaaaagttcgaaaaagcaaagaagcagcagcataaaaggcactcccagcagcagtggatgcttatttaagaggaaaagccattaatccaacccatcccatcagatcccatccatcggcagatcgattttagtcaacaaaaaatatctacacgacaaaataccgccaaaatccgaaaagggcctttaaaagccgaccattaa

SEQ ID NO: 22592 - DNA, 2718 bp, Heterodera glycines
  unsure (1)..(2718): unsure at all n locations
ccccccccccccccncccctcaatagcaacgggcaagtttccctttctgtggccacatttccaaacccacaaaaagtcacaaatgtccgcgcaaatacgcagcctcgctagaatttaatctaaaaaacttttgtaaaaaagcatttaacaacgtcgcaaaaaaaaatatttaaaaaaaaatctccttacccggacgaattgtgaattaagtgatatgcagatcaaaaggtaactaactaggagcttaaaaattcatactaatgtagctttcgatgcagaccaaaaaatcccatctataataattagtagagtaatcatttatttatctaaagattttacggcgctgttagatttcgccagtgattgatttcgccagtgattgatttcgccagtgagtgatttcgccagttggatttcgccagtgagtgatttcgccagtgaactatttctctttttctcgccgtctgtatttgatttcgccagtaattgaactcgccggtgattgttttccccagataaggcaaaattcaacccatggacaaattttaactatagaaataaacaaataaagggggaaaggtcagcaattggtcatctcgagacgagaacaaacaaatttgcttcgccaatctatttgatactgcgcctaatcagtttctccaatttgttggtcagcggtgtgtgtgttccaaatgtcatcttatcgcaattcacaagaaaaaatttagggttttggctctcgttccttggtcacttttttgaattccgtcttgcgaaccaaaacaacaatttcttcttattttctatggcattgcttcgttttgatcaaacaaaatcgacacggggaaaaattttgctaacaaatggaggatacgaatatgtttttgaggttggaaatttctaataaaattttttaaaaatgtgcaaaaatcaaggccgtttcaaagttggatgagaccagtgaattttggcgttgtccaagaaagccaccatactgtccatgaagagcatgtgtacgcactggttggcaagttgatgcttttggcaaccaatataaagaggggcgtgtaactggggaacataatcacgctccattatttggagcaaaaatggttctcaaatttctttgtttaaatctaaatggcggatacaggtgagagagtcagcagaacgcttcgcgaagagcccaaagtgattcccaacatcgagccgaaacatcatcagggaagtgcgcgccgaattgccatttgaagttagggcagcttctgctccgtcaccatcaaatatgcgttggaattacaactatgccaaacgcaaacatcaagaggaggtggatgaattttgggttcttttgggttttgaataatgtcaaattcgtaaatcagcgctaaaaataagcctagaaaaaaatttttcaaaaaaaaatttcagggagtgtggcaaaacccaaaagaaccgaattttgtaccaaaattttcactttttttttgaaaaaagacttaaaaattgatcgacgggtggttactcaatccaaaaatccaaaaattttcagataatttttcctacttttttaaaaattttttgagatcggtgacgctggattggatttgcaaccagcagcggaaatcataatcccgcagcgcactcagcatttggtcctttctgatcaattgcacaatggagaacgaatgctcattttctgttcccctgctggaattgagaggctaagaacttacaatgctgaagtggcgattgatgggacttttgaagtaattaagcaataaaaaaagaaaaatgaaaaaatatgtgctaaaatttaagactagccccaggggattttcgcaactttacacattgtctgtgataattgagcactgttcggttccgtgcgtttatgctttgctacccaacaaaacacttttgacctacacacgtttctttcgggcaattcgcgatgcgatgcctgctggctggcatccacttcgcatgatgagtgattttgagcgtgctgcaatttcggctgcaaacaacatttttccaaacacaactgcaaccggttgtttgttccattttggcaatgctttgttcagacagattcaacaattgccacatcttttcacacgcttccgtgaaaatgaagacactcgagtggctctgcgatctgtccaagcattcgcaatgttcccctgtgaactctggaatgtagttgatcgagctgctgaagggttgggaagaaccaataactcagttgaggtgaatgattggcaattgcagagatgccatttgtatttatttctaagtttttgtttatttggaggagctaaatcatagaaatttaaaaaattcacatttcaaaacattcatattttgtgcatggggggggggggaaggcccaccacgaggccgcgaagaggccgagtgagtaccttcggtgcaggaaaattattaaattttaaaaattttttaattgctttttaaatatgccaaaaaatgtaggcttaacttttttagtgaaaattcgatcactcatattttttgctaattgagcagaagcgtaccaaactttgcagggatactccccggtaaaggactaacttacactgaaatgagcgccgagctagctggctcaaaaaaattttcgaaaatctgagtctttcattatttatttatttttttacaaaattaattcataagtattttacagaaactgctctgaaa

SEQ ID NO: 22593 - DNA, 1918 bp, Heterodera glycines
tccctgttttgcccaaaattcccggtcccgctcaactctaattgaaatctttgcccagttttgccatcagccatcacaatccgtcctttttgtttttccaagttttgccatcaaatgccaattcatttccaagttttccatcacaatggcaacaattcatttccaattttgccatcaaatgccaattcatttccaattttgccatcaaatgccaattcatttccaattttgccatcaaatgccaattcatttccaattttgccatcaaatgccaattcatttccaattttgccatcaaatgccaattcatttccaattttgccatcaaatgccaattcatttccaagttttccatcacaatggcaacaattcaaaaaaattgatttcaactttatcattgccaatgccatcaattttcccagtttttccaacacaatgccaacatttgtcatttaaaattctttcatcacaatgccaaatttgtcatttcaaatctttttccagttttgcgagcacaatgccaacaatttgccatttcaaattctttcaccacaatgccaacacaatgccaaatttgtcatttcaaatctttttccagtttgcgaacacaatgctaacattttgccatttcaaattctttccccactttgccaacacaatgccaaatttgtcatttcaaatctttttccagtttttcgaacacaatgccaacattttgtcatttcaaattctttccccacttttccaacacaatgccaaatttgtcatttcaaatctttttccagttttgcgaacacaatgccaacattttgccatttcaaattctttcaccactttgccatcacaatgccaaaattttgtcatttcaaattttatttgttgcaaatttaataaaggtttcctaaattaacattgattggttattgaattatagaattgtacgggaccgggacctggacacgggcaactgagtaccgaagtccctgttttgccaaaaattcccggtcccgaccaaccctattgaattataataataattataatataaattctgtgttcaataaataataaagaaaacggtccagcttttatttttgcgtcataagaagccgtcctaaatttagatatttactctttttaataagttataccaatcaaatatggtagtgcgtgtactgtaaagcattatcaccatcttaagaaatacagtatcgtagaatataacgaaattaatctgcaaagttctctaaggaaaaaaacttttataatcttgcatttttcaaaaaataaataatataataatagttattatgactgagtgacccaataaccacctgctgctgccgttgttcctcgtatcccgcaaatcaattaataatgggcgggcaattaattgtccaacaacctaattatgctcatcatcatcactaattcatttatttatttcattaaaaattatttattcataatttaaattatcactttatatgaaaaatcaattaaacaaattttaacataattaatattgtaatttttcattaatattttaaggattccatttaagaagcaattagtcaaaaatggcaccaaaaaaattcttgccaatggagttaatcgtggaaattgtcactttcctccaatttcgtcggcgatgggccaatgttcgcgtgtcgagagcatttgatcactttctgcttgaacaaattggcttatttttgatgaaaacgaaatcatcggtctgtgacataaaggcaatatcactcttgaatttataaacttttttttgaatttatattttgccattaacccgttggatttgactaacaaaattttagagaattctcggaaataactgtaaaaaataaataaataaggtgcaatttacaaaatgtattaaaaaaaaaatttgttttttaaa

SEQ ID NO: 22594 - DNA, 2268 bp, Heterodera glycines
gttgggcgctcacggtagggcgccagcatgcttttccactataactttttttttgccatccaaatccaacaaccgtatattattcgaaactcttaacattctctattaaatttacaaaaggcgaaaagtctcaagcctggaaaaatttattaagaaaatatgttaagctttctaaaatatcaagattgatgtatttgtatggcaaagaaaaaagttatagtggaaagcatgctgggccccaaacgagcgggcccaattgaggtaaaccgtattttttcaatgaaaaatattggagatttttttaaacaatttttaccatttcgaacatcaaacgcaattgtcgaaaatgttcatttgccaaaaattcgatgaaatatttgacactaagtgaagtgctttcttgaccaagcaatacacgagcagtggcctttcttattttgcctagcggtccctcgccggggttgtgcagttcagcggcttgctgaataaaatgtcgaaaaatgggtcacaaaaaatcgaaaatttgttactacactaattaaaccaaacattcgggctaatttagccttaaggagagaaaagatcgaatatagaaagttttcccattgaaaaaaagccgaatatgtaatgtggaaaaaatgtgcaaagttttacctcaaggctgaaagtgtcattatttctaaatttgcctttttgtcgaatgttgacggatttttcaaaatttatcaattttaattaaaaatatattttaagaaattttctatttttctctaggatcgccgatgggcatgccgaatactacccctttttgatattttttgggttttgggtagcaaattgaaatctaaaatttaaaaaactcgctgcttgtgcaagttctttgacagaaggaagaaacatgagggtccgtttgctgttatttgtcttaagcccggaattttgaaaaattcaggctcaggatcgaaggtgaaaaatatcccggcagaagagccttgtcctgtttgtccacactcacttcttccgcccgctcacagtttggcacaaaatccgttcgttcgttgcgatttccctccaacaaatccaacgccagcctttccacatcgccgtgcagctcatcttttaaacggtcacgcaaactcttcgcctttgattttttctggttacggtgaccgtactgctcattgtaacaacgcataattgccaacatttctgcattactttgctccaccaaaatctgcaaaaaaggaaactatgatgaccaatggagaaagactgaaatttaataaaacgtaaaaattttggatgatcaagaagaacaagagtgaatcaatttgttactgatcccgccttaaagataaatattgacctttataattgctgcaggattagcgccgacaccctaaaattacaaaatattaaaagattatacgaaaaaataaaaaataaatttcacatggactccagcgtaaatttgatctgccttttgtttcacattttcatattccctttgatagtaatactttgggcataacttattcttaagacaatattgataataattttggagtattgatttaatataaatttaattacaaataatgaaattattagtattatccaattatatttcaaaatccgagaatctggaatttcatggaattatttctggcaaaattttgtagatatacagtatttgtatttggcagttaatttaattgaaaaatcagtgtcattgtttaatattaattttttcattattttggcgttttaaagtcaattctgaggatttaaagtcatttttggggagtgtttagccatattgggccattttcagctttttccacgttttggattttttagtccacatttatgtccctccctgttaggcgtttttattaatccatgcaaacacggaccctatttataattaaaaagtacacataaactaattaaaaagttattattattcaaaaaagaaagcattaataaataaaatcaaatttattttcatcgtattatcataagaatttccatgatagagtgaggtgtgccgcaagggcgtagccagacccttggcttcagggggggggggttgaagtgaaaaaattcggtttttaggggtgtatttttcttttaatttttaagggcttgtttttcttttttgattttttggtatatttggcgttttttagcaatatataaatcctttccctgcttataattttcaaaaaatttgctgaaaatttttatttttttggatttcggggg

SEQ ID NO: 22595 - DNA, 981 bp, Heterodera glycines
cgccgaacatcacgcattttgagcagttgcaattcattcagtttgaagtggaaaagttaggcaaacaacaaggcaattttgtgaaggtgttggtgctttcgctgaccgaagcatcgaaaaggtcaaagagcagttttattaatgacctaaataccgtatttcctaaaacacagcccccctaaattaaatcccccctaaaataaagccccccttaccattttaggggggttgcaaaataaagactcaggatctattttaggaaatacgataatataaaatttatattaagtgtaaagtttgcatcaaaattaatttaccagtccaattaaatgattttttaaaacaacataaaaatgttgaattaaaaatatttttgaattaatacacttaaaatattttaaataatttttaagtattttctttatttatttttagaatttcgcttgacgaaagcggcgacttttcattgtatttggacggcacaaaacgtgtggcattggtgcacattgctgacggcaatgtgccgcatgagtacccaacggagcacgaatggacggcacggacaacgatcgagcgatcaaatgccattttgtcgccaaacattcgcttccacctgagcagcaccaagaaaattcagcaggtccagccaaattaatttttcaaaaaatactctaatttcatcccattcaaacaaaaaatttaaaattgtcaaattaacaaatcatttaataaatgtttaaatatatctttaaatataatttaggtgttggccaagcctggcatggtggaacgcttctttcccaacgatccgaaacgtgtgtcactgatccgcagcacattcaccggactgtggggccttgaggttgaagacgaggcgacccgagaagtgattgaggtagtgaaatgtgccaaaaacaaataaatcttcatttaattcttttttcgacaaaaaatggcatgacgatgcttaaaagcaatcta

SEQ ID NO: 22596 - DNA, 1272 bp, Heterodera glycines
  unsure (1)..(1272): unsure at all n locations
tctagagtcacnntgatttggaagagttgtggggaatgaatatgcggcattgttttgttcagaatcccaaggcattgatgccttggaaaccgaccaagagtgtgcttcctccgcaaactcgcaattccgtcctttcgtgggaggatcaacggaattatgtggcaataattcacaatttgctaaagtcaactccaacattccgatttgaacacgacatgaaaaaaataaaggttggaacctaagcttatatgtatttaaatgactttttgtaggcttgggatgagcttttaagagaagagcgccaactctacttggacactgctcttcggtcaaccaaagcctccaaaaattacccatattcgctcttcgtttatccgggtttctcttcacttaacactgttgtggtttgttttatctttgttaaattaccgtgaattttttttttcattttttagaatcaccaactcagaaagtcactttcccagctggccgatcgcgcatttcaaggcgttttattggaaattccctggacaaatgagcaacctcacaatctgcagcaatcagttgcattgcgcttcaatgtgtctgttttgcagccgggcaatgggaagccaattgtaataccagacatacgacaacgatgcgaaataaaactggacaacaaaactattcaaaaaagcatttcggttaaattagacaaaaaggtaagtaagcactgatcttattcttagataataaactgaaaaaatacaaattcggcaaatgaaatcttgccaaaattttatttattttgctcatttatcgtactatttgtcgcctgtagtcaaaatgcaacgactaattaaagttcaatttgaggtgcgtttaacaaatgatgaggttatgaaaagtctatcgtttcaaaatgacgtcgaatttttgatggatggcagcactttccgtcatcttttgtctgctccctatggccagcgacctcaaccttcatatgcatgtcgcgtaagcattcaattggaattcactggaggtaattttttgacgtccggaaacaggtcatttcgactatttactccaattttaggaaaaattcgcaaggtttgctcaatttttccaccaattatcgcttctcgaatgcatcggccctttgtcgttcgtgaatattttaaatgggcggtcaaattggcattggccgaaggcagaaaatcatcagatgatgagagaacagtgcccgagacaggagggccaaaaggcacagtccgtcgattcgttgttgga

SEQ ID NO: 22597 - DNA, 1958 bp, Heterodera glycines
  unsure (1)..(1958): unsure at all n locations
tgttttaggaaaatagcgaacccaagtaaatggaaacttttgattttgtatattaatttatttgtcaatcgctcgatgagaaaagtcgaatcgcgaaacttttagctgtcggcaataactttaaacaaagttacagacccgggactaaattgtccatttacctgtggggctgaaccttcaatgcaaaaaagcactaatgtccgacaattatgcataattagataattactagggatgggaatttaggcacaaaaaaaacgttaattaggcatataaaaaagcagaaaatcgcaaaataagcgctagataggcacagaaataggcaaaaaaataatgctttttaggagcaaaacacaaaaacttccggtcccgacttatcacttctgctggttccacatgttttttgtattagaatgcgatcactaatcagtagggattcttttttatgtaaaaacagtgtggaacaaaagtatatgtatttatgtaggtaaacacgaaagtttttcgccaaattcaattttaacattttacacaattagaaaaaacactttcttttttgtgtttgcgaacaaaagttgtaacttttatttatatattttacatatttacggggtttctatatattatatatgtaaatatttttatacaactctttcacattttttgcacatattttgcaatttttagctattttgaagatttttgagaattatagtaatttcttgtgaaaaataaaattttttaaatgtactcctaaaaaatcaatcaaaaattaacttttaaaatagtaaaatgtgattctgcgccatttaggtaacaattttgtgctattttgttcctatttcaccctttacgaggaattttttttctaaaaaataaccatttttaaaattttatttacattttgtacatatttcatacatactttagctatacttttgcgtttttcataaaaaagaatcccttgtaatacgaaaaaacgaaatcagaggaagaagcatttgcttttttgctaatggtcaatctaaaaaatgaaaaaataaatgcaaaacaactaaaataacccacagtaagcgcattattctcttcaagttcactgagcatctgagcggaccaaacacggtaatcaaattcctttgtcttaacaaaaagaatcattatttgcatttaaaactatgacttttgatagagaattttttgctgattcatttaaagtcttgcacaacaaattctaatatctgtcttctgcttttaattttgataaaacaacttaataatcggtaaataaagcggaattggctaattaaggatcgatgcgggcctttaatacggtagttatcctttttaaattttgctaattggtaagctctaattttttgtttcttaacatgttttttaatttttcaaatttgttaagtttgcgaaagtgttttgactcgaatatatttttaggaaatagtccgtatatgtcgaaaatatttttttaagttttagtttactgtcggattgtccagtacggtgtttagtatgagtttagaatttttttttataaatctttaaaacctaaatattttctcacgttttttgaaacgttgaccgatttttctgatcatttggggagggggtcatgcggagcaggacaaaactcagccgccgaaattcagccgaccgaaactcagttagttacagtcaggggtgcgatcgaaaatttttcaaaatcaggacatcgggcccaaaaaatcagattttggggtcgaaaattaggacttgcacaaatcttatgtattcttgataaaatagtgccattctgccataaatttttcaaaattatgagtttattttaaaaatcagaacaagttttggtcgctacctccaaaccaggacagatcgcacccctggtacacangttcgtgtggttcccttgtgataaatacactaattttttntcatcccccccc

SEQ ID NO: 22598 - DNA, 2430 bp, Heterodera glycines
  unsure (1)..(2430): unsure at all n locations
tctccagaaaggggggtgggggtaaataaagacagggggataaaaggagacggggcgatacttagagataatacggtatgtaaagagttctttttcccgatgcacagtttgcgccgcgatgctaatcaatcggcttaacaagatgcaatggtttcgcgcacgtccatggctttctcggttaattcaggcggcactgtgcggattgtttctcgcttttacgacaccgttgggttgtgtacttagtactgtgaaggtagtaagaatttcggaaacaaaaattagcaaaaattggcacaatttaattggtctttttgttgcgtggcgcagttggagctcgaattgcaggaacaaattcgtcagaaatttgtggccaaaaatgtgccagtgcctgaattggtctattacaacaagggcttgtgagaacagagatgaaagagagagatgaaagagaaagaatggatgaatgctattatgccaacaattattgtgatataaatgctgtaaatatgtgataatcaacaatattattattattatagggtatactgttgtttgtatataatattgattgttccatatcatatgaagatgaataatatataccggtaatttttttaatgttgaattaaccgctgacccacaaaatgtccaagccacgaaatgtccaagccacgaattgtccaagccacgaaatgtccaagccacgaaatgtccaaaagagtaaaaacccacgaagtgtccaaaactcgaaaaagctattaaaaagccggaaaatgggtctaaattaaggttttcggggtcgctgaatacgaatacgacatttatataacccatttcctaaccccagacacaatataaacataaaatagcaaaaaaaattcgaagctcctaaaaagagtgctgatcaaaattcgaacaagttttagggctcctatgtgatccgaattctctctatagacccaccctcagcttcacacattgaaaaaaataattttattaaacattcaataaaattcattacggaacacggacattgaatcatcacatttttcgaatccttcaattttaatgcatatccctcaatttgaaaaaaagtgccggcggaattggaaaatgtggtgcccgaacgatttcgtcctcccatgctggaacagaatttttttttattaaatttaaacggatgaattgattaaataattctgcctgaaggcgctgccgaagtcgatagcgggctcaacgagtattgaacaagctgctcccgtggactcacagtggttggccatgtaagagttgatggtgccggtgccgaactctaggggtagccgcatagcttgttccgagttgatagtcgaaattattgtcccgagtgtagctaaaaattttagtttttggaaataaatgcctaaatctaacaaacaatggttgccggtgggtgaaaattgagtggattatctcaaaatgcgtcaacaccatccaacttctggcgctgtgtcaagccgatatatgttcgagagaagtaaaggaagaacattggcattccaggagaagacggccaagataattgagaaaaactcgatttgtgcatcttcagcaatttcctgagtggtgtgtgaatctaaatcctgaatagtttggaaataaattttttgcggcgcttcaaacatacctttcaaccatagacaatctcacccaaaattggtttttccgcgctcaaaggtcattgttgaaagttcagcctcgttcaaagtctgttgttcaacattgtcggaagttatcacggcatgcagttcgtcaatctccactccaaaatttacggcctcctcagttgggtttgaaatgctgacaaacaaagcttcttccgacttttttgtagactttctagtttattacgaatcatttgttcaattaatgaatagcaaaatctgaagacaaaaaaagcacatatttttaatcaaatttggagatttttcttattcgggtgggtctagggttaggcaaggggctatataaatgtcgtattggtattcagcgaccccgaaaaccctaaaatagacccattttccggctttttatgagctttttagactttggacaanttcgtgggtttttactcttttggacaattcgtggcttggacaattcgtggcttggacaaaacgtggcttggacaattcgtggcttggacaattcgtggcttgaacaattcgtggcttggacactttgtgggggcgccgtaatttttgcatataaacaaaaaaaattatgaataaacaattttcaaatttttggcataatgtaaccgaaaattggcagaaattttacatttttcaaaatttcccctgggcggcgcctgtcgacaccgccggactattttcaactatttctacttgcttgtgaacaaaaaatttattatgaaatattcaacaaaaa

SEQ ID NO: 22599 - DNA, 2388 bp, Heterodera glycines
  unsure (1)..(2388): unsure at all n locations
tttctttcctttattcccttgtcaattgggttcgttaatcccccccccccccctctcaattcttctcggcttttccccctcgtccattctcccttttcctttcttgtttcaccctcactcattctctcccccttcctccatttactctcccccccccccttcgccctctcccattctctctccccccccccattctctatcctcccctctcggcttttcctccccctacagtttgtctgtccctctctcattaccccattttgttttgtccctttttctctgtcagcataataactctctttctttcatactttctttgtctttcctttttgcctctcccatttgcttctgactctttttctttctttcctttacccattattaattcaaaacctaaaccatcgcatttcacgcgcctttttgaagtaaaattaagaaaacatcatcggaaccactgctttaagtaatataaaaaggaaaacaaatatgccaaagacgagaacattcttttgactgtttcgcctgtgaacggtttactttcattggcatttcatttattcaattcggtcacttccactggcatttccttccatctctttcttccgttctcgtacttttgcttttcgggatcaatccatgcgcggatggttcacgagcgtcttagcggtcttagcggcacttacaccgccagtcgcttttccgctggcggtgcgttggcgacagcagcaaatgacccaatgatgtccgacttcatggattattacttagtgcacaaaaggtgccaatgccaaaaaggcggaaattcattagaaaacagaaagagaaacggaaattgtcaattcttaagtcaaaatttgaggaaaagtggcaaaatccaaagaaagagacaaaatgagacaaaggcttaaaagaagagagtcggaagtatgaaaaataaaaataatcattaggtattaatttcaattggtctgcagtcattttgcccttttccaattcagtgaatcgtacaaattcatccgaatggccgacgatttgcacgacgtcgccagttacctcaatgaaatgcgaatttgctttcttttgctcaccggcacagttcgtagcacaaactctgcccgtttactctcaattcttttaggtttacctcattttggccatttattttgtgagttggtgcgtacggagaaatcgtcgccaagtgaacggcggcggaggtgcgaatcgcccgaggggtgccaaccaccgctgggatttgcaggtggagaaaggcacagcggcgaatgccgacaatcaatcagcagttgaataacgaatggttacagggcgatgagtaccaaaacgcagtcaatgctcagaccaatattggccaaacttcggatgatttggtttcggtgcgaagtgacggcgcattgcctgnggccaaaggcggngcgcccgccagcattggcacgacggcaccgcagttcggcatgagcacacgagcgggggcagccagacaaacgccctcttttatgaggcatagcggaacgggcggtggcatggccatgcaaaatcacaggtgggagcggagggcgacgggaagcggccgatgcgcagaaattcgaaaagccatctgaaaaaggcatttagctttgtttttgacttttccgttttgccaaaatacggcggggagagatggggagggagggattgtttagcattgagcagacatttgaagaaggttgtagtggagggatcaatgcaagcgccgccaccctgcagctcggccccacgtcgaccacgaggctaatcgcggactcggccggcaatgtgaccacaaaacagcagccgacgaacggcccaccccaccaccaacacatggccaatttggcaccggcacaacaccaacaccaccacatggcaacagcgcatcagcaccaaatacacacgaacaatggggggacggagcagcaacagacgcaccaaatggcacagggcaaaacgactgaaaaaggcagcgcaacgacaagcgcatgtctgctgaacaacatttcggaggaccaccggcacacgcacacaatgccaacgacgggtattcccaccttcggagtccgctccagggagcgagtgctgctggaaaggcacgagttgcagccgaacaacggcgccggcggtgccgaattgtgacggacgaaatggtggaggccatttcaagaagagctttatcttttgttaattgtctatctcattattgccaattagccccattcattttctttcttatttttggataccgtatttgccaatccttttttgttactatgtttctctcttcctctctctctcccctctctctttctctcctctctctcgctctctctcccttctctctccctcccattcccctta

SEQ ID NO: 22600 - DNA, 1918 bp, Heterodera glycines
ctttgcaaatgctcaaagaacgactccacaaacgaaccattgagcaccaaatccgaattgaagtgcgtaattaatttggagtgaccaatcagcaaatcaattaactactcattagtactaatcattcttctcccctcaaggaaatgtccgctcgttgtctgagggtatttcgggacagattggcatcgcttgaggcgcaattggaaagcgcaattcagaaaagggaggcggagagactgaatgggttggaacggaaggaatacagcgaactgcggaaagtctgttcaaaaggccaaatggatcccgcataaaatgtaccattgtttgaggagttggaacaattcgacaaaacattggccaagtcggcgaatggcactgatcagaaggcacattggccaaggaaatgggcgaaacgattccaacaattacacaataatttaaacattttcggcaacaatttggccaatgcgaaagtaagtgccaaaaagggaattgcaattaattaattaattaatgagaaatgccaaattgttgagattgccattggagcgagggaagaacggaaggaactcaaattggtgcatcatttgagtgcatttgggaaatggcttgatttggtgcgttttatttatttgaattttctggttaagcgaaggggcggagaaagggtaaatttggggttaagaaaccaattgtatgcatttttacactctcgtgattcttgttgttttggaatgcatttaattaaattaattactgtccccacttccatgtcattaattaatttcggctcggagggtcagtcaaaaaaataattaaaatgattagtcagccggggggggggcgttaagtgtggggcgaaattgagaagaaagcgctgcgggagggaatgtttgcctttctttgcccgtccaacttttgtttttgctgtgatcagatcgaacatgagatgctccaattgcactcccccgatcagtcagctgatccctttgaaagtgatcggagtgagagacgcgtcaaattgaccaaactgcgtgacaattgcgtacaacacttccgactggtgggccgaatctgtgaaaactcagcacattcattttccatactttttttaaaaatttaatttgattggaaacccaattttgggatttgtgaatttaattttgaggtgttttagcataacgaattaacaaaaaacttatcttttgaatttttattttttgcaaaaattaacgaaatgtttacccttttcatgagcacatttttaggaaccaaacatcaaaaagggccaactgacaaagagaattcaaatcgatttgagaaagaattttgctgaattgaatggccaattcaattttcaataataataatatacatttataaaacatagagatgctctcctaaaagatgaattaaattatttttattttttgaatttaaattttgcttcaacaaattccccccccccttttcccttttttaggtcgttaaattgcaaacgcaccaatttgccagtgaagaacaagccgaacaagcacacacattgtgtcagcagtacagaaaagtgatggagcagttcgagaagatgcgattgccaatttcacatttgattcccgtgaaaaaagcggaggaaacgcacgacggaaacggcgacaataaaagcggcggaggaattacggagagagcgcagtcgcaggtggtgccaaagagagggacggaagggcatacaatcattctcaatttggcactttttgccgttgccatagacaaacagttttcctggatgcagacaccttccaaacatatttttttgttttaaaatttggtttttttttaaattggcgttttgttttggcccctttctttccggtatgaaatatgaatgccattctttgcatttgccattgtcagctctcct

SEQ ID NO: 22601 - DNA, 2404 bp, Heterodera glycines
gggtcataaaaagtttaaaaaataggtataaatccagcaaataaaattctaagtaaggatttagagtaatttaaaaatgtgggtgggcgctcgcgctatataaataagtgcgcgtgtccccatcggcccatttcaatttattcctgtcaaacatttggccatcagtttttcatgtcggataaaaaagcattgtttaagcgtgttatcgcagaggtggacctcactataagcacgggcggcataactttgagcggcccccgcctgtctgttccccgtttcattccgtttgaggaaaacgggcgttgccgagcatgtaaaggaactgaggctgaggtggacacaatggtcaccaaggagggaatcaccttatggtgcacacgcatagaaaaagcgcagtttgtcccttttgacattgtctacgagctccccggtcattgttttttccgcgtgaaaaataaggcaagggtgttcagcgttccgtacagcgaactgccgtcctcagacaggtgcgcccagcctctacccccaccaccaccaccaccaccaccaatgacaacagcaaaacatcaacggacaccggacgacgaggaggagaagaatttgaggcgtaaggcaaaggtggcgcttgacttagtggaagctggtctagcggcagacgcaatgatgcaggatgggacgcgttggaagaaagccaaaaccgcgatcaatgtgctggccaatttgcttttggcggaatcattaacagatgtctcgccaacttttgatcaacaacaacaacaacaacagctatcgtcaaaagaggaggagaagagggaggaatgcacaaacaacagcagtgctgcagcaacaactgaatctgctcccgatggtgatgtaatggacgatttcgtcaatagcattcaagcggcgacaagcaatatgcaatagcaaagcgtaaaactgataaactcgctctgccctatatataaaagttgttgattgctgcacgatttgtcataatttttgaaaatgttaaattctcaatcgttcagtaataaagatatttgtttcaaattgccttgcggtataattatttccgggccatcctcgtcgggcaaaacggaattcctactaaaatttattgctgagtgcaatgaactgatcgcacccagtcccatctcaattctgtactgttttggtgagatgaattcggcggtgccgctactacaaaaggcgggagttgaggtgtattcgggcgtaccttcggaggagctgattaggcgccttcccaaaccgatgctgctcattctcgacgatctgatgctgtcaatagaggagcgctatctgtccgatttgttcaccaaaaaatcccatcaccatcagtttacggtagtgttcatcactcagaatctgtttgagcggaagatcaaggtggctcgcctttcggcgcagtatttggtgctaatgcgcgcgcccaactcgctgctgtccattcgaaatattggagttcagctttttccgcgtcaactcgattttttccttgacgcctaccgcaaggcgaccgcccgcccctatggctatttgctaatcgatatgcacgcatcatctgatccggcgcttcgcctccgcaccaacatatttaaagaggagcaggaggaggacgagggaacagttgtgttcattcccaaaaatggagcggtataaacggcaacaacaacgacaacaacaacaacaacaacaagctaaagttactcaactaataaaagataatgccaactggctttgcgcactgtcgaaggcaaaatgtgtgaaacgatgcgggagactgatcagaaaggcgaacactgatcagctgctgtcactggtggaagtgtgcttgaacattgttgcttcctgattcagactgacaactcggcagaagaaacgactaatgccctacgtggacacggtgcgccgcgtgagtgagcgagaagtgagagggacgctaagcgagcgcttgtcatccagaaaggagaggggtttggcggactatttgcagcccttttaacccccgtattaattgaattggccaaatcggttgtgacccgaaaagaaaggaatatgcggacagaccaacaaaagttgagctgaccagggaaataagtgtaatgatgaatagaggtggcgaaggcttagataaatcatgcaaagtttaaataatcacaaaatacaagtaatatacatagccgaatttaaaaaaaatataaattacaaatatttttgatacagcaaaaaattaaaattaaatccagattagcgagtgataaaaaacttacaattgttaaactgcccatttgatttttgaccaaataaactaaaaaaaattagtcttagaaattaaagagaagtttgatgtttctaaaaatattttcataaaataatcaaa

SEQ ID NO: 22602 - DNA, 1680 bp, Heterodera glycines
  unsure (1)..(1680): unsure at all n locations
gcctaccagaatttccgaagccggagtttgagaagccgtcatttccgaagccgccgccaccgcccgaagtgggactggtgacggaaggacgacgctccgattgaccgaatccaccgccagcgttgttgaagaagccaccgcccccgtcgctgtcctgacgattctgtcgaccgaatccgccgccacctccgcccccgcggcctccaccgcgtcccccgcctccgccgtcgttccaacgattgcctctcccaccgcgacggttgccatccgactgattctgtgtgtcgccaaagccttgaaatgacaatgatgagtgggcgggagccccgacttttgtggccctgacatttgcgcctatgtccaaaatcgtattcaaagttgaattctgtcaagccctgatagcttaaacagaattaaaattaagaaaacactgtcttctagtttatcaggaccattaattctgaagtcgagacacgagcgggcgctaaggaagaattttaatttttttttttttctatggcgacgtcctttttctacttttaatccacttttttttgcggcgcattttcccaaatttttttttagaaacaggaggggtctggcagtgctggtaggccttacacctctgcctccctttcctcttgtacgactatttggccgtataattaaaaagtttcgttttatttcatcataaaaactaatttttcgttcattataaataacaaatttctaatgctcatccaaaataagtcatatcaccaagaaatggcccaaatatgaagaacattcatttaatttttatatcaagtgcataatgtaaattcccaactttctccttgtctgtctgttcatcccatcccaagccaatcctccccctttcattccaaaggtatcgtgccatttttatcccattcacctcttgtgcataatatgccattcatttctctctcattttcttngtgtttttgcctcattacccctcatcctacccnnaagtcatcccattttgccagtatctaagtctatttcatcttttcctatttcgcaaatttctgcaaaantgaatttcgttttcctatttcgtaattttttttacgaaatatacattttttagtgaaaattggtaataaaattttttgaagttctaaaatcgcaaaaaatcggggcgttcttgactggaattttccggggggggtatttttcccccgcggggccccccccccctcccttaaccaaaagttttttagaaaaaaaccaaaaatgggtttcaaaaacaaaaaaaaacttttcggggttttttttcaaagaaaaattaaattgggcttttttggggatttttggcccccaaattccccaccggggtcgttgaaaaccctttctttcacacccccccccccgccagggggggtggggggagaagacccccccccctgaacccccccccccgtggggaagaaaaacccccccccctttttttttaatttttaaaaaaaaaacccccccccccccccccccccccccaccccccccccccccccccccttgttaaataaattttctcccccccccaacaaatattttttagtgtttgtggtgtgtggtgcccccccccaattaaataaaaaaaaaaaaaataaaataaaaaaacaaaaaaaaaaaaaatttttttttttttttttt

SEQ ID NO: 22603 - DNA, 2233 bp, Heterodera glycines
aaaacggatatgcgtgggagggcatcatccgatttatttgcccaagtccctaagtctgtcagcacgcgtcatggctagcaaagggattcagccccaggtccgctccgatgacaaagaaatttacaactttttcaatgtacacctaaaaagagtggttggacgggtcacgattttttaccatcttcggtttgatgatacattttccgttatgagcagccatttcgtgttggaatgctaatctaatgaaaattcacactttgtattttggttcgataaataattgcaagaattcgtgtcggaaagttaaaaggaataattatagcacacggtaatcaatcattttaatttaagttgtaaatttttaaaattggcggcaactttaaaggaaattttttttataaaacgaaaaataatcaatcattcttttaattaatttttattttaagttgtaaaatattttgaaaaagtcggtatgataaaaagaaatattttttaagcattaaataaataatttttgatttggccatctgttgacccggttgccaaataatagccattttcggagaaagaaatggcccccactgccccctgatgaccctcgtagtgggccataattttctgatttttgatgtcccaaaatttgatgacgccattttttccataagtgccaaagatgagcccgtcggggtgaaactggccacagcaaatgtacggcaaatcatcattggatttaacctgttaaaattttaaaatatttttaataaaatatgttgttctccgactgttctccgactttgaccaaagggcgtccagcattgagatcgattagcgaccaatgcgagtcctcagaggagcagagcacaaagtcgccagtcgggtggaacgacacgtcgttcacagctttgccatgaattgcaattgtgtggattgatgtacactgatctacactccaaattcggatcttaatgaaaaaattgattgggtaattgaaaacaaaatattcaaaaaaaagatataaaaccctttaaacagacctgcgaatcaaatgagccctagacaaatgtttcaatgcttggatgtaaacaaacttttgaaattttagccgaatgcccgataaaagtccttctttgggtgtcctcctcattaaatttgtttaatgtcacatatttgtcaacaccaccgcttaaaattaattgttctaaaaatatgtggagaattttaaaatgtgatttatattctgtttaaaaatacctggaaatcaacagtacaaattgcgccattatgtattccttgaaatgtcattccctcactaaatttttcaatttgttcgaccgttgccaacccctcgggcaattggacacgctgctgtcgcgcagtgaagaattccatatgtttaaaattaaagaactgaaaataatctgcaatttgtcaaaaaatttttaaattcgatatcgaaacgaaaaataattaattattttatttgcttttaaaactcttcgtaaatgcaaagaattcataaatttttaatcctgcactcccctcccccttctcacattgaccaactccttgccgattccacataattttgttttgcgatgctcgcgaagttgcgcaactctttgagcatattccataggaatttttttaaattttgatatgttgattgatcatgttgacaccacactcgctgattccacagttgacgctcgcagctctttcgctttatcacgcaattaacggtatttcttccctcctcgtttggtcttctttttaggaggaccatttgcctttaaacaaaattgagtaattgaaatgttaataattaattaattaacttacatcctccccaactacaataaggtgatcatcatcaccatcatcaccaccaccaccatccgcagcagatgccagggcacttcctaataaaaacggctcctcaataatttcgtcaacctcgtccaattctgcatgtgcctctttattttttgatggaaaaatttttccaaggattccgcgtccttaatttcatgcaatggaaaagaatttataaaatgcaatactaaacaatcttctccaatccatgagatgcccggaccccatccacagtccatactccccgaacaattccacaaatttttataataagcaaagtcattggcacattcatcgcaatgcacaactgctggaccaatggaatattttttaaaaatattctggctgtaggggctcggaa

SEQ ID NO: 22604 - DNA, 971 bp, Heterodera glycines
ctttgacggtggcgatggacaacggacggagacggaagaggagaaacgaaagacattggaagcagcaaagcctaagaaaatggaaagggaggaaaagagaaaaagaaggaaaagagagggaaagggaaaggaggaaaagaagggaaggtaaaaataaaaaaaattattttgtggaaagaaagtgcgttcttcagccatttaaccctccgtttttcttcgtgcgttcgtcccacgtccattgatcgtctcccccccccatccgatcattttgctgtttttatctcttcattcattcctcgtccactttctcactgtcctctctctctctctgctcatttccattttccattatttttcactaatcgatttcattttcttccttttatggtaaatgaatggcatttcctgttaagtcagctgattttaacaaatgctttttcattccttttgttcctcaaaatatgtgaaactttgtcgataaaaagaaatgggcaaatgctatgcgtcgggtgagaatcgaacccacgccgcctccacccggccaatgtggagtttttaccattgagctaacgaagcacatccgccctttttgtgtttcttaccaatcccacccactttcggcattttggctgatcaccgctttttccttacattattatgcgctgcttcttcccccgtgtcgtccgaagtgttttcccctcgcccctttccttcgtccgttcctctctctccactttttatcccatcgatgaccaattgttcggtttggacgaggaacaacgacaggtgttcggacttttttctgatagtttctccattccttccgttagcttcgtcaattggtctttcgactcgctcaaaaggaattggccccttttgctgatgaattgaccgtcaaaatgaattcacaaaacttcgcgatttttggcgattgcttggtcaacaggccttttgtgggtcacagtgccagc

SEQ ID NO: 22605 - DNA, 1359 bp, Heterodera glycines
ccccccccccctcccgcagactgatgcaagccgcttgtgacgtcgccttcgaatatgcccattcgcgcattgccttcagcagtcccatcggcacatttcaggcaaagcccaagtgcctttggcaatcgcatggacacgcccattttcagctaatgcaaggcaaattagcggatatgtacgtgcgtttgtccgcttccagggcgtatttatacgcagtggcaaaaaatgcggcggactcagacgaaggattaaacgcaaaagtttgtcaacttctgacaactttgtgatcaaacacttattataaaggattctgctggaacgatcctttttttggccgaaaatgcaacacaaatggcattggacgccattcaggtcaaataaacaggggggggggggtgaccaaaggatgtaccgacgcagcaaccgatcaggtgctgggagggaacggctacatcaacgattaccccacgggacggctgcttagagatgcgaaattgtacgaaattggggcagggacgtcagaagtacgtcggttggtgatcggaagagcattgaacagagaatatatgaaaaagtgattgcatcaaagggaattggagcggaaatgggaaaattctgtccgatcggccgcctttcactctcacactgacaatgggcagtgtcgtcatttgtgtcactccgttatcttttccaaatgttctgtgtaaatctttgggtgatcaatcgccaactttctctgtctgtttgtccgtctctccatttttcttttctcatcgttcctttttctcttcattttctctcttctgaactccttccgaatctgatcagtggtgcggcatctgtccgaatataagctcgtttcccgaaccgaatcagaggggccgccctttccgctggtcgacggccgaatcgcatcaatgggacgacagttgaccgttttccaaaatgatcggcggaaggcttaaaatggggggggatgattgggatggcacgccgactgacccatcggagcagaaattgtcgcccttcggggcgtttttggaaatcattggctttggcgacggacggcgtccgcttcataaacgaccagggctggtagaacattcgctttccgccttaatccaagccaaagtgttcactttttctttgttttgtcacctctttcctccataattctcatttctgacgattcgtaactttgcgaattgactgaaagcagcgaaaggaaaagaagggacaaaagggagagaaaagggggagggggacggacgaagaagcgaaggggacgaagcgacggacaacggcgaaacattggcaaaaacggaacggaaagaagggaagcgcaaaggagacgaagga

SEQ ID NO: 22606 - DNA, 1604 bp, Heterodera glycines
taagggcttttgaatcagaccaagaatggtgtatttcggttaacaaagaaaaatgctatgatactcaaaacttggctgggacagagttggcgtgagggatttggcccgtcctcgcaccagggatggcacggaattcgattttcaatttccaaaattttttaggccctcggaatgccatccatccctgtcccgcaccatacacagaattttttttttaaagatgtgtacaaaatgccacttgtcaccgacatcacagtttggcaggggccgaacacggaagagaaaatgatgcgcgaaattatgacaaatgggccagtccaagttgcatacaacatttacgaagatttccatcgctgttgcgcaaacggcgaaatatatcaagtaaccataggggagattttggcgatatgtaaaaggagtaggactccgatttccgaaattttttggcttcaaaatgcctattttgctttcattttgggcgcctcggaatgccagccatcccttttatatataatataaatacatatttattgaaatttttaaaaatgcacgtttatactgtagcaattgctttaattagaaaaaaattttgattaatattttctgctaaactactatattatcggcccggtacagtatgacacaaaaatatattggcatatccaatttgtgaaaaattttatctgctattgatcagactgttttttagaagggatttttctaacaatatgtgggtggaatgtagtttttttattttaatttgtaatctttttaaaatgtatattaaatattcttaaaattttaattccgatgtaatttttgttgctgaaccaaaaatatattggaaaattttagaaaaaaaaataattcagataagtaatacatagaatttttttaaaaattcggtatgcctaggtaattttgtgtcacactgtaacacttctctctaccgtacttaaacctaattttatgtagcacggtgtcaacagtacaaaaactgaattcgcacattcggtgacggcaattggttggggtgaagcgaacggtaccaaatatgggctgcttgccaacacgtggggcacagagttaaaccgagcaactaattattagggcttcctttttacaggcaaatatgcctaaattttctgcgcattcatacgctcaaaataagcacgaaaaacgcgttttccttggtttgggatttctacggtaacttttataatgcctatttttgcctgttccggcatttttgtgtctaatgtgccaattttggaaaaaatccttaacaaaattgctataaaaatgaaaaacacactcctaagaaatgactaacaaaagtttcagaaaatactcccctaaaaattgaaaataaattttcccaaattaattagtttttggtttaataatttgtccttattcggaataaactttaaatctattaaataattttatttacaatttgagatatttaagtttttacgtgttttactacctaaagacgataataataatatttttttgcctatttcttgattttgtgcataaaaaggaagccctcctactaaattatttaatatttacttaaacaaaaaaatttcttctgc

SEQ ID NO: 22607 - DNA, 1000 bp, Heterodera glycines
caaaacttaataataatttcgtttatttgaaattgaataaatattcgataacttatgctttctttggtaaagatttatttatatgtggttaagtaacttgtgcacattttgtacttttatgcgttggtatatcccccaaatatgtaattgtttttttatgcatttttgtacattttatatgcttattctatctattgtggcttttggatctagaaggattgtttttgggcaaagtccgataaaaggctaaatttttccaaaacgccacaaaataacaatattttgatgagaatttattaaaaattctggctaacatttccaattttcccggcgacgcacgtcagcggaacctaattacttaattaatttcgcgaaatttagttaaaaaaatggactattactgaaataaagataattaaaaaagcaaaaatttgttagaaatgccttaaaaaattgtttttttttattaaatttataatcgatttaagtatacaaggcaaaattttttaaataattctcgagtcatggaaaatttgcactactgtttagttagcatttaatggttcatttaattttttggcaacatgagtttttttgggcctggatttttgtccaggaaatccaggtccgggatttttacaaaataccgttctctaataaataggtatgtgttttcaattacgggtgcggaaaattgaaaacaacacatttgttgttgttgttttttttcattatacaaaatgaacattttgcaaatttggaagaaacggtcgtgccaatagtcgtcgacagggaaaattttttgtaattttaatgcaattagttaaaaaaagattttgatgaaataaagaaaatttccaacagtggacaatccgtcaatgaaaatccatccgtcagcaaaatttatttatagaattcaaagcttgttttaattactaaaaaaagttaaaatgatcatagttaaaaattttcggaataatttatgtagaagaaaaattaa

SEQ ID NO: 22608 - DNA, 1480 bp, Heterodera glycines
  unsure (1)..(1480): unsure at all n locations
atcatcaaaatgtcggtgaattcaagggcatgagattgattgnaaattaaccatatggtgaatagggtcacaaatccattaacttatagactataaaaccgaaaattgtgagccgtatattcattcgttcattcgtaatattaaatntaattttatttagatcaatnttattcaaataatttcgcaaatgtctaagcaatgtaaaaattttcaataatagatgtatgaataatttttttctctctagctcaagctgtgtttgagcgctcaccaactcctgactctgagctcaacgaattatcggcatggtacgaaatattggaggatgacgacgacaacgtaaaaaaattttttgttgtaaattgtatttcataaattattttattccagattttacattggttcaccccaaagaaggcgcgtgacgtgtgccaggaggttttggaatttgcacaagaacgaggaatgccttgcgagaagttgaccaaatggatgaaaattctcaacaaaatttgcgccccacgacttgaagaatcgaagtgacctgatctctttcaatgtgaagaaattcctctgtatttctctcaatgctaaataaaaattgtgaatttgagtagtgtaattgagaagggatgggtgggaagaatgtcattcggaactgtcacacgggactcagttctgagtgcccatcttcctccacttttttcaattctgtcttgtcaaaatgggcggggcttagccctttgacaagtgtatataaacagttggtattcatccattcatgtcatttcatttgaaaatttaaaattctgttaaatggctatcaatatgtccgacaaaagatcccttgtcaatcaaattctcgcccaatcggacatcactgtgacaacaagcggcataactgtgagcggtcctcgtctctccactccacggttcatacctttcgatgagtgtggtcgctgccgtgcatgtaaagcaaccgaagttgaggtggacctaatggtgaccaaagaggggatcaccttgtggtgcagtcggatcagcaaagcccaattcgtcccatttgatgtcgtttacgacctaccaggccactgcttcttccgtgtgaaaaacaaggccagagtgttcaatgtaccctatggagatttaccttctgacacgtgtacccccaccccgaccaccactccaacccaaggcacacaagccggagagcaacagcaggacttgaagcgaaaggcgaaggtagctcttgacttggtggaagctgggctaatggccgatgccatgcaggacggcacgcgttggaagaaggccaaaaccgcaatcaatgtgcttggaaatctccttttagcggaatctctggacaaaaaagtgacaaatagccctgtggaggaagaaaaggtgcaggaagagcccaaagaaaaagaggaaaacaaggaggaccttggagacattgacaaaacacttgatgangtcttca

SEQ ID NO: 22609 - DNA, 1246 bp, Heterodera glycines
  unsure (1)..(1246): unsure at all n locations
gcgcagacgcgggatggtgcttcgcactgttgccgcggtggtggtggcgtacacgtaggcgccgccggccactttcttgtgacacttggaacaattccaaatcccgacacacactcgcttcatggcctcctntaagagagataaattattgtttttattttgaagattggtcatgaaatatttgagttcccgatgcaatgattaaacaaaatgatagttttctgggcttggacgtttgcaacccacagatttagtgtctttttgcacataataagtgcctcttatcccattgactttttcaagggtaattccaatcgtcaacacaaaaaaatataaaaatgatgttttgagcagttctgcaatgtaatttcaggttatcgaaaaacaactcacgctttgacaatgtattaaatgcaataagcaatttggatggtaattttgagaataagcaaattatttcacaaatttagggtccaaaattaatgtcagatgaatgatagtcattttcgaataactctgagcacatcgcaaaaccgctaaaaacagaatgacaatcccatggaatttaccatcttttgattagtgttttattgtatccgtcttcttgtcgctagcaaattgcaacataatgtgcggtatgcaaaccttgccgcagaatgcacatgtgtatttggcatgttgagacacctccatctttttgactgtcttccgcaacgaggcgccgtaccgagtgccgtacttcccgacaatgccgaccttttttgtgcgctttgcctaagcaattgaatatgaattaattgagttatcagtaatgctattccgttacaacttaccatttcttgttgtcggacgaaaccaaataaaaaagtgaattcaataaatttctgaaaaattaaaaatgtttttgtttaaaataaaatatggaatttgatgaaaagtggaatgaaatgaaaaactcaattagtcataccagctttaaatgtctctaacacatgaaaaatagcaattcacaaattataataatcttgattgtaaaggtacaaaaacactatggacatttagaatcaataaaaaatgattaatcttagcatttttgttagaaacggcggcctaggactttaagtataacgtgataaaaatttgaaactccnnacacttttttctgagatgtcaaattgcttagcattcacttnagaaaaagattctccttntcaaaaactttttttaaatatcaaatttgttcagt

SEQ ID NO: 22610 - DNA, 1711 bp, Heterodera glycines
gggactcaaatctccggcattccagacactgggactcaacccaccaactttcaatggcattccaatctctgggactcacccacccagcagcatttcaatctctgagaatcaacccaccagcatttcaatctctgggactcaacacaccagcatttcaatctctgttactcaaatctccggcattccagacactgggactcaacccaccagcatttcaatgtcattccaatctctgggactcaacccaccagcatttcaagctctgagactcaattctcaggctttccaatcgctgggactcaacccaccaacatttcaatctctgggactcaaatctccggcattccaaacactgggactcaacccaccaactttcaatggcattccaatctctgggactcaacccaccagcatttcaatctcggtgactcaaatctccggcattccagacactgggactcaacccaccagcatttcaatctctgagactcaattctcaggctttccaatcgctgggactcaacccaccagcatttcaatgtctgggactaaaatctccggcattccagacactgggactcaacccaccaactttcaatggcattccaatctctggggctcaacccaccagcatttcaatctctgagactcaacccaccagcatttcaatctctgggactcaacacaccagcatttcaatctctgggactcaaatctccggcattccagacactgggactcaacccaccagcattttaatttcattccaatctctgggactcaacccaccagcatttcaaactctgagactcaattctcaggctttccaatcgctggaactcaacccaccaacatttcaatctctgggactcaaatctccggcattccaaacactgggactcaacccaccaactttcaatggccttccaatctctgggactcaacccaccaactttcaatggccttccaatctctgggactcaacccaccagcatttcaatctctgggactcaacccaccagcatttcaatctctgagactcaattctcaggctttccaatcgctgggactcaacccaccagcatttcaatctctgggactcaaatctctggcattccaaacactgggacttaacccaccaactttcaatggcattccaatctctgggactcaacccaccagcatttcaatctctgggactcaacacaccagcatttcaatctctgggactcaaatctccggcattccagacactgggactcaacccaccaactttcaatggcattccaatctctgggactcaacccaccagcatttcaatctctgagactcaattctcaggctttccaatcgctgggactcaacccaccagcatttcaatctctgggactcaaatctctggcattccaaacactgggacttaacccaccaactttcaatggcattccaatctctgggactcaacccaccagcatttcaatctctgggactcaacccaccagcatttcaatctctgagactcaattctcaggctttccaatcgctgggactcaacccaccagcatttcaatctctgggactcaaatctcctgcattccagacactgggactcaacccaccaactttcaatggcattccaatctctgggactcaacccaccagcatttcaatctctgagactcaattctaaggctttccaatcgctgggact

SEQ ID NO: 22611 - DNA, 3522 bp, Heterodera glycines
  unsure (1)..(3522): unsure at all n locations
tttgggaaagttttttcttgcaaaaaatccacgcaatcttttaatagtcgaaataacggttgatgctgacgatttttcattagaaaactgaaattattcacaattatttttagtttttacatatttcacttgcctttaaagtctctcgatgaaaaactcccaataaagggcacagttcgcgcaaaaaatcaaagtcggtaatttccaaatttggcaaattttctgcgacaatgtcgaggcgcgacttttttgatgggccaacaccgaatccacgtctttctccttcaatggttaaaagaacgtttttttgttcacgaaatgccatcatcatttcaaaagtcgaattccaacgggtcgggcaggccttaatttaaatgaagattttgaaaacattaatttataaaaccattatgagtttttttggcttcgaatttgtcttttcttggtacccgcggagcaaggacatgcccttacttgtacgaaaaaaggtaacccaagaccgaattttggaaataagtcctgccaactcaggcagtcccaatacgtctcccataacaagatgaagaaaatggcacacacattgaaagcttaaaaaataattataaaaaaactaaaatttggtaaaacctattcaagttcgaaatattggaggcccttatcatgttttttgcgttatcgcaaaccaaacaaattattttttctgggtttccatttgtccgaagtgaatttgcgatttcttctgctatgtaaattcccgtgtgatttgtcattggaatcacatcaagtacaaaatcggcgcgttcaaagtattcatttacatggtgtagagtaacactaaaatctgttgatataaaccatgaaaaaaaggagtataaaaccttaagagcgcgggtgattttgtaatttgagaccacccatcagaggtcaccgaaaaaaagtcctgatcaattcgctgaacaattttttgttgaatttcgtctgccattttgggaattacagttctccgaaaatattctctttgtcgaagcttaaaaataattatgcatatatgtagtgaaaatgtgttaaaaatattactttgagttttgggtaggccaattcgttcttatcatcagccgtgcgatttgttcatccaccttttttttgggtcttctttgccaaagaatttggtaatcccttggtttttctgaattttttttaatttgaggtaaaaacgaagtttatattaccgtagactggtcagatttttgcaaatatttttcatattctttgccatgtttcgttttaaaatgcccccacaacccttttgtgcacgattgcttacatgctaattggttttcacaaagctggcacttggcaaattccgaagaaattttagtaaaaacattccaaatatcagatgcttttgaagtcatttgaagtaataaattgggtgaaccctataaaatcacagaaaaattgaaaattatgtgcaagctgcaaattattattaaaaaagtattttttattaattttttaaagagtataaaaaattcgtttggcttgctgtattggtataatttaaatggttgaatagctttaaatttttacaacgttcggagtccccaatcccccgaattagtgtcggggggtcggggggcaaaaagtcgggggtcggggaccgccggggggcacatgtcgggggtcgggtcggggaataggtcccaaaaacgtctcggggcgggtcgggggtcggggggctcggggtcggggagcaaccctaatttaaattattaattcattaagttaatgtttgaataaatcttgatttttgcacaaattctataataaataacaaagttttttttactttttattataattggttgacttgataatataaattcatttttttgagaccgaaagttttttcaatttatttacatgccaataatttgggcatttagaatcaaattttacattttttccactagcattcaaagccagaaatttataccaataatctttatttaaaaaaatatatttaattatctttttttaatattacttatttaattaattgtttatttttatatttcatttttatcccccaaggttcttttgtattattaaaatttgttctaaaggaataaagaatctgtattatttcattaatttccttatatatataccactgtatttttatttgtaaatttatttctccaaatatcatggttaggagctgagattcagtcccaatgacaaataactgtttatttatttttcattattttatagagtttaataatttttatttaatctgtataagaattaattttgttaagcaagtattctgtctattaatacattttttcaatataaattataagatacaatttttttagcatttaaattccgtgaattttatctcactaaaagtcgcggccctacctatgacattaaaatcttcaaacataattttatttatttttatttgaaaaagatttattttttattgaatagctcatattattttaaagtttatttaatttatttaaagagaataaaaaatgtttgtttatattattgtttttatttcattcctaatttcatgtttggacacgcgagtttgatgtcattcttttgaggttgattaacttaggatttaattgtccatttttgaatattattataagaaaataaattttctttaagtttcggtttaatgctttaagcgacacgcactttcttaataaaagtattttttgatattttgttatttaaagcttttgttttgttatttttgtaaattatctttttcatttattaatttttattcccgattatatttttcaattattttaataaattaatttaataaaagttaaatttcaaacatagttttttatttgatattcactcgttctcgagaagggttaaaagataatattcatttttcattattagttcttcgcaattcgctatattggcgctttttcattaatccaaaaattttttaaaaagagaaaattaattaaatatgaacaaatatgaatgattgacacttcactacaagattaatttgtttacaattattaaatatattttacagttttgacttttcgtttgatgtcttataagtaattttataaaattattgaacaaagttttttcattttcatgtttgtattttaagattttataattgttatgctaatgaaattgttatactctcattgcatagaaatataatttaattttgatttaaatttttattctcttgaaatcacctttattaatttctttattgaaattatgaactatatttttctaaaacttttaacaaattttatttatttattgtctcagaaattagaaagaaacaacaattcaaatttataaaattttataatttatcatttttcttttttcggtaattagttatttttttattatagaaaaagtctattattanatattttattttaaatagggaatttcatatttttccatanatatttcgaataataattccagattttt

SEQ ID NO: 22612 - DNA, 2612 bp, Heterodera glycines
  unsure (1)..(2612): unsure at all n locations
aaaatacacccctaaaaatgaaaaattttcttaaaaattcgtctccaaaattatttttttatttttgacaagaatttttttaaaaattgtgtatctcaaaagtgatttggcttaattttgttacctttttgatgcattttgtcattttacaccccctaaattaaagctttttagtgcccattttggagtttttttagaacctagtgcctacctattttggcagtttttagagcctaaaaatcgtatccatatatataaaatagatgatgtaaataaaatgtttcattaattagctcaaatttaaactcaccgatggatttgcatgtgaaatcacagcgttcccatgttttgtacgtgccgcagggacaacccaaatatttttcgctgttcaaaacggtgccacaactgctccaaaatgggctagaaatgggtgaaacattaataaccatatttggaactttttatttatttatttttacaaaaaattcgtttagtcccagcaaaaatgccataaaaatgtaaggctatagctccccttcctgactggctctgactgactccgtcatagccttgtttgaccagtgcttagctatttagcgcctagcacgattgtcgcacaatttcgtaaattaattgcctctaattaatgaatgaacacttacggagccgcttcgcggtaggctgatccgccgtataagcggtagtgacgacagaagcctggcccctcccaaattgagcaacgttttttgccagcagttgccctctaaaatttagttgttattttaaaattttaatttaatttaaaaaattaatttacctccatacattcacaaaattggttgtcgcaactcttttgtcctatttgcttgttgtagcatctgtaattgaaagattatatttaaaggtttataccaaaattgatgaaaatttatttttggttaatttaattgaaacttacccaaaaaatgattaaatttttcgctaattattttgggataattttataaaaattcatatttttatcaatcctttactcagtctgcacgtaacaacaattgttcatccggtcttaatttaatttttaaaaacaattaactaatgcattaaaatacatttaataatttacttttccatgatggacaatccgtgtccaccgccgcttcggtgagtgttctgaattaattttgaaattcaaattttgattttaagttgttgttgttgttgtcatgtgggtagccagccaccagggggaccagcaccatatttgccatcgtgctcgtccgacttatcgtatttgccagaaatgccaatatgaacaaatgccaagcaaaaaattgccaaaattgtcagtaccatttttcaattttcttaaattatggacaatttattttaattgctcaattcaaaatgttccctatcatctgatgagtgatagattttgaaattgaaaattatcattttatttaaattgagtataatttcaattaagaaatattttttatatataaaggttattttgagtttaaataaatgagtgaattcatttgaattgttcatttctttaaatgcatttcttttctgcaattagcttgtaaactcaataacgctaatcactcattagttaatcaaagcatcataacgctactaattaacgaccaattaatttcaatcaagttttgcggaggaagtcattttgcaattaggaaaaattggaanagtgtaaattgtgcgcagcagtgcaaatgtataacgaatggactaaaaaacaaaattgttcaccccaaaaaataggaaaaaataattgaaaaaaacaagttaggtgagcaaatattctcgacgtaactctcccctatctcaaaatgagtaattaatgaattaataaactaataaaataattaggaaaaattaattaattttaaaagagatttaaaaaacgaattaatgaaattatttgatataaggtcaaaaaacaataatgattagccatagcctaaatgatgagctaacaaataaattaagaatttttataaaaattatgtcgaattaaattaaaggtgcaatgactaagtacgaaaagtgcaagattgggcgaaaagtacgaaaaggtgcaaaataggcgaagtacgataaagtggaagtgatcaaattaaaagcaaaataataaattattttaaaaattaaaacaaaaattattttatattaattaaatttatcgtttttagtttttggaggtaagaattattagcgaaaaacgtgaaaaatgaaatgctattttttgatatttacataagataactattgaatatgtaccttcggctcaccacgtatataattaatatagaattgatctagcgaatatttaaataatatatgtattattattaaattcaattaacataaaattattttgattttaatttttaaaataattaattttgcttttaatttgagcacttgcactttcgtacttcgtctcatcacgtaaattaagtcatctcaattactaatgaataaatgctcaaagaataggaaacatgaaataatcagccgaagtgcctgattttgtagaaaacaagaaatttatgaaaatggggacaaattgaaagtattaa

SEQ ID NO: 22613 - DNA, 2167 bp, Heterodera glycines
caacaaaaggggcgcacaaaattcacattctcaccgcatcaattaggcattcggacaagcccgccgcttccccactcgctgtgtatgcataaattatcgtgttttgggccttagttttggccaaaaaccatttcaccaccacattcattccaaaatatgtcttccttaattgtatttcccttatcagctgatcaatctgacggaatttatctgctattgttgcatttatgcctcctcattagtgttacgcgcgcgcgccttgccttgtttattttgcgcgtcctttttgttgatttaaatttttgggtgtggcctaaaaacaggaaagtacccaaaataggactttccgtcaagaaccctgaacaaaatgttcatgtcggaaatccaggggcctcgcccaggttttatttcaaaattcaggtcccctctattttatttttgaattcaatccgtccgccaccgattgccttggccaaatggacgcgatggaatgcgatgaagtgagtgaagataagtaccaaaaaaatgccaaaaacttttcggttgaggtcgaagtgccgccaaaaaagaaagaaaggtccgtcttctcggctgagcaattggacagattggagcgcgaatttgtggccaacaaatatttgagtgcttttcaacgggaaaaattggccaaggaaaatggccttacggaaacgcaagtgaaagtgggaaaatattttactatataatatcggtcaaaaatattgcttcaaattttttttttaacaaaaaattgtttttttcaataataaaattttattcctttgttatgccaaaagaatatggcctaacaaaaaagcaaatatacacgaacagatttgctgaacctataaaaggcaatccgatagagaattttgtcctcttttttagaggcctattcaatttcccaaaaaaattttcccaaccccttaggaatattttcgaaaattttagcaattttcagtttgtataaactatagtgaacgccccgtgaaaaatgggttaaatgatataccaatcgattcgtctcaaggagctaagcatggaaaaatatgtctcgagttgcggaaatgccaaaaaaccggtttttgaatcggttcaaaactcgaaaaattgagtgaaaagggggacctctgaacctttaagacggtcaaattcggacaaatttggtatcattcgaaagctcttgatcagctaagtctaaaaaaacaaggtataaattcgaaccgatgccatctaggcactggacaactgagtcccagtgaaaatggacacttcagtaccaaaaaaaattttaaaaaatttcatcttatataatgcacgaaaatcgtttaaccttgaatatcgagtattgcgctaaaaaaccgccgcacactcgactacggcggccagtaggtggggcgagactacggaagaagtccgcgcgtgatccgcaggcggttgactgattggcaaagccaattggccagcttcgacgaattaacaccgaaccgatcttcacatgaccgcagatttatcctaattatatgattcgcacttaaacaagataatataaagacctcagctcaacatacttccaagctgatgtttgcacagtactacaaccaaatgcaccttataatgtgagactgcagaccaagaagcttacactcacgagggcttgacggccacctgacattcttctcggagtgctacgtattgaaaccagttgattgttagacaaataaaacagctaccaataccactaaccatttgccagtcgaaaatcggtgacatattcaatgtaacagggtcaattacgatcaagaaatcaacctacatctaattggtgatagtgggaaactaccaagaatcgccacactttactaaaacaggctcagaggcagattttcattcaacagcaagaaaaggacgaactgagacagcttcaacgcaacaaactcttgcccagcatagcaacattgcgatcaagacggaagagagaatccgttcccatcacctcaaaaacaatcctagattgatctttcatcagacagcgacacatccggcattgagatcatacaagatcccatttagggatagactaatctaatcaccaaatgagcatccaacggctccaattccctatggccagagcaacggctaacaccaa

SEQ ID NO: 22614 - DNA, 2025 bp, Heterodera glycines
tagatcgttgtttccgttattcatttctccttattttatgtgtttgaacaaagcctgcatttttggtcgaaagttgaaattcgaagaacctaaaattttcgcatttagactgtagtcgtttttgttttgttttgtaagttcactaaattgagacgtaaaaaaatgtttgagtcgaacaattaatgtatttcaaaagtttcacttttaagcgtggatacaatgtgcaaattgcaacaacgcataagggagggaaaaacaactgagtatcgtccagatatgaacatcgaacagcgggacaaagaattggaacagtggaagaaagcagttcggaaaacgacttaatgactcggcagagtgtgaattaattcctatcttttatacactagtagtttcttttatttttatatacacgctttaatagcaattttactttttaatttactataacatgcttgtgaataaaggacttaaactttgacgagggctacgatttatttaaatctcacgaagtgtgaaaaagcatttattttctttttcagtgtttgagcttggcactctgtttcgttcgtataactaaaaacttttcttgagaaggaatgcaaattcgattcgcggatttggaaatggattgtgactcggttgtgctgtcttcttcatcttcgtcgttgtccaaaacaatggagagtgaaactaatgaggacgaaattgaccaagaagagcagggaaacgaacacactcaagcggaagaggacgtaagcgattgtttgtgttattacgcctttattaagtgccttttagacttcccaccatcagcagaaatgttatgttgcgaaatgcttagactccattgcaaaactgcaaaggacgttccaattaagcaatggtctttccttcttcattcatattgacattttataattatttccctcttcagcctcggcggatgttttggaccgtgccgccgattatatgcaactttatttggaccgttatgcgaatgggaagttcggcgcagatgtgcgtttgttttctgttagcatttaatgttctcacttttgccagtgggttcggcgtatgcttttcatagcgcgaattcacggtgctccgttgtcaaggcttcgcttcattgacgtgaatgttcgtgttaaaattaacaatttaaccaatggaattttgcaaaatcaatagcaaaggaatgcagcgattccgccacatttagaaacacaaccgtaaaatggcggctttgtaccagtcgcttggcccgggctttcagacgcgttggctcagcggagccatcgacatggaacaattgtgggtgttcagttgtttacattcaccaatggtcagatctgtcttatttaatgaatcgcttactcccaattttcacattcttattgtcagatgtattggctaatagcgactgttaaagttcaaagcgagttactccactgttcccttgcaattttagttttgctcgcatggattttttggagtcgaagtacggagagcgtctttgggaactccattttgtttatggctatgaaaatatcaaccgttctgaggggtcgtttttccgttggcaaatcatctcgactgtccgttcgctttataaaggaattctgcgaaggaactgggccgaagtggcacaaaatatctgttcgtgttttagttgagaatttcatgcgtactcgcctttagcgaacatcgaattgaccatggccacccaatccaatgccaagtcgtatctctcctatctgcggaatagcctggcgccacacatctccgccatatttctgactgctctccaatgttcactcgaaaccaaatgttcgattgagcaaattagcgatgaatttattgaggtggggaaatccaagcgacggacgaacaaacggggggggggcaacgcatgagaaatatggatttattgtaattgaaaaaattatattttcgttgacaatcagttggtccagtggtaaatccaatctgtttgttctaaattgctgtcagttggcattctttccc

SEQ ID NO: 22615 - DNA, 1686 bp, Heterodera glycines
agcgcgcgcaatggtcagacagcagcacataagagaacagctggaggaagctgatcagctgcacgaccaaattgtagaagcggaacagcaaaacgacgaaaacgaggatcctgccctgcaacagcagcaacagcagcgtcaaatcatgttgcaggagcaatacgagaggaaagtacgtctgcagctgcgcgaaagccggcgattcagcagcggtgcggcgtcgtcacttgtggtgcccccagccaatttgtactgggagcgcgaatgtctgatctgtacggacgcgcccgccaactttttcaaccgttcatgcggccacgtgtgcctttgttcagactgcgctgtgaattgtgttcttcacaaaatacccacgtgcattctatgccgcgcggtagtgagtggcatttatgcattcgttcgttgaattatgatgtgagtgagaaatggcacttttcatattaatcaattcgctaccttcactcactcatatcaaaatggccaatgattcacaatatttgtaacccaataattcatcacttattttctctctggttttacgtgacttaccatcctttgaattaatttgcattccgttttttttcaactgcattttcaattaatcggcaaataaaatgcattgaaaattattgttcttcatcgttctgtcaatttgggagcgtagggagtgggtaggaatgaatgaatgaattgatgtacaaaaaaagtgactagagaaaataaatgataaagtttgtgactagaatttaaaaatcacattatttataaaattttaaaaaaagtttttttttttggctcagcgtcccaaataagtcagccgcttcatagcgtccgacatcgtccaaagacgtatgagccgctttcgagtcaaaatttgagcaaaataaataatgtgaaaaaaagtgactagagaaaataaatgataaaatttgtgactagaatttaaaaaaccacattatttataaaaatttaaagtttttttttttgactcagcgtcccaaataagtcagccgcttcatagcgtccgacatcgtccaaagacgtatgagccgctttcgagtcaaatttttgataaaaaataatgtgaaaaaaagtgactagagaaaataaatgataaaatttgtgactagaatttaaaaatcacattatttataaaatttaaaaaagttttttttttgactcagcgtcccaaataagtcagccgcttcatagcgtccgacatcgtccaaagacgtatgagccgctttcgagtcaattttttgataaaaaataaataatgtgacaaaaaaagtgattagagaagtaataaagaaaaattatagtattggattaatgtggagaagaggaccactcgtaatgtacagcactgagaaatgagctgacccaattgcaaaagtcgataagatagacagaaatgactgtctttggcgtatagcaaagtggggtggggttatggagggatggagatgaggaaaaggaatgtgaaaaggattgacctatgaattgatttttgtggaatgggaagaataaggacgtcagacacattacaaaaaaaatattcatatgatttttcaattttttcaattttaaatatttttagaatttgtcggaaatttattattattattattattattattatatttattaatgggaaagagaaagcaa

SEQ ID NO: 22616 - DNA, 2917 bp, Heterodera glycines
  unsure (1)..(2917): unsure at all n locations
gcggcgggttattagatttnttcaattgcttttatactaaaatatgtgcattaatttacatnntagatagtatttttcagacaaaattaatactgcaaaaaaaaacttaaccggacatttggacagtggacatcatgacagtggaacagtaggaaagtgaactcatttggacagaagcgcgcaattggacagtggtcattacgaccgacagtgaatgtattttttttactattgtaaatggctttagcaattttcaaaaacattctttatctttctttatcttagctttcgaaagaatcacctacgtaatgcttgatttgatgaaagaaaatttattttacctaatgatttaaaaaaatgttttttgttgctgctaaagccatttataataataaaatattcacttactgtcgcaatgtccgctgtccaattgtctgcttcagtccaaatgagttcactgtcaaaatgtccattgtgcaaatgtccgggagcccaaaagaaattgaaaaaactgagtgcagcgacatttatttaatggatttaataatattttttatacatttttaatagatttataatctttggatttacatagaattttccgatggatttcatttttattatgacattgctgaaagttgctcaaattaaataatgaacttttctattatgttttatattattctttttttgtagaaacataaaggtttttaaattatgtttttttgctattaaatcattatgtaatattaattttcttttttaaaattattttactaatttgattataatattgactaaagattattttattgtatttcattttaatttgaaaatattattgtaaaggttttgcataaattaaaaaaataaaagtaaattaattttattaaatttataataaagattggattttgtttatttattttcaaagaaaaatctgtacacaaattatcaaatgatttttttaatttgtcgtttgattttgtttatatttttgttcaacaacagaatattttgtgcttttccattaatctcatgactatcagacgtttatccgccatcaagttcaaatcaattattttttaaaactattacaatatttgcttttcaattgttttaaatgcgtaattaataataaaatttaaaaaattatatttgtttaataattatttattttcctattttaaacttattattttttgtaagttaaattattatctttttaactcttttatcttttaatctctgtttcttcaagcatttgtaaaacaaaacaatcaattaatcgtaaattaaactcagtaaattgctcacataaaatataattaagctggtatttggcattatgttagataaatattaatatatttcaaccacacgcgaggaaaaaaataatttttattatatactcttaattattgatattttatataaaaataatatgtaaatcattaattgtaattaatatttattgagtatgaatttaaaatgatatgataatagaaaactaattcatgcaattaattatagaaatttatttaattttatgttacttttaaaattaaaaaatttaatatttgtaattgaactttaaacaaaaaatatttaaattattcccacaataaaaattaaattttaattttcactttcatagcatgtcataataaataatttataaataagcttatatttgcaaaggaattcttcggttcagtggcgagtaattaagaaatttataaaatattaacaaatccgtaaagaatattacaaaaattgtttaaaaattcttatttttttattaaaattggaaaaaattgatttttcgctaaaaataaaaaaccatttataaaactaacaaactaaaagctgagactaataaaatgaataacaaacaataaaataatgtaattaattgtaaattttcattatttaaattaaaagcaaatagcatagtaatcctttatattggcaaaaaaaatactaaaacaaatttaacaaaatggtttattatgtctgttaattttaaacaaaaaatcttgcaaataatgaccacttttatggacatccaacgcccacccaaattagaaaaatattaggatgacaagaaaaatataatagtaatgttaaatagtaattgttggtctttcatattaactaattaaaatctttataaatcttggattattttttaaaatggaataaagaaaatttcgttgtttatgttctgtttttttacctattgtgttttgtcatttttttaacatttttattctaaattttttaattttccgatttttttccaattattctaaatttggttagttttgagcaaaactaaaaatttttcggaagtctgaatcggaattctgaccccaaatcacggcacacctctagccgttgcgggtaaattatgtatcaaatgatcaaaccctttaagaaaagacacaaaacaaaatcaaattatattaaatttagctgagaaaaagataaataaaaaagcacattaaaaaataaaataatataaataaggcaaataaaaattaaaccaaaattttattataaaaataatagttggtacggtagtccaagcatattcagatttttttagttcttctttgagtggagttatcacagtttttcgacccttttttcataacagttacgcatttaacaattcgcatcccaaaaatattaattgggtaccgtagtccacttgccgttcgtccatatacccttcggtttgtctacaggtgatatgggagagtgtattcctgatcttatttccttttttctgctgtatatttttcaagcaattttccgtcattgcacagcaactgctaagcgtacagcaacggcggcactcgcatccggtgcagctcttcaagcgctctccaagcatattgttatttttttt

SEQ ID NO: 22617 - DNA, 1630 bp, Heterodera glycines
tttattgtataaaatatttaaaaaaagaatgagcacatctttttgtttgtttgagtggaaaatccggtatatgaaggttttttttttgtgtgtaagaaaaaatttgttgttttgctgtttgtcattatttttttgtctaaattttgtttttgttaattgatttgagtttgatgtgaaagcttttgtgttgcttatgtaaacgataatggagaattgtttggttaaaaaaatgcattagaatttgtttgaatgaaaaaggtttgttacttaaaaaagttttttgtacttttccttgcttcttataatatgaaaagaatctgatttggtttttgatatttgttttgaataaaaagcatgttatgatagtaataaaaaatgaaagaaaaagcatttgatggatagaaaaaccaatataaatgctacatctcatgttttgcctgtgttcgagtggaatatttatatgcaattgggatattgacgtgccacttgcgggatcaaatttaggtggaaagttttaaacaggtcagttttaatttgaatttatggggtgggggcaataattatacaccatagtgttttgatttattatgggttatatttcaatttctggattccttttaaatagttctgtattccgttgctgaggttgagttccggtgattgaaatgtcggaggactgagtcccggtaattgtgttgctgaaggattgatgagattgagtccagtgatttgaattcgggagaattgagtcccagtgacttgaatgtggtggattgagtcccgttgattgaaatgttggtggattgagtcccagtgattgaaatgctggtgggttgagtcacgttgattggaatgttggtggattgagtcccagtgattgaaatgctggagggttaagtgttggcgattgaaatgttggtgggttgagtcccagtgattggaatgttggtggattgagtcacgttgattggaatgttggtggattgagtcccagtgattgaaatactggagggttaagtgttggcgattgaaatgttggtgggttgagtcccagtgattggaatgttggtggattgagtcccgttgattggaatgttggtggattgagtcccagtgatagaaatgctggagggttaagtgttggtgattgaaatgttggtgggttgagtcccagtgattgaaatgctggtgagttgagtcccggtgattgaaatgcaggagatttgaatcccagtgattaaaatgctggtgggttgagtcccccagtgattgaaatgctggtgggttgagtgccagtgattgaaatgcaggagaattttgagtcccagtgatggaaatgctggtgggttgagtcccagtgatttaaatgctggtgggttgagtcccagtgattgaaatgctgttgggttgagtcccagtgattggaatgctggtgggttgagtcccagtgattgaaatgctggtgagttgagtcccggtgattgaaatgccgcagatttgaatcccagtgattgaaatgctggtgggttgagtcccccagtgattgaaatgttggtgggttgagtgccagtgattgaaatgcaggaaaattttgagtcccagtgatggaaatgctgttgggttgagtccc

SEQ ID NO: 22618 - DNA, 1064 bp, Heterodera glycines
aaaggatacagtatctgatttatttcacaacgccaacactgcgttgaaaataaaaacacaagttgcatgtgatggcaaaagttgtgaaattcaaacgcattttacggccatgaattgccgggaagtgaggcgatcaaaattcataatgatagagaatgtgtggctttacctgttttgaagctaagtcggggatctgacggctaatatgagaataaagtgcagttcgctctttaaacgaactgattttatggccactttctataaaggcgatggcggtcgctgtatgaccgtaaacccagttttttgtatagaaaagggttgtccaaattgcaaatggatacagtatctgatttatttcacaacgccaacacgccgttgaaaataaaaacacaagttgcatgtgatggcaaaagttgtgaaattcaaacgcattttacggccatgaattgccgggaagtgaggcgatcaaaattcataatgatagagaatgtgtggctttaactgttttgaagctaagtcgggcatctgacggctaatatgagaataaagtgcagttctctctttaaacgaactgattttatggccactttctataaaggcgatggcggtcgctgtatgaccgtaaacccagttttttgtatagaaaagggttgtccaaattgcaaatggatacagtatctgatttatttcacaacgccaacacgccgttgaaaataaaaacacaagttgcatgtgatggcaaaagttgtgaaattcaaacgcattttacggccatgaattgccgggaagtgaggcgatcaaaattcataatgatagagaatgtgtggctttacctgttttgaagctaagtcggggatctgacggctaatatgagaataaagtgcagttctctctttaaacgaactgattttatggccactttctataaaggcgatggcggtcgctgtatgaccgtaaacccagttttttgtatagaaaaagggtgttctaattgcaaatggatacattatctgatttatttcaacaagccacacgccgttgaaaataaaaacacaagttgcatg

SEQ ID NO: 22619 - DNA, 878 bp, Heterodera glycines
acattccagcaggagatatttgtatagaaaaagtgaaagcgataacaaaaaaaatcatacaaatcttattttttattacttacttcaattataaattttgtatatgcaaattgtatattaatattaacatgtgtacaataaatcatgtagaaaattaattaaaaattactgtcgaaaccaatcactgtcgaaaacacctggtacgtttgggacgctatgtgcgtgaacttcatgttaattgggttcagttttattacgtttgacaattagtagagcagatcaaagtcgcctggcgtgctgaaattctggtcactcccgatcactttttgaaggagtgatctgatcaggtggtgcaattgacttttttgattagagtaaaaagatatagtacaagttatagtcttcagttttttgtcgaaaaattggctgttcttgtaattttacaacacattttaacattttcagcgatttctggctcacaaatggaaccattgccaaaaaatgcaattaaaataaataaaaattatttctaaaaaattatttaaattttcttaaaattaaaatcatcagaaaaaaaggatgtaaataaaatgaagaatttgatcaaagcgacccgcaaacccgcgggagctctttttatatgtaattgtgaaataaaataaaagcacaaaagaacattatataattgatgtgccttcgagtcattctcaaccacagcatccgtagcatcctccaccaccgcaactgtaacagtatccgtcaccgtaaccaccatatccgtatccaccgcctccggtagtgattataatcgccccgctaccgtaccccccgctgccgcactggccgcaagcatcacagcctttaaaatttgttgataa

SEQ ID NO: 22620 - DNA, 2143 bp, Heterodera glycines
ttgaaatggagcaggacaaaacgtcgccgggaaaaacgtcgacaggacataaattcgcaccataaattttttttaatttaaaaaaaatcaagaaaaatcaaaaaatttaattacctaacctaattcgaaaatttttttaagaaatttcacagaaaacaaaattttattttcaactttttcctttttttctggaaattcagcagatttatttttcagtaacaactagaattttcaaaaaaatactttaaaacaattttttaaatttaaatttttgaaaatttcggcgccgaattttaaggtatttcgatttgaaaatatgccattttttcttaccaaattgcttcttccattcataaatttttgtacgggtggttccaaaattttccgcaatttcatattcaatttaatttctttttttttcatcatatttgaaaccgtgaattttttcttttctcatttgatcaaattttctgatcagtccaatcattgtgtccttatcaatgtccttaaccatggtgttgctgcgcttcttctgtgtttgtcctaattgcttcttgaattgataaatgttgtcgcgagatgtgcccaatttttttgcaatttcatattcaaatttaggaaatggcaatttcttataaacttttttgtgccgtaattcctttttcatcgcactaaatttgttcaaaatttccatttctttccttttttctgcctcctaaatattaaaaatagagagcggatttatatggacaaaaaaaaatccaaaatatggattatatttatggacgaaaaaatcgtaaaatatggacgaaagatgctgaaatgtggagatgacaaaaaattctgaataagttttttgcaaaaaattcatttttacgcgaatttgtaatgaatttttttttgcaatttttcaattttatattttccaaaattccaaaaaatttccatctttaggggtgtgtttttcgaatttttttttgtgaaaatgccgaaatatggatgtacaatatggaaataaaaaaggcatcccctagaagcatcaaaccaaggctaaaaataccatgcacatgattttaggcagaaataaaattgtgaaaacaaaatattgaaatccatataaatccggtccctaattaggataaatattaagaaaacactctaaattaaaaatatatatatttttttcatgaaattgtacagtattctatcttacattaccgtatcactggaaccctgatcacccacagcattgctatgaataatagtatgtaaatcattctgatcagtttgctcatcaatctgatttacaaatgatccttcttcgctgaattggacgaattcagtttttggcactttgatggattttggcattaaaaaattcgtttgatcatccaattgttcagttttaattttttgttgaacttttggctttatgtcttcaatttctatttcaaaacaattctcagatttaataattgttttctttgctttttgctgttcataattttttgatgtcgatagcagtgaatttttccataaatcatcaaataaatcttcttcaattccatcaattagtacgatgattaaatataagaagaaagtaataataataaccaaattcattttcaccattttttgcgtcaaaaatttacaaaaaaaaaaaaaatataatttttgaaatttctgctcgtttcaaattactaatagagttagcaactattttgacagttttccataaattccttagcaaaattgcaataaaacaaaaaatacacccctaagaaatgaaaaattttctcaaaatcagtatccaaaatttatttttcgcaactattttgccattttgagagtttttagcacctatttcagtatttgtagcacctaaaaatcctactagctctaaattattacatgaatgaataacaaaaaaaaaaaatgaaataaaattaattcatcaataattgattttataattgcattttgccatattttatagaatttttatcattttgtaaaaaaaaaatattctccatgtataatttgtaattgttctgggaatgtaatttttaattttatagatcgtgatcggaaaatgcgtcagtggaaaagcgtcagtgatacaaatggtgtaaaataaagtact

SEQ ID NO: 22621 - DNA, 2183 bp, Heterodera glycines
gtcccggttcccggtcccgggttttgaaaagctcaggtcccagtcccggtcccggtaggtcaaccgggaaaaacaagcactggtaagaatgggggtctgagtgaaaaattagtgatgaaaattggagttaaagggaaaataaaaaataataattaatatattctttaaaagtaacgttgcccaatgtgcaacaaattgcacccaaatttttaaaatttcccccggcggcgcctatcggcaccgccggaccccttctttcccaaaagttttttgaaaaagcgctccgaaaaaaagtgatgtgaaaatcaaatctgaatttctattaatattcgatgatttagtccaaaaatgattaattgtttgaaataattgaagaaaatttgtttgaaaattttcattaatttaatttattataaaaaaccaaataattttgtattattttcacttgatataaattaaaatttgattttttttttaaatttttaaaatttttttgaatttttaaaatttcccggttggtcccggttcccggtttttcttgcggtcccggtcccgaaaaaaaatcgaggtcccggtcccggcttctcaggtcccggtcccggttttggcaaaaattcccggtccagtggcactctaattataatacaaaaatactgatgctgtgtttctttttgactcagattcgtaagctaaatttttaatatgaatttgtataatcaaaagagtctaaccgatgtttctaaatctggtgtatacacttgccaacggaaaattctttcctgtatacgttcgcaaactattatatttaattgaaacaatttgctggttgatgctaagtctaaattgttcatccatttctcagtttcgtgagctcctgctgctggtgaaactgatatctcgatgtgttttctaatatttaaacattctatagtggatgcgccttaatttttagttatttttttagattttctcaatttttctaattatttgaaatttaattttttttactgtaattgtaaaaccatgtttgacatagttcttcacgttcgtcctccgtaagtggattaaacacaaagtttaaggtagcccgcgccatggtttcaacatgtttaacttgtgataattttttatttttaaattattttttacttataatattttttattcattttgtttgaatttttttagaaaattaaaccttcttggctttcattactgctttggctttttggagatatttcttcttcagaactttttaattttttctttattatttcagcaaaaatttgtcccttagtttttaatttttctgcagattcttctgtgcgtaattttctttttctctaaaataaaaaatatatggctacttcaagaaaaagttgacctctctgattttttgatcttttctttagagataaatcgtatccgttctttcatttgtttttttgaattttcgatattgattatcatgaccaattataaataggaatttattgtcgaattttgaaaaacattgtgacacttcagcgttttaacattggattaatttattaaaggaattaaggcaataatattttttataataaatgtatgttaaagaaatttagctatttataccatttaaattgtaataaaactgccagcctcatatttcctgctgacacctattggtacaaccaaataaaaattaagtaaataattgtaaattaatttaataaagatttttagtctgtcactgctagactaataatatttccggctgacacttacttgcacaacaaataaaaattaatagatattattgtatatttaatttaacggatatacatacataatcatatgagttggtggttttaagaaacgccctagcaccattatagataatattttacctctttcacatttcttttttttctaaagattcattctgatatcaaaatgtttccaaaactaacatatagtattttagaattatctttgttaatttttaattttttaaataaagattaaaattttaattgcttccaccttctttgaaatatttaaaaacttcagtataaaaattttagttattttttatataaatttaaaaaaataatcagtgcttttcttttcctctaattacaatttccttgattaatttatgactactagcaaaaattaattgcattccaatttgtgat

SEQ ID NO: 22622 - DNA, 1736 bp, Heterodera glycines
tttgcttgattgctgtaggctttagtggtgtatacaggtttacatgccgaaacacaaataataattaatttaaataaattaacccaaagagacaccgtactgatgaggcccggtctctttcggttaaatttgcacgtttcgcgaagtgcccatttttgcactgtcgcgaaacgccccatttttacaccatttttgcactgtcgcgaagtgcccaatttttcatttttcgcgaagtgcccaatttttgcactgtcgcaaagtgccctttttgcacttgtcgcgaaatgacgtagcacccgatccccgacccctattaccaaagttttttgtcaaaaaaaattgaatcaaattaatgcgacaaataaaataattatgattataaaattttgccaaaaataatagaaaaaataaagtaatcgtgaaactgtatttctcatttttggttgctgtttatttatcaatatttgcttaaaaactttaataaatacactaaatctactaaagaatggaaacttaaaaattccgattttttaaattatcgtcaataatataaatccttcatggtttttgtgataattaatggattttgaaccatggatatttcggaagagaacaaaatatgtctaaattagcagggtttttcgacactttctattctcttccattttaaatctatatctgttttgtgaagaaaaaattggggtcggaattccgatttctaaaacgttggaattccgagttccgaaatttttgaaaaaaatttttgtgaattttttagaaattacactgaaattttcaaaaattttccctgtggcgtttattggcactgtcccgactctaaaaacaaccttaattttttaaaaaacgatacaagagagagtgttatgagacttggatgaaaaacgaatttattaaaaataaaaaatactttttagttagtgttcaaaaaatttattttttgactctactcttaaaaaaaaagtaaactatcaaaatttattttaaattatcggaaaaacccccgagcggttggcgccgcgaagcggcgcctagcgctcgtactaatttggtctgtctgtctgtatgtcacattttgaatagattattttttgtaacgaaagctttaaattaaaaaaaatgaaataacagaaaataattggattgttgttttgttgcacaaataaaactaaatgcagacaataagattatgaaattgtttatgcttatagatttttttcttgacaatattttttttctttaattatacgttcgttattttttttaaatagttaacttttttttaccaaacaaagaccaaaatttaggttattattattattattaatgtatttttcgttaatataataataaatattgttttactatttttaaattatattaatgaaatgtattttcataacttcgttttttcaaatatttctttttaatgtattttttccttttttttctagatactttacttaataaataccaaatggtacgtactaagcaaactttcccttccgatacgccgtgttctacttcctctttccgagaaaatgacgggttgcaagctcccgataaaagcggtcaaacgggttgtacgctcctgataaaagctgttgaaccggttcaaagctccggggaaaaaagcggtgcaaaacaaaatattctaatgattgcgttgtaaaccttgatgaaattgaagatttcctgatattattaatgctcaatat

SEQ ID NO: 22623 - DNA, 1718 bp, Heterodera glycines
gttttatttatttttttatcttaagtttcacatggaatattaataaatatgtcgatacaatgtttcattaatcttttaataacagaatgtaaattttaaaaatttaacgctaagtaaacttttgtgaattgatttttcgtattttctcgacaatttttaagtgaattgcaatgaataaattttaattaattaatcgttgcattttggttaacaatttcaaggaattaatttaaaatatatataaattgtttattatccttttttttaattttaggctaatatatttaatttttatttaatttcacaattttttttatttttgtttttaattcaaaatacttttctttattgaacatccgtttctaccttttaagatatgtaataaagtgcttgctatttttaattattagtccaagctgaaatagaagattaagttacttattaatctgagtataatttttatttttatttctcgctaatttataataataataattgtcgttcccattaaatgtaatatttttttcacttttaacttttttcttattaattattaaatacattttttcttatcattgtttacatatttaataatctatcggcgcactattagttgtaaattgagaaagtttgcaaataagaaaactcgaaaccattcttgctttttagaaaatattccaattattttaaattgtaaatcctttatttttaaattttaaagtaattttattaaataacattttaataaaattaaatttgttgctaaaacaaagatgtcttttgctctttcgttcaaagaacggagtgtttctgcttttttctttgtaataaagctcatatttattttacaaaaatcctaaaatgttgaaaaaaccaacaaatttacaatttaaaaaattatttataaaattaaaaagtaggatccaatgtcgcatttttaccatcgaaaaactgattaattattgattcaaacaataatttttttatatttaactcttttattataaaatttattttaatttttcgtacattaagtaatgttttctattttctaatgtaactgatttatttatgtatattatttatttatttgcttcttattcttttaatttgatttttaaatttaataatttatggtgtcttttcaaaacatcggtcaacaatttttgtgttttatactaattaagccaaatatggggattatttaatgcattagcaaacaataatattatcataacaatattaaataataagagattaattgaattaatattaattattaatgattataaaattgcaaataggtagtattatcgttaatttaaattcatgatagcttataataatttgtacaatttgctcttcatataaaaattattgactattttagaatttttcatttttaatattattgcgtagtgacaattaaatttaaaaattaatttttatttacatatgtttaattttatttatttttcataggctgtatagaaatttaaattttctttttttttattcacaacaaaatttttgtaaaaatctttggcaataacatttttgaaacttgccgaaattttctgaaattttgtactgttagagcatacttagggctatcaaataatataaaaaaataaaaatttggttgcttttaagctaagttataaataatttttcatcaaatcataatgatggttttttaaataccgacctagcaccgt

SEQ ID NO: 22624 - DNA, 2302 bp, Heterodera glycines
aaaaatcgttttttcccaaaaactgaggcgtttgaatttttaaaccgaaagtttttccctttttccgattaactttgttttcaatgcgaaccgctttttactgattgcctttatccgatggcttttgtttcggcgaacggactgggaaattggtcgacgaatcgagcgaatgctcgacgaattgtacctcgtcgtttaccgatgtttcgaaattggtcggctatgttagggccgatttgatgatgccttaaaaaaaggctaccgtttctcaatcgggcgagagatgtggcccgattggccggagacggggagttgaaaaaagattaggttcttaaattctatgatatataatttattttccccgataggtctaattcgattttaaaatctaaattaatgtcgaatttattattattatgtatcaatttgtagtgatggcttttggcgctgggcattattctggagcggccgttgtttccattatttggcttggaattttgactgctctaatggtcgccggtgaagaaaagtttatatatttctttataatgaaggggtaaaatttttgaaatctaaaattatttttttcaagccctattgttaattttccttcaagtttttaattaaccgattattttgaaaattttctaaacaggaattaaattgtccattgggccaaaactgttttcaaagttgccataaagtttcagggaaaatttaggaagcgcagggccaaacattttcaaaatattcaaaaatatttctcttcctattactcaaaaagaatgaaaaaatagtgtattttatgctcaatacatgacaaaattgatgaaatagtgccgacaatcagttttgactattgttttttttgacccaaaagcttttttacagtttctgtttctatttgaaaatgtcagattggagtcctcattatttgaacctaaggataattaaatatttttaagcgttcataagaatgaagaaccatcgctaccgcgaggaccgtcgatcgaatcccaatgccgacgttttaattgatcgggaaatcaatggccaaatgcttttttgaaaattacaatttaaacgcataaaaacgaatattttcaaaaaatggtaatttaaaaaattaaaaaattcaatgaattaagcaccaaattttatttatccctaaacaaatatttgcgtattaattcgtatttcatatctattgataaaacgcaagcaaaattaaaaaataattgcattaaactaaaataatatcaccaattaaagaccatcacatttgtagtgcatcgctacattaaagtagctgcataatccgccgagattggcacgtagttgtgctcccaagctgcacttgtggatggcacgtttgggtcaggatcaggcgaagaccaaacattttcttgtggagccaagatcgctgaaaaataaatgattaaaatcaaaatttaaaaaaaaactaaatttaattgacctatagccgcggtgtattcctcaaccatttttgcccgctccgatctatactgcttccataatgctccaatctttagacgtaatgcttttttaaggaaagcactttgttttttgcgtttttgctcctattaattcaatgttaattatttatggaaaatggcaaaaaaaacctccaattttggcgcgaaaaaccctttttccattacggaagaattattttgtttggtaataaaatctgaaatactatttatttagaaggtttggaaatcgggaaggtaacctaaggggttaaagggtgcatcatcaaatatattaggatggggagttgaagcctttcgacgattcccgacgtttccgttaagggcatcataaagccgactgtaaagccgtgccgtttttacaggcaatacagctccaatccggtcaaaggatgaacaacgttgccgtaaaaacggcacacttttaaaagaaggagacaggcttttggccaaccgatgatatggaggcatttgttggttgcgctattggaataggcacgctttatataagcactcccccctacctctcccccttattccagtctttttttggcaccgacaacaattattcaggcccaaaattataataaagcaggttttttgcattttcagctgtttttgagggattagcaacctataagcaacttattatctattacctcggccacttttgttgcatttcagccgttttacggatgaataattttgcatttcacccatttttagggattaacaattttgttcactcattttttggatttaatatttttgcgttttcccccattttt

SEQ ID NO: 22625 - DNA, 2062 bp, Heterodera glycines
  unsure (1)..(2062): unsure at all n locations
ggcatcggcaagagcatttacgaagatgtaaacgttgaagttcttgttacgcctctgcacattcgtccgcgtcgtctctttgctccaccggggaagttgatgatggacgcgctcagcatcagtacggccgcgtgttctgcagtggcactcgtcgcagcgacggtcgtcctttccgcgcagatacgccgcgcacggcgccgcaagccgacgcgcctgtttggtgaacgcgagtgcgcacgtcgtcgcagcaatacatgcacagtgtcgccgttgagcgcgtccgaggggtgttgtggttggtattccgcaacggaacatgtacagcacgcgtcctccgcgttgttttcgtttcccccgctgtacgacgcgttgtccaagccgcctgtttttgccgctttcatcagaaagcggaagagcgacttgcggcgcggctgcgaatgtttgcctttgccggcaccaaccaccaaacattgctgaaacgacagtttggaaacgaacaaaacgccaacaaaaattagggccattttaatgtgaaaaagccaaaacgtcattttaaacagaatgccaataaaagtgaattaaaattttaaaaaaaacgaaaaaggtaattaattaatttaaaaataattacaaataaataggcacagagagaaacggcacaaaacaaaacgaaacaaaatcaaaacgaaatcacctgagaagtgctggcaccagaatctgaaagggaaaaagctttgaattttacatttattatcattttctctttttaattatttttcggattttatttcatttttcctattttaatttttctttttttcgttattttccttttttcaccgtgcgatttggcatctccgcccaattcctccgccaattgtcccccggcgcgcaaataacgcggccaacaatcgtatttgagcaagtggaaaatttggtactgaaccacgtcgtaaacgtcgctggtaaaccgattgtttttgtacgcctcgcgaatctgagaaaattaaaatgaaaagggaaaacgaacgaacgaatggtaattaattaattagttaattaactaattaattggtataattaaaagcattcattctcacttgattggatgttgagttgtcaatattcaccggttcaatacaattggccgcaaaatggcggtcataaatttgcctcccaaagtccgttcgtcggccaaattcattctcgggaatttttttgtactcctccaccgccaaataaaagttgatgttctctgcacaaaattgttgttggaggaattgcttaaaattcaaatattccgtttttccttttttggcattttgccctcctccccaatttactcacatggaacggcgctcgcgccgcttccgacttgagcacctgctccaagtccacgctgctgtccggctgctgctgcttcggcgagcccggcgcgggaggcattgacgcctccggcgactggcgctgcgcgtggccaatgggcagcgcctgcggcgatgcgtccgtctgtcgcttcggttgtttttgctgctgtccgtgcctaatttgacgaccgattcgccgcttcggactctctcgcgctgcttccgcctgcgtttgttcctttgttttttccgatataacggcgctgggcgacgggcggcggttttctttgttttcactgttccgagaaagggcaaacgaagcgacggaggacgccgccacggccggcactttgctacagtcgtcggggttgtgttgcgggtactgctcggagatgtgcttgtcgctcgccgccacttcttctgcctcctccgtcgtcgtcttcaaatgcgttggcaaataatgctgttgcgctcctgttaataattaatgttccgttttcaaatggccatcgaatcgcctcggggcccttttatgcgttcgcgcagcgatggacccacgccatccgggccaaaagcacaacaaacatacacaagacaacacattctaatccgacccggtgatggcatggccaacccaatgccgngggacggcacggcacttcaaagccatgccatcatccgntgctcatcgcatc

SEQ ID NO: 22626 - DNA, 1383 bp, Heterodera glycines
ttcatttcttaggggaatattttctgaaattttggtcctttttagggatatattttttaaagttttttggatcgattcttaggggtgtatttttcattgctttttgctatgaaatttatggaaaaagaccaaaacaggtgctaaaatttaaaactgccaaaatacgtgctaatctcccccccccccctcgttttagtttttaggtgctaatagtctctctaaatcaaaattgttcggagaaaattttccgggctctaatcattaagctgcgatatgaatgaataaagcaggaatagattttgtctaacgtattttttctcagatttgagtttgttaaatcggcacaaaaattgagcgcattcttggcttggttagcttatcttagcttttttatcttttgtatcataacgccaaaatgaggaaaatgcaccaaagtaagcttagtcgttcaacaaaatttatcaaattagcaacaacaaaaaagattaattagttgttattggtttaatcaattgctaattgattgtttattgtgccgtccaaaagattttattttttagaatattttaaaattattaatttgttttattcgtcatcatttgcttcattttcgtcgtcaacaatttcgtccacaacaatggtttcgcgttggcctatttcttcacctcgttggtgacgctcctgtgttacctttgtcacgtgcacatactgtaacagaaacgacaaattacagtatcagaaatggacgagagacgacagacaaattgaaaatattattaaaaattaattttaatattatagaaatatatgatttttggattagtgtcagaccctttttttaattgataaataattgaaaaattataaataaattccagcataactttttttaaaataattattacgatttaaattaatttctttttttggcgccgacctttcctggcgcagtgcctttcattcgtacaactaaatctgctgtgctgcgtgcctcgccagcactgttctccagaacacaagtgtattggcccccatttgacaatttgactgcatcgatgagcaaaatgtgggcgaaaaaatccttaaaattcagtttttaatctatctactctaatgatgttcgagagctgcttttctcgagtcgagtcgagtaggtatggccctcgacccagcccttggccacgaaaattaattctttctcgggatatttccggaccactatgtccacccgaccccgattttctcactcagaagagtcggagccctacacacgctcgagcatcattatccttattacatattggtcccgtttaatttgttaatgaatcaatgataactcgtaccgaaaatttgaaaaaattaaattaagcctaggcctagcca

SEQ ID NO: 22627 - DNA, 1225 bp, Heterodera glycines
cttttttggttatacgagtcgtcgtcgtgccattttttggttatacgagtcgtcgtcgtgacattttttggttatacgagtcgtcgtcgtgacattttttgttatacgagtcgtcgtcgtgacattttttggttatacgagccgtcgtcgtggcatagtgaagcgattttgtgtataaaatgtgaatttttttgaaaaaaggattttgactttttggttcgaatccgggttcggagttcgaattgggcgaaaatagatgccggaatcggtttctccgaccctgaaaacccttaaaacaagtttatttcaaaaaaaaaaattttttgaaaatctgcacatagataatacataagtacccaaattttgatgttttctaaaaatccaatttcttactaaaatcgcttttttatgacttggtagatgggttttcatgctttttcatcattactacgcaatatctaactgtttcacaacagaaattaatgaaatcgtttgtggcactaaaccaaactcttaccaattattttgatcgaaaacaactttaaaataattgaaatataagcaaaataagttttttgattaatttttacgtattttgctatctaaaaagtagagtccggtaaaaaaaatttccgggagcgggagcgggatcgggagttcaaaattttccgggacgggagtcccgaacgggattcccgtaaaaatcccgctcccgttaaaatcccgtccatttttaacgggagtcccgggcgggagcgggagtaattcgaaaatttaattaaaaactcaaaaatatttttaatgcacaaatttaaagggcaatcaatttattaaattaaaaatatatagaaaaatttataaaggagaaatttgaaataaaaaatcttatttttgagtcaaaaatcagaaatttttttcaaattgcttaaattattttttataattaattcgaacaaaacatttattaactttatatttttgactccctttattaattttacaaaattttttgccgtgtatttcttgaaaaaactttttggtgaccaaggaggaggagggaggccggaggtgccgtaggcgccgccgggaaatttttttgaacttttggctatatatttaacagattttcaatgaaaaatcattattttttgccaaaaaaaaattcttaccagtacatttttactccccgttttgggtaaaaatttccgggagcgggatcgggagt

SEQ ID NO: 22628 - DNA, 1162 bp, Heterodera glycines
gacgggtgcgcatgattccactgttccaagcaccccaccaaaagcaaaacgatataaccaaaatataaggaaaaatttttaaaaaattttttctccattttcctttttgatactaaagcatcagagtgctaaaattaacctgtaaataaaatttggtgcgctttagagcactttctgaaaaaatatttatgaaattaaaaaatcgatttattcaagtgtccgtttggggtactcaaacaattatggggagcaaaaatccaacgcagaattaaaatacaggctatagggaagctattcccgaaggatttggtctccccataaatctgggcgcatcggttcggggggactgccccgaaaacaaaaaaatcgattttttcaagtgtccgtttggggtactcaaacaattatggggagcaaaaatccaaggtaaaaataaagtagtggtatatcgaagctattcccgaaggattcggactccctatatatctgggcgcatcggttaagggtactgccccgaaaacccaaaaaaaaaatttttttggataaaaattatttaaatgaactgactagataatatttaaaataggttatttctcttcctttcagtatacctgcaaagtttgctgcgcttctgatcagtttctgaaaaaaagttaagcctaacatcggttcagggagactgccccgaaaacccaaaaaaaaattattttgaaaaaaaattattaaaaggaaatgactagttactatttgaaataggttatttctcgtcctttcagtgtccctgcaaagtttggtgcgcttctgatcagtttctgaaaaaaaagttaagcctaaaccttttggcctgtttaaaaaggaattaaaaatttttaaaaattttattcatctccctttttgatagaaaaagcatcagagtgcctaaactaacatgtaaataaaattttgtgcgtttcagagcagatcgtccataaataatttgtaattgatcaggggctcaccaaattttgcagagatacgtatcggaacactacaaaaattttgctaaaaaaataaaatagtgaagctttaaaaattaataaaaaattttaaatcagaattactggagttagcatcatagcagtgcttttccttttctttttgatgctctcgcaaaattctggtt

SEQ ID NO: 22629 - DNA, 3029 bp, Heterodera glycines
tccaaccaagcacagcgaatggacgcccagaaaagcggtgaacagaagcgcaaaagactttgaaacgcgccaaaaaacggaggggtaagcggtggagaaggccacctgtagggaaaaattgagaaatttttggcaatactaatgaattcattagcactaattaatagagaccgggattttgaatggccgagaccgggacatgggaaataggtcgagagaggatttcggaaccgtgatgtggaaaattgagcgggatagggtcccggaaccgggacttccgtttttcgtgttggtcgaaaaaaaccgggatcgagatcggtattcgcggcaaaatcccggcggagcaccggacccgtccgatctctactaattactatgtcttttttacgagaattattggtgccgaaattttgtaaaaaaaaatgccaaaattaaaattgtctttgtgtctctttggcctattacaactttcttttgtttccaaattaaccatgtaaaatttggtattttctgatcatttttaatagattttttaaaaatggaaaaattaattaaaaaatggaatttaaaaaatttttctcaacgtcaaaatcatcgaaaattatggaagagttagtccttttctcgaaataaaatttttatttggaaatacataccaaagcgatcagaaaattgacaaattccaacggaatgccgaacaaccgagtgtgcattaaaactgaaattttatttcaaaaattatttaaatttacatttaaattatattaattttgccatattctcgcgctgacttggcaaaatgtttggcgcaacgggcgaggcggaaagctcctcggtactgatccggaaggactgaagccgcgtttcgcccatgggcaaattggtggccaactgacgagcacgctgaagcagccagtcgagctccgtgttcaagaaatcgccttaaaattgaaatcataaataattaaattcaaatttttaaaataaataaataaaatttagactcaaaaaaaaagtaatttttttacatttatataactcaaaaataaatttaatttaatttgataaataaagtaatatttaaaaaataaagcattaacttaaatttaataattgttgaaatttttaaaaaatttaaatcactaattaaaaaaataatttgttatttctgtaatttcaattaaaaaatccataaagattaaaaattaaccctaaatcaattaaaagattaaaaattaattaattttaattttaaacatataaaatttaatgatatataataaagttattttaccttaaattagtcattagatatgataaaatttaataattacataataaaattattttaccttaaattaatcattagataaataaatttatttatttaattataaatctattttaaatccataaaaatttagaaataattaaatttattttttaaaaaagatattaaacattcaatcacccgagttgatgaagccccatcggtagagttgcgcaagcattgtttgctggacgaacagttggagcagtgcaagcagcacatgcaaacactggggtgccggcggcgcatgaagccatgccgaacgcaaacaatggcacaggcgatatgcttaaacaaaattattcaaactttggcatttcaaagaaaatcaaatttggcattttgggaaaaaagaatggctgaaatattccgtaatttcgcatttttataacggacatagcgaacttaaaatcctcaattacaattcgatttctctgtcttagttttcgagtcggctttttctcggctctcgagtgtctctgtattaaactcatttccttggcattggcatttttgctttaccattcgaattccggtgccgtacagcggtgttgcccatgccgcctttgatcagctcaatggtccgttttggacgtgcacccaaccgatcattgtcaccggccaaattgccctgtgtggtgatttttcaaattaaataaagtttttgaaaaattcaaaacaccgttttcataaggccaaacaccaaaaatagtgccaaaattggaatgcaagtgccgagcaatgatatgtaagcggtgagccaaacgcgaggaaatgcgccggcaggcctcaaatgtgcaagaaatatattttaatccacaaatttgtgggttctaagctaataatttttgaagtaagcaataaattaatggcattttcatcttttagaaaattaaattaaatttattattttttttatttccatttaaattccttagatatattatttatatatttgtcttaatatttctttattttaggtaaagtttgatttaaatttaaaattaacccagtccaaaaataatttctctgatcactactcactgctcaccattgcatgtcggtgtacagtcgataccgtacaaaggccaggtacagtaaccaggagttgagcaaagtgcaaccgatggtgtaccacagcttaataaatcaatttttaaatgaaaaaattaaatattattaaacacaatatgtgtccaattaccgaaagtaatgtgtttggttgaacacggaatacgcaggttggcattctcgaaaattggcacttacagaagcaaacaatcaaaatttattaatattagtgtaaaaacaaaatcatcactttaatttaaatctgaaacaaatatggcacatttaattgtaaattttaggaattttgatttatatttttttttgttggcatttaatgagaaatttttttggggggaggtctttttaattagatagtgaatcttggcatttgcacaattagaaagaaaaaaaacattttgatcaacccaaacaaacacagtaaaagtgatcaaagacaattcccagtcgcctagacttaggcacattctgtcgttggccttgaaaaccctaagaaaattcgcagggatcagcccctggctgagtcagtcccaatggtttcgctgatcacagatacacaattaaaaaaattaaggatttctatttttagtgccggaaaaaatggcaatat

SEQ ID NO: 22630 - DNA, 1532 bp, Heterodera glycines
aaaaagggaaagaaaagagagagaaaaggaaagggaaagggaaaaaacgaggaaagtgagcggcaagtttaaggaagggtcgcgcattcgcgttcgattcgactaaccctgagggcgatttgtcgaacgcaaaagtggggacttgaaaattgactatttccctaagaaatttcgccaaaattttccaatttttctgcgttcgacatcccttcctcgtgcgttcgaacgcaagaggggctgaataattcctaaaatcttgcctatattttttaatttcattaaaaattcctaaattctcttaaaagttgacccaaaatcgcaaaaatgttgtcattttttggtgaaaatctgttaacaaatcacatcaaaatttcaaaaattttccccggcggcgcctatcggcaccgcctgacccagccccccgttccccaaagttttttgaaaaaagtgcaacgcaaaaaactggcatgaaaaatgcaatagatggtcgcgcaaaaaattggccggccgttgacaaaagggctccgcaaaaaaaggtgatgaaaagcaaaaaaataaaaagtaaagccttcaacggggcaaaaatggccgaccgcaaaaaaatttgacgctgacccccccccccccccccctagggggggtcatcgccgaacgcacgacccttttcctgaccccccccttgcacacgtatgtacgaatttgaataggggttcaaaaagaaaaagattgttttgacggacccgctcactgacaatggccgaaatgtttgtcgctttttcctgcagttttgacgacgcctttttggctataccaaaaactcggtctgaaaaaaaagaaagaaaaaatttaaaacaaatttcaaggacttccaaattgtgtgtacttgcaatttgcgatggtcgcattgtgtcgtcgcccgtgtcgtggtcacttttttcgccatttcggtcagcatcggtcgatgcagaaggcatttcttcgttgtcaacgcctaattttgtttgaattgtggaccactgagacttgaaactgctcagaaaattattcatttgagctaaagaaaataggccatttattaattttgtttcgtaagtaaatttgtaagtaaataaacaagaaaccaacaaactctgccaactcataaattataaatggataaacaaaatgctttttgtttttcgtggattggatgaaaaagcaggaaaggagaaacaaaatgatgaaggaatgaggataggatcatcatctatttatgttagttaccgtattttctctttttatcgccccgggggattatttttcaaactcctcagaaagggggggggataattggagacggcgggattaatggagacggcgggattaatggagacggggtgataaaaagagaaaatacggtacctacatatgttacatactactatgcaatgcattgtgactgagtttgcatacaaatatttcggtacttatatggttcgtacgccacaaatttaaaatttttttttaaccatcacagattccttagaaagtca

SEQ ID NO: 22631 - DNA, 914 bp, Heterodera glycines
  unsure (1)..(914): unsure at all n locations
gacgcgatgaaatcagtgcnntaatggaccaagtcaattgnataatcaataaaaataaataaattaatcattcaaattattcttttactcacattntaccgaaatttttgtcaatttaattgaaattattttctgcgacaaaatccgggcacatagcatcatttgataaaaataaatcacatggataaaattttacaaaatttgaattttttaacatgtataaaattgaattgtgctttttcggagtttttttagcaatatttataggattaaaccaatatttttttgttttacagaattaaattttttaaatatatttaaaagttgaataattggattattaatattaagtgttgctatcaatattctgttaaatagaagtatttatgcttatgcaaactgagataaactctgtcaaaaaatatgaaatacagtgagaccgattgagcaattttcttcccgtttcaccaaaacagcccctgttttggttttggtttgatgtcttcgcgaatagaagtgacttcatgtttgatggactccacattcctgttcatctccgtcattttctcgttgagctccgttttgatggacttaactttctccgtcattttctcgttgagctccgccttcagaagatcaattctcaaacccatctctgtcttcatgccgtctatttttaccaacacaacatcaatttttgaggtcactaacagatgaaccatcgcccaaatataagcagcaatagacaacaacgccccaatagatgcgagaattttccaataccaatctgacgacgcgctggtaacttcgccggcgcaaacagtacagacaacgagttgcaaaacgatcagcaaaatctaaaacaattaagtgcttatttacagagcaggtcgtttcccgcgctttgtcccccc

SEQ ID NO: 22632 - DNA, 963 bp, Heterodera glycines
  unsure (1)..(963): unsure at all n locations
actcatatttgccagtcttttgattctgtaaaaattttaaaatcaaaaattcggagcgaaatttcttttctctcccacccctttctaaatggcttaagccaacaaattacncaattcatcgcgtcatacaacgcctgtttgtccgtctcacaatcagtggcaaattcaaaatagccaaaaaccgtgcgattttcgtcaagaaatgaattggggtcggtgaaaacacgctgaactccactggtaatggcttaaggtcgaaacaaaaattgcatcttcagttgattttaaacaataattactattaatttgctcaaataattcccctcggcctttctcaagccaatcttcgtatttttccgatttagtggtaaagttgaagtaaatgcgattggcagaaagacactgacaattcaaaaacaaaaacggccgctgttcggcacctaaaattggaatgaaatgagttcaaattatttaattacaacaattagtgatgtcacttttttggtttttgtctttacgtcattgttttgccacttcgtggcatctagaacaaatgaaatacgccgttcgaattgattgcattaaagacaattatgtttccgatggattttcaaatttcggtggagtttttcattggcttagtcataatttaattgagaaaataaaacaaatccacttcaattatgaggtattgacaactttttgtgtttagaagccatttacagcaaataggtggcgattattcaaatcacaaaacgtattaaaatgatttaccttcctcgtgttccttcttgcaaatttcgtggttctcaatttgtgggccgccgttctctttgcgaatgattggcccattttttccgtcattttccggccccattccattttctacattggaatcgacaacggcagaatgtttttgatccaagaatttcacgattggtacaaggactctgagaattcagt

SEQ ID NO: 22633 - DNA, 2449 bp, Heterodera glycines
  unsure (1)..(2449): unsure at all n locations
ttttttcttaattttaatttaagatttgggttattagaatttaaaaaagtctttagaattcattatcctaaggtaaaaaaatatcttttttaaataaaaagtctgaatatttttaaggaaaggacggttaatttataaggtccgctgattttaaaggttaacatcatctattcttttaagccattgacgaagcttacaacggtacatagactgataaggaaatttaaaaatttagtcagttgaacggttaaatttcatggggccataaaaataatattttttaatgacagttaaattagaaattaattattaaataaatttaaatggagccttaaaatagtatttcttaatgacgcgttcattaatataaattaattttattaaatttttatgacatggcatataatttcatgaaacgaaattcggacgacagtgacaatttgggattgacatatgtatggaaaagtgcaaaaattattttaaaaatgaaatttttaattaggatattggctcgacaatgcattaccctagcaaaggctttagcaaagatcgtaaaaggtttttataataaaaaaataaataaaaattttgggaaaaataattttccaatatttagttatacaatcctaacaaaagacccaaactttcaacaaacaatgggcaaccgtgctggactttcattcaaagatgctcgaataataaataaacgttattgtaaaagtaggaaaattttgataaatttaaatttaaaataattaaaacgattccaaaaattttaaatttttttaaaatataattacaaaaaataattaatattttttacaaaaaagattcatgcagtgaaaaattggaatgctcaaatgacggttacacagatccaaacaattgcaacaaatgtcggtgtccagatgtaattcaaattttattaatttgaaaagaatgtttatcgaacaaatttagggatattcgggcgccttctgtcaagaaacaccgttaagcggtaataattagttataatgatgaattanaattaatgcagtaataattaattataaagattattaaagttaattaatttaattaatcagacagtccattttgtgtcattaaaataaattaatntaatntaattagacaattcgttttgtgtcattaaaataaattaatttaatttaattagacaattcgttttgtgtcattaaaataaattaatttaatttaatcagacagtctgttttgtgttattaaaataaattaatttaatttaattagacagttagttttgtgttattaaaataaattaatttaatttaattagacagtttgttttgtgttattaaaataaattaatttaatttaattagacagtccattttttaatttaattagacagtccgttttgttcaaatgtcggatttttgatggctgggaaatgggccggaacaatcacaactggtcaacttcaaccgaacactgaatgctattggagaattattgtaaaaaattattattttttttataaaattaattaaatttttaattaatttgcatttatttagccacataaacacgagcaacgaatcaaaattacaatcacaaaattggagttcccgtgctccgatgcttgttcaagttatttggaagtgaaagcaaaaaagaaaaaaatttcgacaggttagagaatgaaattacaaacgaaaaatttagaccattattttctgagagatttttctttatgttgggttagctaaaaataatgttataaaaataataatgaaatttctgttatttttgtcatgaaattactccccaataattaaaaataataattgtaaactgttattacaaagtaataattgaaaaaatctatttcattttatttttctaattttatatgtatttatttttaaaaaatgttccaaatttttataattaaattaaaatcaaattttaacaaaagcaattaattaaataattttttatgcgcttttgatctatttaaatttttaggggctcgactttgctgcggcacaccaacaacaatatttagtgatgttgacacagacgttattttgatattgaaagtttcaaataacttaaatggcacttttcatggcgctaattttgaatataaaagcggtaatttttattataagaaagaaaatactgtaaaatataatacaaatttacagtaaaagcatcgattacggtaccacaaacaattcaggtaatgtacaagtttaattttgaaaatttattatttttttgaagccaatccgattattctttacttttttaaagaatacaaataaattcctcgacaaatttttaaaaatttcaagaattaataccctcgtcaaaaagtatcatagaaagtcaaaaatttaaatataattaaaatttattaaaataaattaatttttgaagactcttccgccccagaatggtt

SEQ ID NO: 22634 - DNA, 1552 bp, Heterodera glycines
  unsure (1)..(1552): unsure at all n locations
attaaactgccaatttataagtttagcaaaataataatacatttaagaagaaaatggaattaacacgtatattattctgttcaattttatttttgatcatcctaactgatcagatcggatcagaaaagaaaaaaatggaacaaaaaacatttgatgaaatattntggagaaaaatgggaagaaaaaagaaacgaagaacagaaaaaaagagaaataattggaaaatattataaaataaaagagaaaattaagcaaaaaggaagaaaatacccaagaaaagaatggaataaaattgaaggaaaaattgcaaaaaaattgggcacaaatcgccaatatatttatgaatggatcaaagaattgggattaaatcaaaaaacaaacaaatgctacaaatcaaaaactgatgaagaaaaacttgacactgtacagaaattcattgaaatgtcaaatgaatttaagcaaaaaagaaaatattcaagcaaagaatgggacaaaaattatgaagaaatttgtaagaaaattggagttagccttaaaacaattacaaaatggaagaatcaatttggcattagccgaaaatttataacggaaaaagaaaaaacggagaaaatgaaaatttattggcaaataaaaagagaaatgccgaaaatgagtgacaaggaaattggaaaaacattgaaaattaatagaaggaccataagcaattggaagaaacaatttggagaagaaataatggaagattgaaaacggatgaatgattctaagaatgttagtgatatgattttaagagtggctataagcggagatcaaaaattgaaattaggtaattagcatttgaaatttttcaaaaaagagaaaaaaattcaatgaatttttattctaaaaaattatttataaaaaatttggcaataaaattcatttattttcaataaattgttttcttttgcagaaacatttaatcgctaagaattaaaaaaataattctcttgacacttttcccgcacaattaagccctccccctccctttgatgtccccgcccaggggaaaaagcttctttttttggtatgtttttgttggtgaattattttgtcatgggtgtgcaaatgaattggtggcgatgggttagcgtttcgtgaatctagcaattagcactaattgtgcgtgccgtccttttgtcggcgatttacggggtgacaaaatgtgccgccatcaaatcattgattgctttttattccgatcaattgagcatttaacaaaggacgattatcacattaatgaggtttaatttgacgggtttatcttttaaaaaatggtaatcaaagttattttgtgattgggtatgacattttgaactgactggatgctttgctatcaacaaatatgtgcttttatgattgtgatcaacaatattgatcagttggactgattaataaaatgataaatgcattttgattttanattattttgtaaactcatttttgaaatatttgtgaacttacaaaaaagattggagtgatatggcatcggaatctcactaatttattgcgcgat

SEQ ID NO: 22635 - DNA, 1057 bp, Heterodera glycines
cagccggtaagtaaaaggagaaacttgtccaaacgatgtccgctcagcagcagagaaaaacccacacatcaccttcccaaaaatgaaagagcattagtagctaaacagcggcgttaatcagtgagtcccgcaaaggcaaaaaaaccgctcggctcgtccaattaatcaaatccaatcacacacacaaattaattgctgattgctaatcgggcggctaatggatgcgccaaagaacaaaacaaacggcgcttttgcccacccgccgagcagaagcaaaagccaacccaatccatcaaaatcagccggaaaaacccgtttttttagagatggaaaattcttttttcggtgggttcccccaattgccaaattgggcaaatgtcacattctctgcactatggaagaaaaaaaaaatgcaaaatgaatgtcccaaaaattgttttggcgaactgtttttatgtgcgcctttggcgttctgctcagtgtgaaaacggaaaaccggactcataaagcggtgaaagtgttgttgtgaagggggaaaaaacggaggatggaactaataatggtggcaccacggaattagttagcaaatttaagaaaatgaaataaaaataattaatttttattgaaatttatttatttatttatttatttacattaaaggttttttaatttaaaatggaaaataaggataatattgaatattttatgtatgggtggaaaatgcgcatttatagaaaaaatgaatgttttgttagatttgcataataattaggcgaaacaaactgaaaaggataaaaatttggttgtgaatttttatgggccggaaaatatacaaaattattaattttaaatgaatttaaattgttttcggtttttaatttttattatttcgacaataagtataatttcaaaaaacttgccgatttttcctgaaaaaaatataattcgagaaggtgtgggggaattccatataaatcaaaataaggggtcagaaatccatacacaatcacttcaggccctagggaagccggtatcctaaaattttataaatctaaat

SEQ ID NO: 22636 - DNA, 1226 bp, Heterodera glycines
tttgaaaaaaggtttaatttaatgttaatttacatttttataatgggttaaaattgtgcagaaaatgacaaagaattatgctattcatctgagaaaattagtcatttttctgattattttaaattatattgtgctttggttttttccgaaatttggaccgaagtaggggtaaatatcttatgctagtagcaattttcttaaaattttttgtaaaatttcaactattatgataaggttttacaaaaagcggttaaaacatttggaaacttcgagtaaatataatctctctcccatagtaataacaattaataataataaaaaattattcgttttttctgaccaatttaaaattatattgtgctttattttattcaaatttgatgatcggtgcaggggaaatatctcaagctaatcttaatatttttttaaaaatttaaaatgtttttttgaatccataaatttttttaaagagctaatctgatcaattccctcttgtgtgcttggattacgtgtgtttgttgagagtcttcgtctcagttgcggcgccgaacgaccgttcatcggactgctgacatgggttggtgctggtgttgtcatcatttgtggggcactgcttcgactccttgagaaagtgcagccatttagagcaaccattttttgaatgattccaattaattaattgtctgaattttataaattagatttttttctttataaaaacttttattaaattttcatttattctaaaaatttaaggtttcggaaatttgtttaaactaactatctaatgaatttattgctttttttaattctgattaatcattaatcgggcaaatttttggtggaataaaaatgaaaattaaaattaaattatctgttacattacatcaacttttttatacggtaaattttttcgttttttttttctcgagaaagtgaatttgatttatatattttggttaaaggagtgaggaaaattcagtttttgatgacagagcacattaattaaagcaataaaaaaaatttcatgacggaccaaaagggcacgcgtgacccattgttttagttagataaataaatttgtaaaaatatttattcatttttgaaataaactgttataaatatttatttaaaaattaattttatttatttattttaaacttttggtattaaataataaaaaatgataattttgttggcattttggcgtaaatcagttaatcttt

SEQ ID NO: 22637 - DNA, 1524 bp, Heterodera glycines
attaattttttgccgcataaacaaatctgcgggagttgtgtttaattttcggattaaattgagtagggaagtgatgctaatttgtaagatgaagggaacgacgaaatttgtcatcagaatgacatatggtccgttagcgcgcgaccgcttaacgcgacgaatttcttcttttttttttggcgtgtttcgcgtaatttttaaatcacattttgatttctaacaaattatctttttcacccatttcgcatcatctgttcgttccaaattgttaaaattaggaaaaagctgaaaaatgaatatttttgggttaaattttaaaaatttctgtagaaaatttcaatttttttatcttaattaaataaaaaatattatttcattcaaataaattgatttcgaattttttaattgatcaaattttgagaatgattcaaaaaaattttcaatttttcagtaaaaatctcatgtttcgcatttcgtatttattttagtttcgttttttcgtatttcgcttttttcgaatcgcaacaacggatggtagtaaaatttatatataaaccttaaaaatagccttagtaattatgatgaagattagatgcttaatgattaatgaatatttttaaactaaatcaaccaattgcactttaagaaaaccaaaatatttgggtcgaattcaaattaacattgcgccaaacaaatacaaacaatcaaataaggggccaaaaagtcactaataccacagcttaatgattaatgaatattttattaaaattaaatgaaattcattatttttattatttggagggggcgaaatttgaatttaaaaattaaataaacttttttgcccaaacaatttgaattctacatgatatgaattaattagttcataaatgcaataaaataattgcacataatctcgcaaaaattccttctttctgtcattcggtgcaatttccaacaaaaaaatttttcattgaaataagtgaattgagcacattttcggtcccttcaccgtcagccaaaaatgtaaggggaaattccttttgtcccccgaggggtttccccggccactaataaataataatttagcaaaaaaaggcaattaagaaaataaattcaaaacaatttaatgataatttttttatcacttgggctgaaccaacccgtgattttgtgaaagaagaagttttgagcatttaatttaattcttgaaaagaaaaatttaatgaattcatcaatttattaatgggattaattttataatttttgtctgatcgttattctgcatttttgatcatcttttctatattaaaagaatttcatagcaaaaatgtaaataaaacattaaatcctacccaaattttataaaatgccaaaaaaaaatgtgaaaattcgtttcctgaaattaataaatcttaaattttaactgtaatacatgggcatatatatatatgtttacgcgatatttttatttaatattatttaattgagtgtatttttgcattttagaaatttggtgtttttgta

SEQ ID NO: 22638 - DNA, 1404 bp, Heterodera glycines
atgtgcgatgacgaattaggaaataaaggttactaatatttaatgggctgatggatggcatcagtgccaaaaaaggggcataaacattggggaaaggtcgagcggaagaagaggaggcattcgtagcctttgcccgatgaccctcaaaggcttatcaaaaatgccaaagttgacgagaatgaggaagaactttaccaaatatatgaattggcactaattaatcgccgaatgaaaagtgttgccaaatcggactcactttctttcgctctctttctctttgttttgtgtggccatgcgcccgtagtcgtcacaccacagaagcagctcagactcttgttttgttttgtgtgcctttcttgtgccattcatagtgataagcgcactaatagacattacaccatttgagagttattgtccggcacaataacaacccaattaatgcccataaatgacattggcactttttttgttgttgaactttgccgggttcacccagggggcggcgggaggcttttgatgaaaaagttcattttttaattgtactaacaaaggcactttgtcacgccaaccgaaaatggttctgtcatttagcattaccggtcgaaattaataagttttaattagtacaaattagtggtaaaataatgacagaattgtgtaaaaagaaaaaaacgaagcggaaagttcaaaccgttaataatgagtacaacaaatacaaaatgaatgctctctttccatgaattattaggactacaaaattttaaaatgtggcaaaatacatttgaaaaaaattcatgcgaaacggaaaaattattcacatgaatagagaataagctgatcaaaataaagcgggcaaactggggcaaatggcaattccttaaaaatgccacggcatttgacacaaaaataatatttttgtgccaccgccacagtgaaaaaaggaattgcgaccggccaattagataaattgccagagaattacttatacaaattattgtttgttattgtttttgcttttttgttttaattgcataaaatgatgaggaaataaaagataagtttttgcaattacataaattaaacagagcattagtgaatgaattaatgagtttcaatttcaatgaatgaattaatgtgagaatgaaatgaagcgaatgattggcaccgacccaagcgaaaagtgagggcggagatttgtgaattatttaagtcggcccgaaagagtgggcggatgacagattgaaaaggaagaggaatgaaatgagggagaggggacgaacggacgcaatttaatatggacaataacagaagtggttgccgcatagagcgcaaaacagttgggtggggaatgccgggaaaagcttaaaaatgatcagtaaaacatgatcagagggggaaaagcgg

SEQ ID NO: 22639 - DNA, 1524 bp, Heterodera glycines
cattcgaatgataccaagttttaagaaattggccgactaaaaaaaagttatggccacatcaatttaaaattgtacgagttgccatgacacccaatttttaactcaccaatgctcgcaacacccgccagtaaagcacctataagatcacggttcttttcggttttgtgaccccccctgaaattttcaaataaaaagtcatttctagggtaatttggggcgctgatcacgaatatgacatttatttttcaaaattccgaatcccgaacccgaattcgaacaaaaattctaaattcataaattacaaggaaaacatatttctaggggttttagaggtcgctgaaaacgattatgacatgcattttggccaaattcgaaactcgaaccctgacttgaacaaaaaaccgaatttaaatggtaaaatatcacaaatttggtatcattcgaaagctcttgatgagctaagttaaaaaaaggatccacgcgtttcggcgctcccgtttcggcgctcccgtttcggcgctcgtgtttcggcgctcacgtttcggcgctcccgtttcggcgccagctcgtttttccacttaagcttttttctttgttatccaaatccaacaatcttggtatcattcgaatgctcttaacatgctctattagccgtatcaaaaacgaaaagtttttcaagcctgtaaaaattttattaagaaaaaacttcaaaaatttcgacttttcgcaattttcatgcataactgttttgataattgtctaatcgcaaagcaatagcttaaaaaaagcttctaaatagattaagctttcgaacgacaccaacaatgttggatttggtttacaaagaaaaaagttatagccaaaaacatgctggcgccgaaacgggagcgccgaaacgcgagcgccgaaacgcagtggacccctatgggtcaactccactgtgcagagaaaagccttgtactatctcgtcgtttctctttttctttgtaatttctctctctttggcgtactatctcttcattttaattatgtaaaaaacaacatttacttcatcctgtttaactttttttctgtttgttaaatccacatcaaattttgcatagcgatagagaaaaaaattaggaacaaaatgtaagggtttttaagagcaaaaaaagggttaactaaaaagtatggagtgattaaaatttttgcatttctttttctctccttttggagtactattttcatgtctctaacacatgaaaaaacatcaaattcgtaaatgctaacaattttggttataaggatacaaaatcactttgtacatttagaatcaatagagaaattaatagttttagcatttttggtgaaaacagcagtttaggacttgagttataacgtgataagaatttgaaagtatcacaacttttttctgagatgtcaaattgcttagcattcgtttagaaaaagattcgccttttcaaaatccttttttagataccaaatttgttcagtttagttgggaatgaagtgagtttatga

SEQ ID NO: 22640 - DNA, 1602 bp, Heterodera glycines
  unsure (1)..(1602): unsure at all n locations
aaaaaacaaagttatttttacaattttgaaatttaaatatgcaattgtttaattattaaatgaattttttacaaatgtcgctggcccaattaacattttcgtttatttttttattaaaattaaattcattcaaaaatttaatttaattattttcttaaatttttaaacaatttacagctcgacgagtcatcgggcccggacgatgtgtttgctgaagctcatccgatgcaaccggtcgctgctgacggtaagagcaaaagctcaatgcgaaaaaaaaacaatcgatcactggccaatcgatcagtggaaagtccattggcaaaaattaaaatttttaaaaaacaacaaggattttccaattttacatattgaatttaaaaaggttttataatttttaaaaataattaatttatcattatacaaaatatattattttaagtttttttatcaaattagataattataattttttcatataatttaaataaaatttgttttcaaaatgaatttttattgacggattgtccactgatcaattgatcagtgacggattgccactgataattttgatatttttgggtttttattgaatataaagaaatttttgggcagcgctgggcacatcgggagggaaattttgataaaataaaacgaaatttgttaaaaattttattgttatttctctaatctttcattcttttaaggtaccccaacattacccggaggcattccccgcaattcccaagcccaaattgacgttgtccggaaatcgacgtcggcacgtggcaaaaaaaattcggtgagtaaatcagggttttaaacaggggtctcaactgaaaattttcaagatcagcattttgattttggcttaaaaatcagcatttcaaaattttattacaaatggttaaaaatcaacaaaaatgtttttttgcggcgcgcttctaaaaaaaatatttttttttgtggaatttggagggggaggtgccgatagagactatacatatatggcaatttttgaggattttcaaaaaatcagcgaattttgaaaaatttttgcttggattttggtagaaattttacataaaaatgaccatttttgaggttttttaaaatctttacaggtgaacgcggagggcgaggcggacaaagcgattgtggccaaaaacaaggccggtcctggacagccaagtgacccgtcagacatgatcatgctgccttcaacatcggatgcaccaaggaggtctcgtcggatcgtggccaatgtaagttttgggtgggaaaaaaatgaaatttgattttcaaaaatggtttattttttaattaatttttatattttttaatttaccgattgctttttgattagttttttttaattaaaaaaattaaaaaacgcccattaaaaattttcaatttattaattaattgcatccaaaggcatttttttttatttcaaaatttattaaataacatttaattcatacataaaaaaggtgtggggggtgccaaaattttttggaaagggaggtcggncgtcgacgatcttttttttgctttcaaaaacagttttttccgggcggtttttcctaaaaattttctttttta

SEQ ID NO: 22641 - DNA, 1680 bp, Heterodera glycines
cgactaagaattttaaataaaaattcaagttgatttttttccattttcattatttttgctttgcgctgacaaaattttataggcgctcaaaagtgtgttcaattgccattgtccaatgccgtggatgaaataattggcataactgaaaaatgtctattctcatcaatgaaatattttcggtggtaaatttttaaaatatttttcaaaacgccttttccattgttaagaattctttcgggataaaagtacttaaaaccaaataccaaaatcacagattatttgctaacaaataagcctaatttgaaattttaaaataaaatgaatgatatgagctttggttaaaaaattttaaaaccttaatggaatggcaataaggtaagccaagattgttttctttaaattttaaaataatatctccaactttaattaattcttaaaatcataatccttgggtcattgggtaagcgaatatttatatgcagcccaacaatttggtaaataatatttggggacccgacttttaagacaaaacgacatttggcgactgaatttgggggggttcttatttttctgaaatttggccacgaatttaggatttttcacctcataaatttttatagtttttttttctcattttaaaagtgctattcgtttttcgaatgaaatttattttacttttctaaaacgttttttaatagaatcttattatttaaaatatgaactcctagtaaaacattttagtatacttgtgatgatcataaatacttgatgcatttggctcttggtgaaggttttttaacagtttttggtaaagattatcggttttttgaaatgaaaaatccccaaaatttcgctccacaatttaaattttatcactgacaccacactgagaagaatccgcagggcaaatgagaaaaacagctgcataaattgcttcatcaaaataccattttctttgttttgtgcacaaaattcctcgacttttttcgcaattcgatggccaagcgattggtcataaaaaagaaaacccacaaaattcgcattgattccaccgcgaaacacatttaaattgtggtaagtttcgtcggccgtgcttttgttattcactcggaaatgggcaaattcagcggcgcatttgacaaaagtgaaaataaacacggcccttttttgctgatcagagagacgggcggacggcagaacatttgggaagatggtgtctaaatttagggccgagttcgaattaggaagcctgaaaatgggtatgaacatttaataaaattgttatgaactgaaaaaagaaaatagggaaacggaaacccgaaaaatagggcacattaaaacaaaacaaaaggaaggtgaaagaaagtacaatagtgtatcttggaaagaaaacacttgtttttggcactgaatataactgccagagatgttacggaattccgactttaattagcctttatccggacttacccattttgttattcattgtgtaagtcatgaaaaggttgtcaatgaatttggcaaatgtgtgaacattggtgaccgaatttgttgggtcccattgatacggcgaaaacgaaacgaaaatttgaacaaaatttagaaaaaataaaattagcaaattgattttcattgccatatcgcgaaaaaaaattaagaaggttatattattataatatt

SEQ ID NO: 22642 - DNA, 1640 bp, Heterodera glycines
gtgatggacaaaaatttcccaaaaaatgtctcttgacattttctttttgattggttgactcattcctacaatttgtttaattgaaaaacaatttggcgaacttatcaattaactagcatatgtatatgtttttatttacctgctcctgatggattgatttccttcccccaattaaacgttaattaccgctcgacaaattagccaaaaatgctcccccccccctccggcgacgcccccgccgttcgcgtgcccctcccaattttttgagcacatggcctctaaaaatgggctcattatgaaacatttaaagattctgttccctcatatcatatccaattcccgcctcccaaaacccgccaaaattgcttccccaactcagtccgagtccgtgttcttctaccggtcgtccagctcctcactgctgtcgctggactcggccacttccaccaccaccagcagcagcaattcgtccggcattggcaccagcgacgcggaaacgccgccgttggcatttgagggagagcagcggcaacaacaaaagcccaacagcagcagcagaagtggcacgagcaaaagccaaaatttgtgcggaggcacggcactcaaaatggcggcagacggaaaaaaacagcaaaaagttgggcacaaaacagcaccaactgcagctgctcactgctgcccgatggaggaggaggagcaacagcaatccatggacaaggagcagcaacaattcgaggtgctgccaatgtgcgacggcatttttgggtttcccaaaaaacgaaatgcttttcgctaataagaaagccaacattttggtcaaaattcgttaaattttcccaggcgtcctccaccgcgcactgttcgccgccgtcttcgtccagcggcggtcaatccggcgccgccgccgcctccgtgctgctcgtcgacctgtccaatccgatgctgcagcaattctatgtgcagcaacggttgttcttccgacaaatttatgcccagcagttcgccgctctgtccgcccgacttggcatggtaaggcgctgacacttttagtgccaataacactctcgagctgactttcacttccaactctcgactcaatttcactttttttcccggttttattccttttcagtttcaaatctcaatcccgtttattaaaaggtgccttcgtctgtggaagagactgtgttcgacccgtccgttcctcaccagcacctcggctttccgcccgcttcgcctccaattgcgcagttggcacatttggatgcctttttcggctcgtcctccgctgaagaggtgaaaaagaacagagagagaaagaggggggcgggggtcggtcggcctgggggtataattaattaagatatgaattaaaatgaaggttttaaattgtcccgcctttaactccccccccccttcgtcagtgttttggctcgtccgcttctcctcctcccccgactgatcacaacggttcgccgccgtcggatgagtccgtcgtttattcgtcctccaattcaaccgccgatgcaatggcaccaccgccggcaacagtcgacgaatacagtaagtgttgtgcataaacatatatactgtattttttggcttacttactgtacactgagagagagtctaatcgcgat

SEQ ID NO: 22643 - DNA, 601 bp, Heterodera glycines
ggtgataagcggcggtaacaaaccgatcaccgccgccaaccgtggtcgtcgtccgtcgatcgtcctcctcctcacccattcagtcagccccagcagcatcagtttcgtttccccgtccgtcacaccgattattccccccaaaaattcatttcccccccccaccctccgcccattctctccaccaccactttcgaccgattgaaattgactggtgctggctctcgccgctggctgtttgtgccctccctgattgactggcattggccaccctttccacccccgggggcctttgtctccaatccccccaaatttactgattttataatcactttgtgtgccacccttttttctcccccccccccctccctctttcacaccacaacaaaacaacagttgttgtccaatcgctttgctcgtctgatcagtccgcacaccgtgccgggtggtgggactgatcattctcactcatcaccagcatcagatcacttaaaaaacaacccccttttcttcctttgtacattgcccaaaagcattcattgcctcgtctcacctcggagcaatggccaaccaatcgaatgaatgaatgaatggccagtcgatt

SEQ ID NO: 22644 - DNA, 1850 bp, Heterodera glycines
  unsure (1)..(1850): unsure at all n locations
ccgatcttgtttattaaattgcaggaaataataatatcctctaaggtttcaaatttatttaaaataaatgctttctaaagttaataattcatttgtttcatttgaaagtttaagctatacaactattttgttttttaattcacctattaacattcctatttcctttaataataaaaattatactaaattaattttttaattttatttgtatttttattatattaatacattaaaaaattatttcgatttgataatgtgatcatcgtcccgcatgatttgaactctcatgcattcgcctggtttttctggtcttattcgatagctccttttcgttgctgcaaatagttctctattgatgatgaatggatgcattttaactagagaccggcgcaggacaggatcctgcgcaggattttgcatgatcccagtccgcaatcctgcatattttggaaaatacaggatttacaggatttgcaggattaatcctgccggatcctgtcctgtaaaaaattttgaattccaatcctgcaacaggacccgcaaatttgatttttatgcaggattcagcaggatcctgcattgattttttgaaaatttttaaaaatagaatgccaaatattcagaaactttcttttttcaaaaaattttttcttaataaaaatttttcgtttaaaaacttatccttattcgaaaaaagtttatacaattgaattttttatgtgttttgctacctaaaaagcgttaataaaattttttttcactattttcgtgcctattttaggatttttctgcctttttaagtgcctatttcgcgattttttgtgcctaaaaattccatccctatacataatggattatggcttttttgcaaagaaatttaaataaaaattattttactttaatttaagctattattatgagccacccaatttggcaaatcggtctttttaaacgcattaaagaagattcagtcgattgcttggagtgtaagcaaaaaaacgttattaatttttcatcttcatcattttttggtttaaaaatatatttgaatacttttttatactttgaaagattttttattaatacagaattttttgaaatttcctaaaatccgcaatcctgcgcaggatcctgcagattttaaatgcaggatttgcaggattaatcctgccggatcctgtcctgtaaaaaattttgaattccaatcctgcaacaggatccgcaaatttgaaatttccggtctctacctaacactcgaattttttttacttaaatttttgtagagtttttctatttttttttgtttaaatttttctttttttatataattttttttcatatattctattatacattgttttcctgatcaaatccagctgcataaatgtacacattggccggcgcattgcgctccgccacaattcgacaagcataacgcgaaattctctgatgctcagcaattgtgaaatcaattttttcattcctcgccctgccaatctaacaaagaaaatgttttatttatttttgtgtaaagagaaaaaattgtgaaatttgggggagaaattttaaaaattttactaagatttattaacagatgactagggagtccaatcaattatatgcacatgcatatttttttcctggactctgggaggcctgaaacgcacgaaaaacatgtttttagcttgttttgaagcttctaggatgactttccatatgcatatttgcatattttggcatttcgtgcatattatatgtgcatattttggcatttttccaaaaaacctctaatagaacgtcccccaacagacaaattggctnttttgaccctcaaaacccggaaattttcc

SEQ ID NO: 22645 - DNA, 1578 bp, Heterodera glycines
tttggagttcattatggcaggaacatataatggatgggggtgggagtacatgggcatgggcattaactgctgagcagtcagtgctctctggtcgagagtcgaaaaattttcccgagactcaagaatgccgaacaggtacatagactaagactcaagtccaagaattaacccacgagagtcgaggacgagacccccaaaaaagctgaaaaatttcccaaatcgaaaaccgcgacagagaaaatctcaagcagaacaaggcattggcatgcctgccatccccccaaagatgcaaaaatttaaaaaaaatgcaacaaaatatatgccaacaaatttccgctccttcccccctcggtgccgttgtatcattcatcaggcgcctaaatgcccaaatttggttgtaatacaacgttctacacacaaaaactaatgcaacaacacctgcttggctaatggcaaaaattttgcggaatttttttgcattgaaaattgcttgcaacaaaagttgacttggagtgcttgttgtgccgcctgtgccgcgctaatagtgcgactcgtgcccagttctgtgccggtcagctgctgttgcggttgttggtgttgatgttgttgttgtgacgtgaccatcggtcgcgcaactgttcgcatcattgagcccggagcgccggcgggcggcttctcgcgaactgagggaaaaaaacaatttttttttgtatttttatgctaattatggcaattaaattaataaaaagcgaatgtaattgctttttaattgtttaaaatattttcaatgcaattaaaaacttagatattctcgaaaaaataaattgccgaaatgcgagaccgaaaaacttcgcccgagagtattctgtcgcatcgaaaatcgagaatcaaatgactattgagattcaattttggtagggcgcgggtttttaattatttaattaatcgcgtaaaatgtgcaagacccatattttttaatagaagatttttatttttttatttttattttcgttacttcaaaaagagttggaaatccttcaaccatctttaaacaatcttttaaaaatgtttatatttaacgatataaaaaaattttttgattactttttcatcactttttttgccatttgttcatcattatttgtttaaatatttttgcgattttttttattttattgtatcaattactttttttatatgataattgttctctaaatattattttaaatgacaaataatacttattttaataacatttaaatttgttacaaaacaattacgtaatgtgtccatttcggccattgggtcgggcccgcccgttctgctgatgccggacacggcactggcgccagccgccaaaatgccacgaagaaatgagtggtgtctaaaacattttaataattatttattaattgccctaattaatgtattgcccactttggcgcctcaggcatatcgcacggcacaaacaattcgcccatgcaatcgttgaccttaaaattggtgctaggtcgtttcttaaaaaccgccactatgggcgtttcttaaatccgcccaagggtatgaaaacaaaaaatg

SEQ ID NO: 22646 - DNA, 1108 bp, Heterodera glycines
caggcccagctcattgcactacgtgaactcgtgtcagctgtatcagtacgaatgcgccatcagtgccgtgttggaaatatgcgaacattataaccgctccaaactgttcgaggcgtacggattcggcgccaaaattccgccggcattcgccgtcagtcacatgttcccattggtgggccatttgttgacaaatttaaaaaacggtaatgtcaaagcggttgaacaacaatgagagggttgtgcacggagttgcgggcgttctggaggcgtatcggtacgccgttctgaacacccatttgttcgggcccaccaatttcgcaccgacaatccgcgaattcattcacaaaacgagcaaattcccgcgtgacggcagccgatatcaggcgagcaatgaccattgttatttacatattggtgagttcgtcgtcaggtgctgctcattctcaccgatggcgtcatcacggacatgcaaaacaccgtcagagcgatcgtcgacgcgtcccatcagcccatgtccatcattagtgagaaggccctttgattgaccttcttccataattacgccctccccaacttgcagtaattggcattggctcggacgaattcgccaaaatggacgcattggacgccgacgaccgaactttgtccgtcgatggacacaccgccgtcagagacattgtccaagtgggagaggagacgacaatcagcaaattgattgattgtgacatgttgtcctttttcagtttgtccctttccgcgaattctttttgggaaccgattggacccaaaatgcgccttctgctctttgtcaagagtacctcaagtccgccctggccaaggaagtgctgtccgaactgcctgatcaggtggtgccctgccgaccgaccgatcacttacttttttttgcttatttgttaggtgtgctccttcatgaaatctcacaacattccgcccccactgcgatcgcctcacattccacaacaacagaatggtcccttcgtcccgtcatttccgaataaaaacggaaatgccaatgctccgcccctcaatgaatgatttcgttaaatctgatgccattcccgtgttctatttaataataatatttatc

SEQ ID NO: 22647 - DNA, 2180 bp, Heterodera glycines
  unsure (1)..(2180): unsure at all n locations
gatttcatcaataaatgttgcgaattcctggacatttctttccgaaatgtgctcggtccatttatcagcagtagaaacacaattgaatataaaggcaaaaaataaaaacagttgcaaagtgtttacagctttacaagccatcatttcttttaaaaatcaataaaattagtgaagccatggagagcaacggaaattcccatttcctaattgttgacttataatntaagcttccgaatttttttattggtatcagattagaccgacttctgacacttttaggtttggaaccacaacctctgaaatttttccacactttttggaccggaatttcagttttctcaattttttggatccagcaattccgagtttcggtccgaaattggttcgggtgtgtcacgatgagaattaaattgctatgaaacgaaaacttaaattttttgagtgttcgcccctaaaataagtttttatccctattttggcgtttcgcccttattttcgcccctatttcgcgatttttgggaaatctattaacaaaaatgcaataaaaacggaaaatgcacccctaagaatcaacccaaaaaatttcggaaaaatacagccctcagaatcgacccttaaatcctaaaaatttctaaatgtacttcatttctaactgtaatcagtaacaaaattgtttgacttaattttaactaatttacatagagaaaacagtaattttaataaattcaccctctacatttgaaattttttcgcccctattttcgtccctatttcgcaaattttttgcccctatttatgcccctattttggactttttcgtacctaaaaatcccatccctagttatggccaagaatgactgaaaacctggtttctgatgtacttttggacataagtttgttcaaaatttacgaaattttttgcaattttgtaggctgatagagcacatttagggctatcgaatgaaatcaacaatgtttgattttgtttataaagaaaaaaatagatcaaaaacatgactctggcccaattcggcaccgccggcacttttcccctatccctgaaattttttctaacaaagccgactgccaatattgtgggcaaagtaacaaaaaaaaactagtttcatggaattaccccatcaaacatttattttttgaaaaaatgaatttttttcaggacccggttagaaatcgatatccggactcggttgaagaatttgggcccggaaccggttttgcacaaatatccggacccatgaaccgtactcaaaatggtagtaccggtgcgtcatttttccaaatccaacagcgtaaccgatttaccggaataatgaaaataagttgaaagagatttatccactaaaaagaagtttaaaatgaaagataggaattctaaactaaccgaaaaacaaagaaagcaaagtaaaaaaggacagaaaataaatgaaaaatctcagcaacaatttgaaaggattgttcctccaatcctttctttcttccgcgccgcaacactttgttcagttttgaaccgtcttttcacttttcattggccctttttttggttggccttttttcctttcaatttttgatcgactttttttgcatcagttttctgtttgccttttccctttgtcggcttttcggttggcttttcggttttttccgtctctttaaatccaattgcttttgcgtaccgtttaattggctcttttaacaattccaaatcgatttgttcaatgctaaataaaagtacgtaaaattttaaatattttaactacggctccttttggaattttgatgaccgaatgacgacggagtaagcataaaattattatatttttttaaatagatttgttcaaacctagcccgatcaaatgattggctatatttaaattaagctttgcatgaatttacctgtatcccaaaccatatacatcatccaatactgtgtcgtcaactacttcagaaatccacttgtgcaactctcctccacaccctcttttgtgctttgcaaagaattcaccgaatttctgtgtcggctccgacaataaagaatttagttgaaagcccaagttgtacagtatacagctaattggtggaatagcggaaggctttgatgactttacattcttcatttggttgagaaaatatcttctcacaaatctgtacacttctggcaa

SEQ ID NO: 22648 - DNA, 1544 bp, Heterodera glycines
  unsure (1)..(1544): unsure at all n locations
attcaggaaaaacaagttttttnaattgaattttcataaaaattccggaaaatattttttttttcgttatttacggtccaaaaaatttatttattgaattttcatcagaaaaatacctgaatgaatctggctaaaagtttaaaagcaagtaaaatttctcgaacaaaacattttgaataaatcagctccccattttgccataaatgctaaaaattcaattccaaaaaatttatttattgaattttcatcaaaaaaaaaatcccataatgaatcagacaaaaagtaaaaaacagaaaaaagttgaataaatcataagtaattaattaatgtctccccattttgtcaaaaatttaattgaaatgccaaaaaaaaattagccaaaaaaaaaaaattggttttactgcggttagtttaagtgagtgaacacgaaatcgatcaccctgcttaggcttctgctgttgctgtgcttttttctattatttttgcccgagaatgaatgtggaatgatttgccggtggtcgacgagagtgggaggggggaatgcctcgaggggagaaaaatgtaagcggaagcggagggaggcatatgcgggtagcgccgggagggtgttgaatgtcgccggagggcaaatggtggccgtggtggcggataatggaggggggggggcacggacgtttcagtgccgaccgtttcagcgctgcgaatttgaaaattgattttgttttcttagccagtcaacttaaaaagaaagttctgcatcattgtcagtttatgaaatgagctctaagttgaaagtgccaaacatggcacacggcgttgaaaaagaccgaaaatgccattttagtctaatttgagtatatatatatttttttgccacggcaagatttctcaaattttttagactaattaaggatgccaaggcgcagcatttaatgatatcaaattttgtaaaaatttggggatgtcaaggaaaaaataaaataatttttactatcggccggcgctgaaccggctcggcgccgaaacgacccggtcctagcctaacagtgaatgtggcaggcagcagcgagatggtggggagccggtgaaccgacgacaacgacgaggcacaaaccccggcggcgcttcgctttgtgcttcatccgtccgtttgccgccccctcccccctcccgcccattcgatcgatcgatcggcttggcggtggcaaccgacgcctccgcattttcttctagcaccccaccgcttttcaatgcttttcacaccagcagcagccactcccccgccccccgcttccataggccgtgctcaccccccgtctgatcagtcagtgtcatcacagagggaggcagttgtaacacattttggttggacggactgctgggccaagggtggggcggcttggccattcatacataaaatgaaatgaacaggggctgaacagcagcagaagtatggggtagaggaggacaaagacgactttttgaaatgtcagggaatgctggcgaacttaaatagacacggatttatggggtggtgagaaaat

SEQ ID NO: 22649 - DNA, 1112 bp, Heterodera glycines
  unsure (1)..(1112): unsure at all n locations
aaaaaagagatagtcgtttttacatacgatatgannaaagaaggcgtaaatggctctgaagcgtccatagnccgcagaccacaaagtaaaatgggaccataggccgcagaccacaaagtaaaatgggacaacattcataaaaaaggttggcctcaaaagggcccattcccaagctaatttcggaatttgctgataaaatcaaatagcctaaattatatacgcattataaaaaggaaatgacagaagcctcgaatgttagttatattgcgtgtcacaaaatctcttccggaaaaaattttcaaaaaagtgttccgaaaaaaagagatagtcgtttttacatacgaatattgaaaagaaggcgtaaatggctctgaagcgtccataggccgcagaccacaaagtaaaatgggacaacattcataaaaaaggttggcctcaaaagggcccattcccaagctaatttcggaatttgctgataaaatcaaatagcctaaattatatacgcattataaaaaggaaatgacagaagcctcgaatgttagttatattgcgtgtcacaaaatctcttccggaaaaaattttcaaaaaagtgttccgaaaaaaagagatagtcgtttttacatacgaatattgaaaagaaggcgtaaatggctctgaagcatccataggccgcagaccacaaagtaaaatgggacaacattcataaaaaaaggttggcctcaaaagggcccattcccaagctaatttcggaatttgctgataaaatcaaatagcctaaattatatacgcattataaaaaggaaatgacagaagactcgaatgttagttatattgcgtgtcacaaaatctcttccggaaaaaattttcaaaaaagtgttccgaaaaaaagagatagtcgtttttacatacgaatattgaaaagaaggcgtaaatggctctgaagcgtccataggccgcagaccacaaagtaaaatgggacaacattcataaaaaaaggttggcctcaaaagggacattcccaagctaattttggaatttgctgataaaatcaaatagcctaaattatatacgcagtataaaaaggaaatgacagaagcctcgaatgttagtta

SEQ ID NO: 22650 - DNA, 1960 bp, Heterodera glycines
agacttttgcggcctgctgaaaatcggacatttgcggcccgacaaatgcggttggacatttgcgccttggacattttcggtcaatttcttaagggccgtttttgaatatttgcggcccgacatttgcggcctgctgggaatcggacattttcggacaacggaacgccaaattatcactttattccaaaaacgatatttgctgcccgactttttcgaccccaaccaaaatagggttcatttatcgaaaatcccttttcctcttaaaatttacgccgaactttattcaatttttcaaaaattgatgtcaaaaccccaccagagcttgaaagttgctctaccaactcttgcagcggccagttgatactgtagagatctgagatttcctaatgatgttcatacatctttctccatcattttgggagttgtttcgttgatattcttttcctcctcttcgttgcttccagttggatgggggttaggattttttttagaagacttgaatcggcttattagaaaaagcatgaaaatcggttaaattggatggaaaataattttccgaggtttatatctttttggggtcgaaaaagttgagccgcaaatgtccagaccgcaaatgtcatacaaccgccagaacaatgatgccgaataaatccgtcgcattacgcgtccattcccgctttatttccaaatgaaagcgttaaaaatggaaaaaatgtatttagacgtttcaaaaaccgggttttggcatttccgcaactcgagacatattttttcgtgcttaagacgaatcaattgatatatgatttaacccttttctaagtagggaaaaatggatttgaaaaatagttttcgatttttattcgggtacggggttcggaatttactcacttacagcgaccccgaaaagttgatacttttggttcagatcagtgagtgtcccgtggttgtttatacaaagtcgggttgcggctactgcaaattggctaaggaactgttggaacaggagagaattcgcttctgtgagcacgatttagagacgaaggaacagcaagagccggacaaagcacaggcaaatcggggaaggacggcacggcgcatggaatttgactcgcccgccgaattatcaaaaattagttgatttgagtaaaggttgggcaaaatggtagacctgctgctgggagtgaatcgaactctcggcttcccacccaatgctcttaccgtatgagctaccaggccatcccattcgcccttcccttttaggatcttttacccacttttaagcgttttaaccgtacgttggctcgttccttacatttgttaattatattttgtcattgtatagaatcccaatttgaaaacaaaaaataatgggggcgataaaatgcagtattaacggaatcagcctttcatattcattctgcttggatactttttgaaacagccatctcataatcaatatgtaaagagcttcatttaaatacttttccacttttatttaataacaaaaaaaatttaaataaaaattttaaaggtattttttaattcaaaatgaccctgtattgtgtaaaatatttaaattacacacaacttatcatagtttttttcataaaaaaaacattttgtcgttcattagtctggcagagtttttgtttgtcttttgaggtcccggttcaaacccttttgtctgtgaatgtttcggatttagagttatgtgaacggcttggtctatgtgtccaggcacagattggtgccgcaagtattcatttgtggcaaattcatcggcggtagatttatcagggagaaacaaatgatcaatttagctattttcaggttatacggaattgacaatgcttaaggagtccaatttgctcagagaagagatttcacggtgttcggacgaatgatagcaattggaaggaaaaaaactcacgttcatcaaaattagatcaatttttttttt

SEQ ID NO: 22651 - DNA, 1280 bp, Heterodera glycines
  unsure (1)..(1280): unsure at all n locations
taattagaaagagtatgnacagaattagtgggctatttccacgtattctccgcgaattagctgtgcattntaatcaaatttatttaatataattattcaatttaataagtggtcacataatacggtcctttggtcgtccgccctaacaattacttttattattaccaaaggaattctcccgggctttgttcgtccctcaaaaatggcattgctaattaccacagtttcatttgtaattctcttgtcgtcggtgttgagtgcaaaaggtgatttcttctgctgatgaccacagttctgctgatgttgacgatatcgatggtccgcccttttacggtcgcattttccgcacttttcccttaggcgcgttttcggagaaaagtgcggttgttgtgggggggggggggggcgtttacccatcgaatgggtcactgaactctaagctgatggtcattagcggcgttaggaacgaatggctcagaaaacggtgccgcagggagacaatgttcgccgagtgatgcaactgctgagttctgtgaacacttctaagtgcttgcttagacccgtcgaattcatttacttccacgacaaatggtggaacgccacacttaacaaattgacctcctttttattagcatttttttgtttaactttattgtaatttatttatgttcaaagcattcgatcatttggatgggctgatgagtgttttcattttatcccagcagccccattctccaaagttgcaacttcgtctccatggcattgtttcggaatggcctgcccgtccctcttttcccgaagcccttaacaaaattgaattccaaagcattctttctccagctaccatcatcggaatggtcgccgggtcgaactcggtgtccctcttgccaaagccgatcatcggaatgccggttcccttgatgaattggtctgaatagaccccccccccctgttactgtgttctgcaattgccaattaccgtattcgacttcgcttcgtttccccatcttttcaaagttgtccttctcaatcgacgctgtttagagaattttttaaaaattaacttaccaaaaatcgttcggtcgataagctcaaaggtatcaccgccaaacattcactaaatagcagaaaaagtgggagagtgccgagtttgaacttcatcaaagcttcgcgacggaaactgaatgttttcattcgacaatttaggtcaattttttaaagggtgaagtcacacataaatccatgtgggagtttccctcggcacgggttcaatcgaccgt

SEQ ID NO: 22652 - DNA, 902 bp, Heterodera glycines
ttgaagagccaataaagctttatttttattcgtgcaatctattccatttcgtgtacttcaaatttttaattttaagattgatggaaatgtatcgtaaatttttaaaaatgcatatgcatttattctcggaaacctctaaaagcaggttgcattagtgatgttcgagaccgaaaatttttcgagattcacgagacaagacacaataaacccgagatttttcaaaaacttaataatgacataaaaatcatttaaattttttatgctttttaaaaagcaattttttgacgtatttccttacaaaaaaattttttttcgaattttgattcactttaaaaattttactaatcacgatgttgcaaatgaatttgatttccttgatctatcagtgtatttccgattgaaataatcttccatgcccaatttttccagttggcagtcaatccaggtctcggattttgttaaacttcttgctccaactcatcgctgatattaattatgacaatctatgcttatctatattttagtttaaacagccaacccgtaagatttacttcaagaaaaatcaaaatcataagggcattcattccttgttcgtttaacatcaaaaattttccattagcaaatggaaaagatgatggataatttttaacttttcttctgatcacattaaactttcaaagatggatagtttttgactttgcttctgatcgatcacattgaactttcaattcttcaatcactttcaaatgcaaaaaacatacggcgatgttttcttccgacatgaccaaagtgttggcttgccttcctgaatttaaaaaatctttattttaaaataaccaatcataaatgccaagcaagccaataccagtgatgggccggtttgcgcacctttttatgctcgg

SEQ ID NO: 22653 - DNA, 1098 bp, Heterodera glycines
tttccaaattttcacgatcaaatgcgctgagaaaaaaattccagacaaattagtatcggcgtcattatgctgagagtgcggtgggaattcccttgactgtagaccagaaaaagagatagccatttttccaaaattttcacgatcaaatgcgctgagaaaaaaattccagaacaattagtatcggcgtcattatgctgagagtgcggttggaattcccttgactgtagaccagaaaaagagatagccatttttccaaaattttcacgatcaaatgcgctgagaaaaaaattccagaacaattagtatcggcgtcattatgctgagagtgcggttggaattcccttgactgtagaccagaaaaagagatagccatttttccaaaattttcacgatcaaatgcgctgagaaaaaaattccagaacaattagtatcggcgtcattatgctgagagtgcggttggaattcccttgactgtagaccagaaaaagagatagccatttttccaaaattttcacgatcaaatgcgctgagaaaaaaattccagaacaattagtatcggcgtcattatgctgagagtgcggttggaattcccttgactgtagaccagaaaaagagatagccatttttccaaaattttcacgatcaaatgcgctgagaaaaaaattccagaacaattagtatcggcgtcattatgctgagagtgcggttggaattcccttgactgtagaccagaaaaagagatagccatttttccaaaattttcacgatcaaatgcgctgagaaaaaaattccagaacaattagtatcggcgtcattatgctgagagtgcggttggaattcccttgactgtagaccagaaaaagagatagccatttttccaaaattttcacgatcaaatgcgctgagaaaaaaattccagaacaattagtatcggcgtcattatgctgagagtgcggttggaattcccttgactgtagaccagaaaaagagatagccatttttccaaaaatttcacgatcaaatgcgctgagaaaaaaattccagaacaattagtatcggcgtcattatgctgagagtgcgggtggaattcccttgact

SEQ ID NO: 22654 - DNA, 1145 bp, Heterodera glycines
ttacctctccaccagtgcctcgttttccatcagttcggctatcactttgccaattcgtttgccttggattccctcttgcttcagctaaactgtccctttctgtcggtgcccttttataggcttctctccgccccatcccttctgaccttgttgaagtagtggtagtaagtgaccacgtacgttatgatggacttttcgtccggctgttcaacatttacatcttcaaaagtgccatgccatcattcattttccatttattcccctttttaccctcggggtccaatagtttggccaattgcaattgcttctccgccacgtcgaatgcgttgttcaaattgtgcagtgcgttcgacttttgcagcccttcgtactcaattaggtcggctctgtgcttgtgaatgagtgcgttaaacgcgagcccgtcgcgccatgacgaagtgaagttgcgcacgttcacgttgcggtagccggccgtcttcatttggcaccacagcagcaacgcctccttggccgaccgcgtctcctggttgtccacgtcctcgaaagtgatgtcttggatctgaaacggacagcgggggcatggcaatggcactttttggaagggatttggcccaaaaggcaagggaaagcataggatcaaataagatccaattgtgagggtgggtgtggacctgaaatcgcaaaatgaccgtccaaattaatccgagtgttagccgcggcgccccgtcgacgatgtcctgcgagcccaaattctccaaatggacgtgctggtcgcgcagaaactgcagccccttgtccacgttttccaagcagtgaatgcgcattttccctcgcgtcggccgcggcttaaaattttcgccaaaatgccaatttttcctcttttttcataattattccattttcaccaatcgttcgcccgagagaacttcgagcagtttcatcagcattttgccgtcccttagatcgacgtaaaggtcctggattttgcagttgacgcggatcagatgcgaattcacccatttggtgaacgttttcttctgcacattctcgcgttcgtctgtaaagtgccacaccgtctcattgtgccaagtcggcctttctcctcccccccctccctctcccatcgatcgcacatttgcttcaac

SEQ ID NO: 22655 - DNA, 1351 bp, Heterodera glycines
tgtaagcggcttttttgtacagctcgacgagctctatccatccatgtttttggatttctgaaattttcagaaattttcgagctaggcaccctcaaaaattttccgtttttgaattttatgattttttacagatttttccggggaaaacggagaccactttcaagcaaccgtttttcatgctctatcgattggtgtcattttcagaaaaatttttcaaaaattttttggaaatagaaattttttggttggtaggcctcaatttcagttctggcgcaataactcgtcaggagttgattttatcaaaaaatcgtctaagagcttttttgtagagaattttaagcccaatctaatgtgctttatctcatgtttttaccatgagtttaaaaaaagttataaaattaattgtgattttgaaactcaaaaccataggggggaccccatggttttgcatttcatgaaaaaattttttactcctaaattagccaaaatgcatttttatggcataatttgaggtgctgaatacgtatatacgctttattttgcgtttcagattttttggaaggtgtttaaaattttttgaaaaatcgtcaaaatttgagccccggaaaatccagtgaaatttcgaaaattcataactctcttcgtttttggtcaaatttagtggaataaagctttaaaaatagagaaaaattgggagaattttatgagatttatttggaatttctatcttccaaaataaaaaagttattccagaatttctggaaaaattcgatttttcagaaaaaaattcagaactcccttctgaaaaagtattttataaaaataatatactcaaaaaatccgcaattttttgctctattttataaattttaatttagcttattatcacttttttgaaaaaagttatagaaataaaagtgattttggcattcgggaccaaaagggtgtgaccatgatttctgagtgaaaaaattttttcgacaaaaatcttccaaaaacatgtctttaggggtagtttatgacgctgatcacgaatacgtaatcagattttactttagacatggttaagacctcagaatccctgtgtgattggggattctgaggagtgtgagcgcccgtcctgaggacgcgaagcggccgaatatcccacaaaaaattaaaaaacgggcgcgaagctcctgtcctgaggccgcgaagcggccgaatgtcccccaaaaaaattacaaaacgggcgcgaagcgcccgtcctgaggccgcgaagcggccgaacgtctcccaaaaaattaaaaaaacgggcgcgaaagcgcccgtcctgaggccgcgaagcggccggatccctcccacaaaatta

SEQ ID NO: 22656 - DNA, 981 bp, Heterodera glycines
gtgttggtgacactcggctgtggcagtgctgctgtcgttgcggcgccgtcctgcgactgttgctgcggtgccgtcgttgttgtcgtctccgttgctgttttgtcgtcattggtggaagtggtcgctttcgctaacagtcgctgcattcgtcgcacattgcgtggccattgccatttgctggcgttgagcatcagcacgggctaaaaaagtggggaaaggcgatgagcaaaaaaaaaaacttccgaaattttctggaaacgggccaaatttattttttgcacaaaatgggttttattggcgcgggttcgaatcccattgggtgtatgtgccgatgaaggggggaaagaagacaaattttgaatttgaacaaatttaaaaatttccagtggcgcctatcggcacccttccgccgttcctcaaaattttttttccaaaaaatcgcatttcacacacctgcacagtcgccggatacattcgtcgttccaccgggtacagccaggcgtcgagcagcacacaggcgttgaacagcgacggatattcggcacatgcggacagcgacgaggcggcgccaaaactgtggcccatgcacacgcagcgatccaacgcgagacgattctgacaaaacggggagggaattttctatttattgagtgaagaattttggttggacaacaaaattttttaattttttactacgcttttccaaatcgagcaaaaatttccagatcacaaacccgttttcgaaaaatgtttcattttcatttatttccccccattttccactcactttgaattgtgcccaatcgaatgtttggccgagaagaatttgctgttgtccaatttggcgttcgttgttgttgtccgtcgtcacattttgcagcaaattggcgtccatttcggctaagatccgtcgcatgtgcaccgtctcagcaacacgtcgtttcacctgattttaggggaatttgaaaataaataaaaatt

SEQ ID NO: 22657 - DNA, 1423 bp, Heterodera glycines
  unsure (1)..(1423): unsure at all n locations
attgagagaatgagttgagagaaatgaagagcganagttgagaccaaattgatgaaacaatacaaagattgatgaattctgaattattattttttcttacatgattttcttcgcatgatttaatttgttaacaatgctaaatcaataaattaaaaatggaaaataaattgacaaattggcttaatgttagttgcctccggtcccctcctcttccccctttgtatttttctctggttatctcccttgttgacgcactatttcactgcccccaaagtgtataaatagcgcgagttttcgtctgccaccctcacttttcaaaccattcgaaaaaaattcaacaaaaaatggcgctcaacatgcaagacaagaagggactcctccaccaaattcttggcgaagcagacatcacggtgactacgagcggcatcacgatcagcggtccacgtctctcctccccccgttttattccctttgatgaggccggccgctgccgctcatgtcgtggcaccgaggtggaactggacacgatggtcaccaaggagggcatcaccatttggtgtacacgtatcgaccgggtgcaatttgtccctttcgacatcatttacgacttgcccggtcactgcttcttccgggtgaagaacaaggcgcgggtgttcaacattccctacggggacctgcctgccatcacattcccaaaccatcaagaacaacagcagcagctgcaacagcaacaacaacagaacgatttgcgccaaaaagctaacacggcgatggatttggtggagagtggactgctagctgattcgttacgtgaagaaggcgtgcagagggctgagctaaagcggaaggcaaaagttgcactcgatctgattgatgccggtttgaccggtgatgcactgcatgaggagggacagcgttggaagaaggccaaaactgcactcagcgttctcggaaacatgttgttggccgattcacttccggaaaagaagactgcggagctcccgcttccaccagccgaaaaaattgaaacactgccacttccaccactcgaaaaaatgaaaacgcccccacttccacctgccgacaaaatgccttcgccgctcccaccatcatcaaaagtggaaagtgatgagcaacaattctacgacagcatttctgcggctaccactatgatggacagcgcctcaatgcagcagcaggcaccgctgaagagaaaacagctgactccaaaaggcaaaagcaacaacggtatgaagaaggcagctgagccgcagcatcatcacaacgtgggggacatggacaagactcttgacgaattttttgagagcgttagcgcagcgacgaccaatttgtctatataaattgttgtttcatgcggggggagtgaattttaattaatttattaacacagaaatgcttaatt

SEQ ID NO: 22658 - DNA, 1752 bp, Heterodera glycines
tgatcaggtctagttttttgccatggtcatataaatataattttaatcatttaaaattttaagtcattaaaatgcaaataagctgaaatgaatttatatattcgatagtcctaagaagtctgtgctattgttaattattcaaaaagctcatcgagttttaaaaaagttctggttaaataattcccatttaagattttgtggaatttcatatccataacttttttttactagttataaacaatttcaaaatccaatattatgatagataataacatataaagctattgaatagagctcggacaagagggtcggtcgagcggtttcggttaaaaagtgaaaaactcaaaaaatttgcggtcgcagggttgcggttaaaaatccgcaaacagccgcaaccgagaatctcaacaatttctcgttcagtctttttcggttataaaccgaatccgagaatcgaaaaatgccgaaaaaagccgaccggtgcgatctactaatgaatggcaccatgaaatactaaattagttgaaattggctcaagatgcaatttatatgtctttaaattctattgagaaaaaaatttgcccgatgggcaaaacaacgctgattccgatgccccaaaaattttcggaaatcggaattcttagggtcaaaaattttttggaagtcggaaatcgtaaatagtgccatccctgttccacacccttggctactaatcgcttccacacccttggctactaatcgcatatcattcatatcttttaatttttagggcgacggcattttcttatctttcgcctattttattaaaatattatttaaaatagaatatgaagtaatcaataaataaagtaaagtgatgactatgaagggcaattgcttttggctaacgcattgtattgcaaagaatggcttttaataaacgggaaaattgcctctgtttgaattgcatatgattatggagagatatagagaaacagagaaaaaaagagggctaaaagaaagaggggaaatatgcatattggctatgaagaggggggaaatatgcatattggctatgaaaagaggggggaaatatgcatatgggctatgaaaagaggggggaaatatgcatatgggctatgaaaagagggggcaaatatgcatatggactatgaaaatataaggggaagaaaaagcaattggaaatataaggcaggaaaagaaaaagagagatttacaaatgacgtgttagtttagaccatggactgcataaatagggaattggcgcaagcaaaaggcatcattttaaatccatattagccctctccctatcagggatctgctttcgcgtttcgctttcgcatatttcgcttttttggcactttcgctttcgcgtttcgcattttatttcccgatttggcccatcccagctccctatgtatgtgcataaaacatatccaaaagcttttcactggggcttttcatttgtcctaatccatttaaacagagtctctctcttttggcgattttcaaatggggattagaaatggaaatgtaacgtttgccacgaattttgtcccataatttttttcctcgaaatgttaggatatattttagcattttttagcgcataagtatgcaatcaagcttaatttttcttgtttttgtcggcatttccatttccaagacgttgtcttacgaatggaactcaaaggagtcgctcgacaatgtccgtacatttgccgaaattatgggacgatctttacaggacta

SEQ ID NO: 22659 - DNA, 1106 bp, Heterodera glycines
gcagtggtcgatgatgccaaagaacacattggggatgttaatgcagagccaatgccggaatggttcaatgccctggggacggacgagcagcaaatgaagcagcgcattgatacgctaattgagatggaaaggcaaatgcacgaagatgaccgtaagcaaagcgagaagcttaatttggggatttgaatttaattctaatggtaaaattgatatttattatgcaaaagtgccacttttcagaaagcattgaggagaacaacattgacaccattgagctgagtttgggcgaactccgttcggactttcccaacggattcgccgtcgattggcaaaaactgttcaatgccattgtgcacgatcgcaacttcaccgcctcctccaccgttctgttggtagcgcaaaaaatgaacggacgcactgagaggcaaacgccactcgacgtaatggcggaatatatgcgcaattttgggcccaaaaacgacaccctcaacaagtgggagcagtatgtagagtggctgctgatactgcaacatgccgcactgtcggacaacaaaatgtacacatgggggaagaccgattggaattatttttgtggttatttactttcagatttcatcgtattttccgccggcacccgcggtcagccaatgccatgatgagtgctttgctcgtcaacaaatactttttcgagaggcacgacgacgagcagtatatccgggacggcacatcggaggaacgtcgcgtggcacaaatccggcacaattgcctggaacagctgaagcatttcttcccagaatatgttgaccgaatgtttgcacttggtatgtaaaaatttagaatttaaaaataaatgcttaaaaataattcgaattggaaaatttaaatgccttttaaagggttaaacgacgccattgaggaggagtccaaaacggtgctggacaatgtgaagatggcatttgccgaagtgttggatcaaacggaatggttgagaaatgagacggacaaagcgaaggccaaggagaaattggccaaaatgagcaatttcatcggaaaggcgccggccatcggagatcccaaagacccggaggacccggattggcacggat

SEQ ID NO: 22660 - DNA, 1202 bp, Heterodera glycines
  unsure (1)..(1202): unsure at all n locations
ttcatttcctccctcatgaaaccttctccactcttttttaaaaggtcccaattttaggccatttggggcgggggggggggacaactcactttaagctccccaattccccgttctttgttctttttgtccattgggtcgtagcgaaacaatttacaacgagcactgaaaagaacctaaaaaacaaataaataaaaaagatggaacaagcaaaaagcaaaagcacctcctcattttcttcgccgcttttcacatcgacttttgagggcaacggaacaatcggcttaaaagtgcccgtcggaacaaattcttcggccgcttcgtcgtctgaatcgccgcctttgtctgtcactttgccagccttagaaacatcagcagaagaaactaaaccaaatgaaaattgaattcaaatatttatacatccactaaatgaatttattacttgtcgtgagggtgttggcggtggtcgaaccgaagagagtgccaccggcggcggaggagccaaaagaagggaatttggcggtgccgaaagagaaggtggggacggaggaaggcacagcggcgggtgccgtcgttttctgctgagtgccaaagagaagcgggagagtggccgaggcggtggttgtggtggcgacgggggaagcggtggtcgaggcggacgagccaaaggcgaaaggactgcccgcgctcgtcgtcagtgccgtcgtcgtcgctgtcattggcgccgtcgtctttgacgccccaatgccaaaaaggaagttgtcgcctgttgcagctggaaaattaaaaacaatttagaaaagcaattaacatgtgcagaatttgcagcttcagtaaaaattgaaaattttcgcccccatttcttgaggacaattttcggaattttcactaaaagcacaattatatatttcccaagttcttggcttattcagtgcctaatgatacgaatttgtaattctaaaacattctttctctcactcctgtgaaatacccacagcaatgccattgggttcaattccttttcatacacatgcaattaaattttttaattaattaaacgcatcccaattttttataaaatgtaatccagttatttttttgctatgaaacggggcgcaagttcctcgctggagcacaaatgccgcgcggtgtccaaacatttgcggctcggacatttgcggcttccccanaatttcatcttcatt

SEQ ID NO: 22661 - DNA, 1540 bp, Heterodera glycines
  unsure (1)..(1540): unsure at all n locations
tttcgcggcggaatcacccacaccnttgagcaacgacactttgtaggggttgtcgcgtgcagttgtccactccacattttcattcaagatgagcacttttgggtgttcaattgggtaagtggtggagaaactggaaataaaaaattataaattgtgaataatgatcgaaacaaaactcactttacgtacgggtagagggacgtaaagtcatagtacgagattttctcgccctctcccgccttgtggtacagcttcagtggtcctgttcttccacccatgaacgcctcgcgaatgtccaacgggccatcatccacataatcaccaaaactttcgcgcatgtccgggtcacggttcagcattcttttaatttggcattcccagtatacgtccactcgtgacacttgactttcgatgaattccagccgcttctcatcccgctctcgcacctctccagccgtttttccattcggcatcatcatgttgtcattggggaagcattcattgcagccgtgccacacgcacccattcacttcaattacccttctttccgcttccacccagccatccacggaatactgcccgagtttcttctctccgccagccgaatgtgccgtctgcaccacaacaccatgctcctccgcataccaatgaaagaagcgaagtgccagcaacgactggttttgggcgttgtcgtagccgcgttccgggacgatagccaagtgcttcttcggcagatggttggtgcgaaaatgcttcatacatgcgccggcgatcgtcatgcactcccgcaacacatcaatgccgtcgtggtgctcatagaaggccgcacgctccgcaacgattccttcatttcgtttcgtcacatccaaaaactcatgacgaaaagccaccagcgccgccatcagtatctccacgtcgttggtgcagtagcttgccaacgcctcgtcgaggaagaatggttcctgacggtgttgttcataccagtcgtcgaatttctgtcgtttatctggcatcataccattgaccaaatagtcgtctggtgttggatggatctgctttccatagttgtctgggtggttggccatgtgcggaaagaatggtttgtcctccacatccaagccaaatgatggaaccagcgaggcaagagacattggcataaggttgaatgaatcccggaaaacaatgtttgggttgcgcttcttctgccttcgaatccgcatttcgtacattttatttcccttaaaatagaaaaattattcaaatttgaaaaatagtcaatattactttgcgcaacatgtccgggttatatccgcgtttgaacaattcgcggaacaccagcaccatatcaaagcggccgccaaagtgagagaaggcgtaggtgtcgtaggccaaaggcaagtcgtttatcagccagctgacaaacgcttccaatgggttttccgccaccacttgcttgttgactgttgtttcagtgaagcggcgttgacaaaaggcgcctaggaggtttggcccgcacacctcacaccctcccgatgcctct

SEQ ID NO: 22662 - DNA, 3259 bp, Heterodera glycines
ctataataagaggcggtttcatcggtgttgtccaatgtttgtggtcactatgtaattactttcgtttattttatgtccgtcggattgggttttgaaaatattatgcaaattttgaatcgttcaaataaccctgatggatttgtttatcggtttgtaaccaagagcatacaataattattaacggaattagtcttcatcagatgtgtcgtcatcatcatcaaaggcatgtaaacagaaaaaggtaaaggcccaattccgaataaattcagcaaatccatttagtccatcatatttttcataatattcgttgaccactttttggctcgtgccgtcctcttgccttaagaaacccttcacctaaaatagcaataaaatatgaaacatattttccattaacctcaatacagtcttcagcatcgaaaatgtagtgtcgattcaacgatgtcagcgtgcgaatcatcatacatccgcttaccgatagtcacgatggctactgtatgctggagttagtgttgtaaaacgaaagaaacatacccaaggtttggtagtggcgtaatacagccaaattcacgagcaacttcctcaaggattcgcacacattcgatgagtcggaattcggtgttggatgtgacggtcattttttcaataaaaatcgtaaaataagattgaggaaaattaaagtatgaaatatttgtacagtaaacagtacgcgaaataattgaacatttcaaagcactttatgaatcaacactgaagaaacacttgacattgttacggaggaagttatagaattcatcaattcccttttctttgtcgaagtaaatagtctcaacgcttaggacgtatccaaactgtttgataattcccttgaactcaatctggtctccatcttcggtgatgtagatgagacgcggcttgtcctggtgctcgaatacgtaacgcttgtgctcctctcgtacggcaccgggattttgcagtcgaacatgaacgcgaccaggtcaaaggctgtgcaacattcggcgagagtaaacggctcctcctttttgttcagttcttcgtccattttctaaaatattatttctatttgataatattaataaaagttaacctcaacagatcgtagctcgtttgatggttcatccaaagacagggtttcaatcattgtttgttcatcaatcggcgtagtcaaattgttgaaattcatacttcgtttggctaaacagcattgtaaaagacagaaacagaaaatattcatgttaataaataatgaaagaagataagaatgattttgaaaaagggtaggattaaggataatacaaaaaaacgacgccaagccacttttcccgctaattttttgaatttgaatttaacgccaaaggttttcgtttcagtaaattatggcgttatgtatatattgtggcgttttgttctattttgcgtatttttaaatttttcaccggactacagtacccctcgcagtggtgacgtcatcatccttgtagcatatagtagacatttatcctttttctggcaagtggttgcgtgggagagtggtagtgtgttaggtttggtggcagaccaaaagttcgaatccttttgcctgcgacttatttattgcaattttccctggactacagtacccctcgcagtggtgacgtcatcatctttgcagcttatagtggacaattatcctttttctggcaactggtctcgtggcagattggtagtgtgtcaggtttggtggcagagcaaaagttcgagtccactagtctgcggcgtaatttttcgaataaaaaaagtcgcgcacccctgcaataggtttgtgtttcaaaaaaaagtcgcgcacccctgcaataggtttgggtttcaaaaaaagtcgcgcacccctgcaataggtttaggcttgcagaaaaaaaagtcgcgcacccctgcaatagctttgggtttcaaaaaaaagtcgcgcaataggttttggtttcagtactgaaaattttggcgctcagttggcccgcgctcacttggcggagctcacctggctggcgctcagttggccgtgcacccctcccataggtatgggaggctaccgtaacccggacggatttgtgtgcactaactactgtcagtaaatcattcttttgcaaattgtttaggaaattaaatatattcttcatatccttatgtctggttcaaaatttgaaataaaaacattttgactatttaaaaaaaattattggaaatttcttcccataaatattaagaaccatttaaaataatgttattttctttggctacttataattacgcgaatgtaataaaaagaaatttctataaataatatctttttggcaaataaaaagatatatatttttaaccgatttgatatataatattttattttctttattaattattatacaaatattaattactttcaaggtgctgttaataaatatattttttaaccagtacttcttgagaaatgctaaaaggaattaataattttttttttaatttacagttttttttatatgcttcttcttaatataatgtttttttattgtagtttcttggcattctgaacagaaataatatgtatgcgaaaaagtgaattttcattataataaatatattttttagatttaaaaaattttacttattgaaatcagttttactaaatcatgcattaaatgctcattagaatcataatttagcaaattttttttatttaattatcttatgatgaattcactgattcatttgtagtcacttagtttttttattatattttattaataaatttttgcagataaataataatatttagcaaatatttctcttgattattcgtggcagtatttatattgttaattatttaattgtaattacaaaatatataatattttatttttaaaaagattatgtaacgcaattattcaattattcattagtagttctatatttttgttgattactaaaataatttattttgaaaattgtcatccaaaaagttattctttaaaatttttcatgtccaatcttccaacaaattcttttttcataaactttgttttgaggcttcaattttatattatctcgtatgttcttattttttaaattgttcaaaagtaattattaatatttttagttaagaataatccaaaaaaagattatggagaaatgttattaatttaatttttttttattgtatttttaattttaattatttcatatatcttaaaaaagtatttattaagctttt

SEQ ID NO: 22663 - DNA, 1930 bp, Heterodera glycines
caaacacaaaaaagaaagtgtttttcctactaattagagcatggagaaaccaggaaaaaaatatgtatttacataaaattagcagccctatttatataacatgttatatatttattttgttttattttttgaaatcacttcccggtgcacgaaacttaccggtgcccaaacttcccggtgccaaaatttctggtgcccaaacttcatgtcgcctttcctagcagtcatgccagatgtgctgatttgtcatcattttgctgatttcaaggcaaattgaacaaaaaaattttttttttttgattttagcgtgggaaaatcgatgttatcaattttatttaaaaatagtctcgtcattaagttccgccatcccctttcctcccaaatagtgtaatgcaaatgatggcataatgcatcattaaactgtgatcaatagggatagttttttatgtaagaaaaatcgcgaaatatgtaagtaaaatatgtataaaaaatgctaaaatatgtatgaaatatgtacaaaaatccccaaatatgtactaaaatatgtaaataaaaattttttaaatggtaattttttggaaaaaaattcctcgtaaagggtgaaataggcaaaaattaacataaaaatgatctaaataggcttagaatcacattatagcatttcaagaattaatttttgatattcattttttgaaaaaaaaatttcgatttttagggatacattttcaaaaattttttttaatttttcacaaaaaatttctataaattctcaaaaatcctcaaaatatgtaaaaaaatgacaatatatacgaaaaattgcgaaatatgtacgaaaaagttcaaaatatgtacatatgtaatatgtagaaaaatccgaaaatatgtaaataaaaatcccaacatttgttcatgtttttcctacttattaggttatggagaatccaggaaaaaaatatgtatttacataaaaaaaactatccctaatgatcaaacaattaaggcaaaaactttttaaaaagcctgtactattttgtcgtttctctttttctttgttatttctctcactctggaatactatctcttcatttttttaatagaaaaaacaacatttacttcgctctatagaacttttttttcgccttacagattatcttcaaattttctaaatcaatagagaaaaaaattctgcatttttctatgccgaatttatcggaccgggtcagtttagtctggccgttttagtctggccggtttagtcagagggtcgttttagtctggcaagtcgttttcgcccataattcttacaaatgtttttttctgtcaattatttacaagtaaaaacttaaaatactatgtttagctacaaatacgaatggaacaacgcaatcaggaaataaagacaaagcgaaacaagcaaaagctggaacatgaaggtgcactttatgttaaaaaataaaaccattaattttttaaaaattccgtgttaagaattttgatatttgctcgcgcttcggtcttccgcttcatcaacacaattcgatgtgagcaaaactattgatgcagaaatctcacgatgcatcgctggtgaactccctcctcaaaaggcgcccaaatatcgtgccgccgatgcgagaattcttcgactcttgcagagctacaataccatcaacaataaccaggctcaccaaaatgatcacaattaccatgccctatcaatgttaacccctataacatcatcaattttctccttggtatttctcgaaattatgagatgcgcccgtaatactttcaatgttttgttattttttttgttgctaacacattgataaatctgttatagtgttaattttaaagaattttcgagaaacaaatcagaattggatcaatgtaggacaaaaacagcttgccagactaaaccgacccccaccgc

SEQ ID NO: 22664 - DNA, 1089 bp, Heterodera glycines
tcaaattcttcaacaacataatgtaaaaaatattacgcaagaaataatttttacatcctttttagaaatgctgcataaatttttattgtaaatagtcacaaacaaactttttttcactcccaatatctaccagttatcatacaaaaaggcaatagttaagcactgagatataaaaaaatcgtctagaataattatctaaacaatttgtcgggaaagctgtataaattctgggaaaaaaacttttcaagaaaagctgaaaaattttcaatcgcatcagaagcagcctcaaattcttcaacaacataatgtaaaaaatattacgcaagaaattatttttagatcctttttagaaatgctgcataaatttttattgtaaatagtcacaaaaaaacttttttttactcccaatatctaccagttatcatacaaaaaggcaatagttaagctttgagatataaaaaaatcgtctagaataattatctcaacaatttgtcgggaaagttgaataaatttcagttgcaataggcatattggcacaatacataaatgtagagcaggctcaaaatagaggaaataccaaagattaaaaaattcgtgtttatggcccactctgctttggctggacataactcgccagagagtggagatagaccctttgttgatacatttgaaaatgtagagctcggctagcgcattcgaataacacaaaatttgttttcatttgcccccaaacaatccgcttatgacgggccgaaagaaaattcacaaaaatttggcaccggaaaaactccatttttttatgggccagcataataaagtaaacccaaaatgtaagggaatttaaattggtcatgtgagatgtttagttttttatttgacccatccgttttctgggaaaaaacttttcgagaaaagctgaaaaattttccaattgcatcagaagcagactcaaattcttcaacaacataatgtaaaaaatattacgcaagaaattatttttacatcctttttagaaatgctgcataaatttttattgtaaatagtcacaaacaaacttttgttcactcccaatatctacccagttatcat

SEQ ID NO: 22665 - DNA, 1669 bp, Heterodera glycines
ctataaaaaatgttatttaaatcagtaaaattgtctctttttattgaaatgtaatttttcacgaaagaatggaaataaaaataaaaaattataatttgaataaataattaatttaaaaactgatgcaaattaaaaaatagcaatgttgttggaatcgtgactattgctcaaacattaaagtttttcacaatcaaccgcaatttattacgcaatattatctgccgcgtgtgacttttaggatatgtcacaaaggattaagtttaatcatttatttttcagcatatgatttttcacattaactgaagcagtactaatgtacaggtgctgtaaaaatattttaattcgatactaaaatatcggtaattttatgagttaagataaaaatatagatagtgcactttgttacagcttttggtcataaaatgcaaaaaaaacttctaatttggctctatttttaaaaagtggattttatcatcattttaagatatatttgagaaaaatataatttttgtactgttatgagcatttttgtaaatttgaagagttttttaaaattcattaatgtcaaaagtcaatattttctgtaaaataagaaacctgtaagatttacaggattaggttccactataaatgaatttttgtcttttaatatatgtagtgaaaggaaaagacatttgtataaaatttataactaattaagaaaaatacgaataaaaagtttcctttttaaaaacttcagcagtcgcgatcatggaaaaagtcaaatttaccgcaaaaacccatgggtattggctgttttttttcgcgcattttttcgggggaggggggtcgacggtccctggtttttttcacaccgaaacgaaccccggttttttttaccttttttcccaaaccaaagggtattattggctgtttgttttttcgttaataaattaaaataattttggatttaggttggggtttaatattaaacaattttttcatctttattttggtaatacaaaaactttttttttaaattatacaattttgaattacgtatacattaataagacatttgtgtgcaattgctgcagaatgccccctcccccccaattgaccccagacaaaatcaattctgacggataaaaaaatgacttataaactgaaaaaaagtaccacaatagaccaaaaaaagaaaaaaaaaggaaggaatggagagggagggaggaatgtattgagaatggattgagacgagggatggaagagggcaactatgagcaaaaagtaaaataaaacccaaacatttttatcgactttttttcaaataaaaaaataattttattttaaatttagagtttaaaaatttaaactttaatttgtaatagaaattgtcgcctgcccaattctcgcatcatgcccccaaaaaaagtaaaataaaatcctgagattttcaaaaaaaataatttttttttgtttgttttttcagacattggctcaacttttgaagcctctgacaattgtcacgcgcagtgcacaacgaggtgcagcggaggaggacgcggtgccgacaaagagacaaatgggcatacgaagagggccacttgcaaatcgtgagtttgattttaaaaaattcaaaaaaaaattaaaaaaatataaattcgtcatattcccttttttaaattttttg

SEQ ID NO: 22666 - DNA, 1720 bp, Heterodera glycines
acaaactttttatggtaaccgctgaaagtattctaattaaattaatattttttatgtctcataaaagtcgggtgattaatgcgccgaccgaaatccccaaatccccgaaaattccgttttcacggggacaggcagagggactgtggtccttatgggaagtgccggcgaatccgcttaattcctctcttagtcttttgctttgtttggttattgaccaatgccacggcagaaaaagttgccaaaattgccatgaaatataaaaatgaagaaggattactaagcgaatagtttgatgacgtgtttttgctccttcagttggtcaaatgccttctgaattttccactctttggtgtgcttttgccaatcgctgctttccaagtctttccgagtcattttcaacgccacgcatttgttaaacattgtggtgccaatgctcttcaattcgacatggaatacctttgaagcgcaaaagcggacaaaagcaattaaaaattaaaaatttcaattttaatttttctcacttttgaataagtcccttcaccaagcacgtcgtcttctttaaacctaagctcaataggctttttatcctccaaatttgtcagcgttaatttcgccatcgtcgccttttcagtgcgtccgcattggcaatttccctttgttttttgtggcgccgaaatttttttaacgggtgagtaaacttctttttcgtccaattttactaaattggtaaaagtgagtttgctcgttagtttcgggaaccttttaatcatttttctgaattttcttattttttttaatctaagcgttgtgtctattacctataagatttcataaaatccagtttttgataaaattaaaaataatttgttcaaaaaatatttaaaaatataaaatgaagtttgaattttaacgctaatttttaaaaaagaaataatatgaaaaagttttaatcattaatttcacttcacaacgcattaatttaccatttattgctgttggtgataggctattagtgtttctgttttccttattttctgacttaaaaaaaatattttccccaaagagttgacacttacctttaaacacgccaccgtaaatgccgtccaaaaataaaaataataaaaataattttcgcatttttgcggtgtcatttatagtttgagtcatctattaaaaaaatattaaaataattaatttaaaggattcaaaattttttgtgaatttttttctaaggcacttttatttaaaagattttagaaaaaaacaacacaaataagcagtaattttgttgtttcccttctctcttttccctttttttaattgattcgggtgtcatttcttttgctttgtgtgccaacgccacaaattttggcaatttccgccaaattttacaaaaattttattgcatattcgctataatttttccgtctataaacacgtgtaatcaatcattaatcgtgttttataaaaaatattccccccccccctcttttaatgatgccaaacaatcgaagagaggcaaagccaactctaaaaaattgaatagaaaataatatatattatagtgttttgcattggcacaatgtgaacaatttggtgaccgaagtgaaaaaagtatggacgccgtgttttggtgggaagggccgtttcagtccggaaaaattactcgaacaatcagatttaattattttaatatatatttttttggttaaaaggggac

SEQ ID NO: 22667 - DNA, 1896 bp, Heterodera glycines
attccaaatttgattcatcagaataagcatggcaatgcaatcgctttggttggccatttttgctcggcgtgtgcaaccatttggacaacacttggccggcagaagcatttggcccatcatcagcaattgcatcaggcaacagaaaattggaattgattgaattcagatgattgagatcggtgagaattgtcagtgaaatgccattgcgcaaattgtccaaatgattgtcattagtaaagctcaaatggcggatgtttgtcgcaaaattcggccaaatttcacggcaaaaaacatcccaaatcagttggtcattatcaatggacaactccaaattggtgcccattctgtcccaaatttgcttgttggaacgaacaaattcaatgacggaatagtcaatgtagctgaagaagcatacaaatgctttaatatacaaaaaagtttaaaatgacttaatctgaaatgcatcgaagcggtcggaaacagggatgggggcgcgccgcgatgtgcgatccgcggtcgcggtttttttttttttgcgcgatgcgcggaatttgggactccgcggtaatttttgactaaaatttttacaaataaatttttttaaagcgattgttttataactaaatttatttaaaagtaaatttttgtttatgtacataaaaagcaagagatttagaaattggattctcactaattcctccaaaaataagaaatattattcattaacttttctagacaattttcttctgtaatttaaaaccaaatgactcatgaaaaagactctattggttttattttgacaaaattgacaattcttcttatgccaaatgcaaggcatgcaattataaagttgacagagggccgagaaaacgaacatctgatttggaacgccatttaaaatctaagcatcctgaacattacaagcaaagggatgaagctttacgtaaaaagaaggaaaaaattgagaaatctgacaattctcaagtgtgccaccgggaagtgttgagtcggaacgccttttcagcagcgcaggatttattcttaatgatcttcctttaccattttgattattgaaatttttgaattatgtttttataaatgcgcgatccgcggtgcgcgatccgcggcaatttgatgcgcgatccgcggtgcgcggacgcgagatttttctgtgcgcgctccacccctggtcggaaagcaatgccattttgatgccgagttggggacggtcaaaagatgggagaatgtccatccaaacatcgttacaaatccaactgaaacatgaaaaaaagaattgggaatttaaaattttaattttttttaaattgcttaccgtctgttcatttttgctgaacaatttgcacacttttgtcgtaagttgtgcttgttaacgaagtaaaaacttttttatattccaaaaagtaagcagaaaaagatttttaattgatttattttttctttaaaattaaaaaaaaaattttgttgttactgcttaaaatacaataatcatttgtttaatttttatagtcaccgaaactgtactgaaaaattggggtagaaaaaaccgaaaacatgaaaaaaaaactgcaaggaaaccgggtcggagaacactggccgggtttttgcaccggcgaaaaagtcgctacttacagtgagaacgctaaattcaacctttttgactattttagtaataataattcttcgtctggctacatttttagacctttagtttaaaaaattcaatagaactttaagcttttcaaatgataccaagaaattgcaccacaaaaaagcaagcaaataaatgtaagaataaacaaagaaagcatctctaacgagaaaatgatggctatcaaattccaattggtgagattgtcgaccatttctcaaatataa

SEQ ID NO: 22668 - DNA, 1746 bp, Heterodera glycines
tatgtatagcataaaaataagaaaatcctactcaattgcaaataatcccatttggtaaaataatgattaaataaaattttccattaaataaaattccaattatattgtatttcatatgaaaatcgttgagagattaaattttaaaaaaatccactacatatgtaattgactaattaacaactcgactccacggattgcttatgaatagggcttatatttttaggccctaaaagttgccaaaatcggtcagctttaggctttaaaaaccccgtaaaacaggaataaaaatggaaaataggctctaaaaagcctaattttagggttgtaaaatgacaaaattatattcaaaaagcaacaaaattaagccaaaccagtattgcgggccaggcctttttcgtacggcccttttcctatgagtgtatagaaaaaaatatattctaaaagtattatgctttgagtggaggaaggtcagctttaacgtcggcctcactggcacatgatagcaagggctgcacgaaaattaaaaaaaaaaattgtaacgaaaaggaaactgaaaagggcgaaacgaaaaataaaattttatgaaaaaccgaaaacgaaaactcaaaaagtgccgaaaatgaaggatgaaacgaacatgaataagaaaaaagtgaccaatgaaaagaatttttatctatttaatgttttttaatccttatttaattgttctccaaattgtttctttcatttgaaaaatgaccgtcgattgattttcaatatttttgcaattttctcatcactcattttttgggtttctccttttatttgcaaataaattttcattttttccattttttctttctccgttaatcattgtctactcaatccgaattgtttcttccatttttcaattactcttttgcatactccaattttcttacaaatttcggcataatttttcttccattcttttgccgaatattttcttcctttttgtttgtactcgtttttcattgcaataaatttttgcacaatttcaattttttggtcatccgtttttgatttataacatttgtttttttggagatttaattctttgatccatttataaatgtattggcgatttgtccccaatttttttccaattttccattcaattttgctccattcttttgctgaatattttctccccctttgcttgattttctctttaatttgataatatttttcaataatttctttcattttctgttcattttctttttcttcccatttttctccaaatatttcgtcaaatgttttttgttccgtttttttcttttctgctccaatttcaatttgaacgattaacaatacaataacagagaataataggattcgtttcattgctgaatttttcatttatagaagttcatttaatatgaaagaaataaaaataatattaatattccttaaatgatgatttaatgtttttctcttttaaaacatacaaatttaaagtgaaatattgatagtattactgtttcattaaattgcaaattgaatggtttctctctcaactgatttatttatttatttatcgataaagaaattgccatcagaagggcggggaccactttaataataatataaataaaactaattttccgattaattaaaattctgcagcagcaattcgctaactctgtccaaaatccgcattctttgggggggtgcacggtacggccggcataacaaataaaggtagcattttttaagctagaa

SEQ ID NO: 22669 - DNA, 616 bp, Heterodera glycines
attatttctccctccctcccctccattaagcctccgatttccattttcatttccccggtgctttcattgcctgggaaagtttcgcgcactcccatcgataatgagcaggcgacacattaattaaggccaaggataagccacaaaaaagtgcgagcagttcgtccttcctttctttccctcctccgccgtcctggagagacttctttggaaaagtcgggggagagccctctcttccgattccgtgtccctcgtccaaatgaatgggcctttgttcgcctcctccgctttccgtcctcctctccaatcggccagttcgttgaatgtccatcaggttcgattcgctgtgcttgggctgatcattcattctgatcactttttggtcgtacgatgcgttgaatgtttgtcagccttaagcaaagattgactcggaatgttttccccttttgcctacaaattatgcttaatgtcgaaatgccgttgggttatgcctttctccgattgctccgtttccctttcagctgaactgcaccgcgtccatctcccgctcgggcagtgatgcggaaatcatcgccgacccgtccatcctcggtccgtctttttatttatcagctaccaa

SEQ ID NO: 22670 - DNA, 1219 bp, Heterodera glycines
cgtgttgggtcgaaggacaaaaagtgcaaatttggcgaagtacaaaaagtgcaaaatttgctgtttttgactaaatccactcataacttttctcagacgcaacctaattggacaataagagttctctattagcctgccaaatttcaaaaaattatattaagtttttcaaaagttatgacaattttttggctagaacttttgataaacttaataaaattttttgaaatttggcaagctaatagcgcattcaagggctatcgtatgacaccaagattgtgcaattaaattttttttctttatacattttttcactatctaattatcccccagtctctgaggaggttgaaaaataatcccccatggggtataaaagagcatatacggtatctcgaattcgcaaaacctagctaatttaaattcgaatttacaatgattttagaaaagagtaatttagattttcgactttttttcgagttcgggtctgtgattcgaaattggacaaaatcaatgtcagattcatcttcaccgaacccgaaaacccttggaaacatattttcagtgactttttaaaaaagtttgttgttattagggtttttaggtaatttatgcaatttcttcattctcatatattttattacaaagatggtttgcatcccatgaaatgcgatttgttttgtttaaataattttaacagtttttaatttaattattcttttcttattatgctttcaactttttttttatttaaatttttaaaatttatttaatttatgagtttattaaaatgttatttaatgaaagttcataattttctgaatataaatattgtaattttcttccagagtaatgtaacggtcgtagaaactgtaatcgcaaatgcggctctttcatttcatttttattattttttgtataaatatttaaattcattacggcggtcagcacatttagccggattaataggggaccgctatttaataattggtatagttattatgtttaagaatctgcccgatgaatcgataatttaattaattaaattagattattgtgtttttaattaaatatttattttgtttaaatttatactcttattgttaaattctttgtgtacataggcacaaaaacctgcagcgatacttattgatttatttatatcaatttttgtgtcagctttatatattacatttttgaaagccatgtaataaataaaatatat

SEQ ID NO: 22671 - DNA, 1918 bp, Heterodera glycines
  unsure (1)..(1918): unsure at all n locations
tgcccccccccgcactttcgcattcgtttaatggtaacaaacatagttattttagtattttaatgtaaaaatggtacttaaatttataaaaaaaaaattgctgacatttgctaataatgttacggttttcacatcaattacggataatacggtaaaattggagaaactgaatatttacattacaggctttatcttctgaaggtcgtatcagcaagctttatgtggaatgtttcaacgaacgcgagaagtgtttaacggtcatcggagggggcaaaatggctactgctttagtgcatggattagtttccgctggtagggatttcgtttaaacaagacttaacagacccttaaacacccgaaatatttttttgatgaataaaagtaaataagctgcttatattgtacttttaggttttatcgacaagtccgaagtgaatatctgctcaagatccaaagaaacggcctttcgttggacggtttttaaagactgcgactgactgggaacggtttttaatttcagacacaaggttaccaaaatgcatatacaaatgatgaattttacagcaaagtgaaaaagccacgtggtaacaactttttgcttatttttgaagacttggtcaatttttaggaattgtgattgtcgcagtaaaaccacagatctttcccgggtttctcgacgaactgcgtaaaaatggttggcttaactttgttgggcctgaagtgctttgtgtgtccataatggctgggattgcacttgacacctttaaacagcaggcacccacagttgttggcttacgtataaaccttttttagttgaaattggttggtttcaatggccatgccgcccgttttatgccaaatgtgaattgtctcgtttctgctggtatcgttttggtctgtgccgatgactgtgttccgacggagatggtttagcagaaattgctctagttatcaaattcatgcaatttgtaggtgactctactgctggaaatgggttcaaaattagggtattcagttcgaatcgacgagtcgctttttgacgccgcgtccgcccttgcgagctgtgcacctgcatatgtacggatgtaattcatttgtatattcctcatattcaacagatgttcactgtgattgaggcattgacagacggaggcgtactgaacggcctgagccgagagatgtccgtccgactcgccgctgaaatggtcaaggtatattcattcgttgtccttttttcggcctgggtgacatttgtgtcacgggatttaccatccatgtcatttaagggctcagcgcagctgatgctaaaatcgccggaagtaacttctccagcgcaattgaaggtttcactacttttgaaatagagatttcaattaccaaaatttgcaggacagggtttgttcgcctgctggcactaccattgctggactgcgtgagcttgaacgctctggggtcagatcggcattcattgaagcattaagcgcttccactcgtcgtgccactgaaatggctccgaagacaaactaacaatttttctggttttgatagttttttcgtcaataaataattgtttttgtaactatgcatatgtttttttaatccgtaacttctacttttacaaatatttctttattttctgatttatttttttttaaattttgttggttccgatgagttgcaattccccccattcaaatagccagaaggagcaccaaaaattgctagaaaaagaaccaataaaagagaaaaggagacggagaccgctgactaaaggccttagatcggaactgaggaccttggtctgtcgagggcgtttaacgttttgaattccatccattgtcagttggagaatgccattttggattccgattccgcgcttctttcatcggttttctctcanagatgacacaactctcgg

SEQ ID NO: 22672 - DNA, 1285 bp, Heterodera glycines
aatttatttgacaaatccaaaacttaaaacctgggggaagcaaggggctgtggctgggggcctaaaatttgggccacattgaagaattaattttgatttctgaaaaagtcccagaaataactattttttctttccataccttcttgtagagctcgagctgctctttccaatggtcttatcccggtctcgatccgtgccgaactcacaaagttatggagtgaaatgtgaaatattgttttcaccacaaggcattttttctgaaaaccggattcaaaaatctggggtttggtataaccgttttagaaatagcgtagaaaacagcttcgatatcaagaaaccaagtcaagtccagaaaggaatattttaaaacgatttcgttttgttttggcattatgataccgaataactttcggaaattatggaaacaaaattggagaaattcgaataattttttgactgcaaatttttttccttttttgaattgggttcaaaaaaattttaagagaatttttgattattaatttgaagtcttgaatttatttgacaaatccaagacttaaaactgggagaagcaaggggctgtggctgggggcctaaaatttgggccacattggagaattaattctgatttctgaaaaagtcccagaaataactattttttctttccataccttcttgtagagctcgagctgctctttccaatggtcttatcccggtctcgatccgtgccgaactcacaaagttatggagtgaaatgtgaaatattgttttcaccacaaggcattttttctgaaaaccggattcaaaaatctggggtttggtataaccgttttagaaatagcgtagaaaacagcttcgatatcaagaaaccaagtcaagtccagaaaggaatattttaaaacgatttcgttttgttttggcattatgataccgaataactttcggaaattatggaaacaaaattggagaaattcgaataattttttgactgcaaatttttttccttttttgaattgggttcaaaaaaattttaagagaatttttgattattaatttgaagtcttgaatttatttgacaaatccaagacttaaaactgggagaagcaaggggctgtggctgggggcctaaaatttgggccacattggagaattaattctgatttctgaaaaagtcccagaaataactattttttctttccatacaatggtgtagagctcgagctgctctttccaatggtccctccggaagctcgatccgtgccgaactcacaaagttatggaggaa

SEQ ID NO: 22673 - DNA, 1730 bp, Heterodera glycines
ctctagagtcaaattgggtagagaattccaattattaaacatttaatctctttaaaaacaaaataattctatttccccataaaattcaatgaataatatttcatttttgctgctattctttttgtttgtcgttttcgttgatttcggttagaatatttaaattattattttttgctacattttctgtattttcagctacattgaccataattgccgctggtctgtttctctgcgtgccaaatgatggaagtcagccaaatccagctgaaaatgctgcgaccccttttgattgccatttacgtatgtattttcatccgtttcccattgtttaggcatttgtccgtgccaccgccacttcttccgcctgcttcaaaaggccatttttggcaaccatgtctgttttaacaaatatgaatataaataagctttttagtctatattttgggctttttaagtccatatttggcgttttttagtccatataatttataaccctatttataagttataaaaattaatgtcaaaataagttggtggacgagcacaaccatcggatcatccctcgtcgtcatcacccaaacattcgtcttcttctcattcttcttctgaggatgaagcaaagatggcttcatcatcacttcctcctcatcatcatccccattcatcctccgactcggaaaaggaaggaaaaaacccaaaaaatgatgatgaatttgaagtggtcgtggaatatgtgccgaataaacattgaaacaaatacacaattccggtgaaacggacggacactttggcaacattgaaggacaaaatccgggagaagtacaccgaggattacaatcagtacggatttggcacaattgaactggtcaaagagttcaaaacggatgaacgtgagccatttgtaatgagagatgatgttgagctttggcacgaggatttggacgagtacaaaaccatggagcaatgtggcattagaaaagggtcaacggtttccgtgttttatgctcgtcgactggacaaagaagaatatgatcaaggattttacatccgtccttggccgacaccgaaaaagatttgcttttaatgcttttcctattgcatagtttttcttcaatagcactgaaaattccgaaaaatgcattctttaggttttcaaaaaaggcaatgacgaaaaaaactcgaaaaactaaataatttcttggtataaattgtgaaaataaaatgaaaattttaaacgttttttgcttctgtcactcaaatcactgtcattctatacagtattttttcttcatttctaattgctttttcattttatataatttctttttgtttctatttgaataaaaaactgtcattgttcaaaacttacacaatatttaaattcaaatacataaaattaggatgggctttttagctacataacgtattctgaagtatgtgcttaaattattgctaaatataaatatggacgtgctttttaaaaggcgcattcttttttataactcgtaaaatatcatttttgcttttggcattcttttggcattctgtttaaattcatttcaatttttatagtttcagaccgaaacgggccagttgcgtctgagccaagtttagacctccataacttttttctttgttgaccaaatccaacaatgttggtatcattagaaagctcttaacaagctctatcggccatccaaaaattacaaagacataccgacatgtaaaac

SEQ ID NO: 22674 - DNA, 1197 bp, Heterodera glycines
atgtggcgataaataggacaaacgtccgcggaatttttgccattgtcggcacttaaccagaccggcccatatctgtttcgtttgttctcggacagccagtactgcgacttgagcaaaacatacatgtattttctcagctctattgagcgcaaaaatgccgcaggtgaatgggttccgaccagcgatgctgagccggaggataagcgagtgggtgtaattcaaaactttggcagcagttttgtccgctcactgaaaatcaacatttcgggtatagaagtgttcgacagctccatttactatcattatcgtgactacataatgaaggaactgggccactcccatgaaattcgcaaatctttccatgagtcggcgtgctattacacagatgaggatgatggccaagatagtgccaccaatgagggcttcatcgcccgtgcagcgcgattctctaacggaaagcaatgcgaaacgatggtgaggctgaactttgatcttgcacatcagagtgcattgatgctgaacaaccaagacgtgatattcactattcatcgtaacagcgattctttccttctgcttacgccccccgggaagaaagcggacggaacattgcaggaaaacagcaaagaataccgtattcgcgtgcacgatctgcgtctgtatgttcgcacggtggatgttacacctagccttaacctggcaatcagtcgtcagttggagtcaacctcggccaaatacccgctgcgtaaaattgagatgcgctccattttcctgggcaaaggcaggactgagttggctcacaacgtgttcacttcaactttgccccgtcgtctgatttgctgctttgtctctacagacgcttattctggccggttgtcacccttcaaatttgaacatgcaaatgttcgagcgataagtgcggaggcaaacggacaatcttttcccagcactccatacctgttgtcgtttgatggtgcacagcaacgttttgttcgtgcttttgtcgacatgtacgccggtcttggtctggatgactcagacacaaaaacagtgtccattgggatgcaacgcttcctcggcggatgggccttcttcgtaatcccgatgacctccacgctggatgatacgcccggctttgagttgatccgtcagggcacgtgtacgcttaaggtccaatttgaaaagcctataaaagaggac

SEQ ID NO: 22675 - DNA, 1322 bp, Heterodera glycines
aaaaatcaggatatgttaatctttcatatttcttctctcttttcaggacgattcgaaaaatcaggatatgttcttctttcatattgcctttctccaattcaggacttcttaaaaaatcaggataagttaatctttcattttgcctttctcaaattcaggacgattcgaaaaatcaggatatgttaatctttcatattgcctttctccaattcaggacttcttaaaaaatcaggatagttaatctttcattttgcctttctcaaattcaggacgattcgaaaaatcaggatatgttaatatttcattttgcctttctcaaattcaggacgattcgaaaaatcaggatatgttaatctttcatattgcctttctccaattcaggacgattcgaaaaatcaggatatgttaatctttcatattgcctttctccaattcaggactttcttaaaaaatcaggataagttaatctttcattttgcctttctcaaattcaggacgattcgaaaaatcaggataagttaatctttcatattgcctttctccaattcaggactttcttaaaaaatcaggataagttaatctttcattttgcctttctcaaattcaggacgattcgaaaaatcaggatatgttaatttttcatattgcctttctccaattcaggactttcttaaaaaatcaggataagttaatctttcattttgcctttctcaaattcaggacgattcgaaaaatcaggataagttaatctttcatattgcctttctccaattcaggactttcttaaaaaatcaggataagttaatctttcatattgcctttctccaattcaggacgttcttaaaaaatcaggataagttaatctttcattttgcctttctcaaattcaggacgattcgaaaaatcaggatatgttaatctttcatattgcctttctccaattcatgtagttggaagacaatcatgctcatttcatctgttatgtggatggtatccattcacatagctggtggtatgtggatggtttgacaccgtacccataccatagtgcagggggatggacacataagaaaattaaaactacttaccagactgcacgtctttgcctgcattcttaggcggcgccaacacttgggccaaagttttcttcttagccttttgcgtgggcccttaaaggagttattgttaaggggatgcagatcatcctttagtcattgttttaccggactgaacgtctgtgccagcttcttcctgcaagtcttcgtcgtcgtcttcctccatttcttcttcctgaacgtctccgtcgttgtgctcatcctctt

SEQ ID NO: 22676 - DNA, 1489 bp, Heterodera glycines
gttgcgcaaaatgacctgcttgccaatgtcctctcccagcgaatgtttaatctgaaatcaacggggctaattcactgaataaaaaaataaatgttggccatttttaaccatttcacctcaattgcctggcaaacgattcgaagtgtcagctgacggaaaaactcggattgactgatgcgtttgtggaagaactccgaattgaccagcacatcgacctgacaacaataagaaatttttatttatttttataaaaaaaattatttttcccgaccgtcgattgtgagaaagcgaatgaccggccacaacttgtgacaaacggtttccacacgccgaacgcattggcaatgccaatcagtgtaatgggtgataattattcccttggctaatacgaatggcgcggatggacagaagttctattgactaataatttcggccccatcgcttcgattttccattgccaattcgaccaatgcgttaggtgtgcggcttcaaggccaattgtccaacatgtgtttgtttgtccaaccaacttttgccaccgcttcgccgctgcggtcctccgccgatcggtccaattcgcccacacaaattggaatgcgaaaagcatccgggtcctcttccaccatttgtgccactttgtcctcgtccaattcggcgtgccgatggggcggcggcagctcagtgcaatgggccaaattgatgaagaatttggaggtggaggggccggagacggacgaagcggcggagaaatgggcctaaatgcgacttttcagtgatagtgtaagactcggagttgcgctaatatcggatgcccgaaaccagcacgtttttgtattgtcaaattcattatgttttcgggcccggggttttgtgagacgacccgcaaaagcagggcgtgctgttgcccccccccttccccaccgtcacctctttgaatttgatgcaaatgcccgccgtcggataaactgtccacgtgtcctcctccgtctcatcacttcgtctttccacaattaacggcactctgctgccggtgggcattttaaaaccaatttggtatttaatgcaaaaatgaaacaaaacaaaaagtattttggaaaatgtcgaagaaaagcattgataatttaaggaaaaattcgaaagaatatttatatttatgcaaatggccaacccaaaaaatgaccaaaacaaaggaaaggcataaaagaccgtcaaataacaaaataatacaaaaataaataaataacaatggcagaaaagaggccaaacaaataaatggggggagagtgtcaaaaaatggcgagcagtgcaaacaccgaatagagcaaagtgcagggataggcgacgagcagccgctgacctaaacaaaacacgaaaatttcggctataaaaaacaacggaaaacgaatttgccactttattagaaaaagcgaattttcaaaaaggggacagtagaagaaaaacaacggtttaaacaatttgtaaaagctat

SEQ ID NO: 22677 - DNA, 1731 bp, Heterodera glycines
aaatgattttttggggaaagggggaaaaaagagacggacgggacatttaatgagagaacggcgcccaacagagagagcagagacatgggcagcagacagtagccgagcacagaagcggtgcaagtgaaagagatggagttgtgttgggaggccatcagattgagcagggcgtacatgccgacacagccgcacagaccgatgccgtaaatgtggccgaaatggacccaaaatgggggaaatggtgtaaaacagggggagggaggggattacgaagaaacaaaaacttaaatccaaattgaaagggcccaaaagttcggatgccaaaacgttcgcccccctcacttttccatgcagcaaaagagaggcgccgaagagcaaacagaagacgaggggaccggccaagtcttggtcggcgatcacctcaacaaatagagggcattaaaaacaatgaatttggagggaaagagacaaaggcaaaaaatggcacaaaatttccaacttcggccgatgcgatgcccaacggattgagcacagccatcgttttgagccaaatgtgctggaaattgacgcccaattcctccaacagaggcggctcattggcaatgtcgtcgaattcgctgtcgaatcctttggctaaaacaaagggaaatttactggagggggggggggcaatctaagggcaaaaaatgcctgtttttatgaatatgatcacggcttaaatttagagtaacaatattaaagtagaaatacgagccaacattatgtacatattaacaaaaaaagcgctgaatcacaattttgagcgcttaaatttaattgaacattaaaaaatattttacagaaatttaattttataaataaaagtgaaaagcacaccttcttgggagggcatcgacgggatgaacaagttcggctgctgctgttgagcagcgaagtaattcgggtaaaacggttgttggtttggcggggagggcgcattttgcgggtcaatttgcccattgaaaaagccttaatttacaatttccattagtttcgagttttggcatattcttccgctctgtttttccattgtgccttttcccctcttcgcactttgctgttgcgttcccccaaattccgtggcccccgccgtttcgccggtcgtcgcggcgtttcctccgctgtaccaaatgtcttgcggctgctgtgggctttgaaagggagaagcggtgccctttctgttgctgactttgttgtcataaaaataggcgtaagggtcggtcattggcagaaaattaaaagggcaaagttttttccttttttgccacaacgttaataaagcttttcctcgcggaataaggactcaaagtttaaaagaaacaattgaacataaccccatatttaattttcgcgttattttaaaatctaatcaatttctttttgatttcttattttgataactagcggggtcagcgccttcggcgcatcccccgctaggcagtacgattgtgttatagaattatgaatgataaaatcgactggctcggccgcttcgcgccctcgcatcattttcttggcttttctccaatctctgggactcaacccaccagcaattcaatctctgggactcaattctccggcattccaaacactgggactcaaatctccggcattcaatgacattccaatcactgaaactaaacccaccagcaattcaatctctgggactcaattctccggcattccaaacac

SEQ ID NO: 22678 - DNA, 1402 bp, Heterodera glycines
  unsure (1)..(1402): unsure at all n locations
ttgatttantttggacgcatttatttttctttgcctccaagaatgattcttccaataaattttttctaataattccttattttaacatttatttcttatatttgtcatttttaccccaattttaaaaatttttctccattttcgtgccaaggcttttctttgccattttatggacagtgcagcgacaacccctcaccatcagtcgtttggtggcggcacggcgccgacgagggcatcgacgggcggcggcattggcactgtttcacttggcaccgtcacgtacatttgcggcggtgggttttgcccgatttgtttgatggtattcatttgcttcccgcgcattgcacagattgccacaaggaaaacgaaatccggcccaaagacccgatccgttgccgggagtgtggttaccgtattctgtacaagaagcgcagccgcaaaatgatggtgtacgatgctcgataaagaaattcccaaattggccattgttatttggtttgtgtcactgaatattgtttaagaaagaaaaaaaaccaattcgccctctaatttgagcaatttagcggttttaagtaggaccagcgggagttttacgggattcccgttcccggaaaagtttggacacccgctcccataaattattttttatagaacggagggagggaagtgaatttgggttcttttggaagctcagggaaggggcttaatttgtgtgaagacaatttttcaatttattcattttttgggttttctatgacattttgtttagcgaaacttgcgcgccagcaggacaatcaatgtatttgtgtgaaaattaattaaacaaaattttaacttgaatacagtgtacaatatgtacctaatttcaatgcaatattacatcaaaaaaacatggtaagaatagaagatcatagccatttcatgaattttttgtacatcctcccgacttcccacaaatcattgagaagcgtgcagtcgtttgacctcctcgagcagtgtgatcagatgcacactctccgccttccacctgttgtacatctccaactcgttgtcgttccattttttgattggaccgacctacgagaatcaaaatattgaacatttggcaggacaaaactcccagtgtcataaatcggatttaaatattaaatttcaagaaaaattaggctattttttaaaagccgtcgttttattaactcccaaactttctgtttaccattttctcgcgcctttccttcaacaaattggtgagcattgagctaacatggaacaagtggacggagggcagtccgttttgggcagttaaatgaacaccgaacagtccgacggggcacgagctaatgaaaagagcgggagatggacaagagaattattgggtgggcaatgcatgagaaaatcaaag

SEQ ID NO: 22679 - DNA, 2170 bp, Heterodera glycines
aatttcaaaaattcctggcattctaattcaagctgttgtgactgtgttccatcgcggcttccatggcgatttgaatgaaacttttctggtcggtgatgcggtcagtgaggagaacttgaagctgatctcggttggttttccaccattggaccaaatcaaaccgaaaattttattacgcttttttaattaaatttggtttttgggactagaatttgtgttttaaaaattggtaaacaaaatgagtaaatctccaattactagaaccaacaaaattttacaataaatttttttaatcttgaaaaaaaattttcttaactctacgtaatttttttttcctcactaattttcgggggtgggaaaaagcacgctgacgtttattttaaaaaattccgagaaaaaatggcacattttttgaaaatttaaacaattttctcacaaattgcattaaaatttctagaaacatttttccctggtgaaacctaatgacatcgacggatcttcattcacccattttgccatttttttttgaaaatttggccccaaaatgacaaaaaaaaaaaaaaaaaattatttttggcggaaaaggccactaattcgcaattttctccccgtcgtcgaaaatgttaaaataacactgaaaaaaacgcatcttccactcattgtcaggtcacctacgaatgtctgcgacaggccattgacattgtgcggcccggtgtcaaattccgtgacattggcaacgtgattcaaaagcatgcaaacgcaaacgggttctccgtggtcaagcgctattgtggttgtcaaaaaaaaattttttttttttgaaatttaacgattggatgaagagaatgggtccgacattgctgaaaaattttatgaattctactcaaaacgtcgtcggaaaacaaaatacaaattctttaaaaaattttcttaaagaaatttccagaaaaggctaaaaaatttttaatttttttaaaaatactgttcaaaatttcaaaaatttgtccattatctgggatttttcatgttccaactagtgaaacaaagttttttcgttttttagggccatggcatccaccggctgttccacacggcaccgaatgtgccgcactatgccaaaaacaaaaacgtaggcgtgatgcaggccggtaacgcgttcaccattgagccgatgatcaacgccgggtcttacggtcggttaaatttcatggctcggaattcgggacgagtcaaatatctggactcggacgcccccccacactttttcccttttttctagaaatttttaacaaaaaataaattgcattcaatttccttaaagacgatgaccaatggccggacggatggactgcggtgacaaaggatggacgtaagaaaatgaatttttattatatatattttttgcggggttacaatttttccccaaaaattcaaaatgctttcgcgttacttaatttcggataaaaatgtaaaaatttttcgataaatccaaaaaaaaaaaattttccccaggcgcttcggctcaatttgagcacacactgctggtcaccgagacgggctgtgatgtgttgacagaacggtcagtggctggcgctcctcggccatggttccgagaccagcttgaacaattgggttacaacagaaaaaagcggcagcagtagtgccactacgaatgcggatgttgttgttggaaactgattaattttttgtgtgtatgttttggctgataattcacaaaatttagcctttgatgattgaatgtattatctatcctttcttccattacatacgtacccccatatatttttggaaattcagcagttaaacgagaggattaaaatttgttttacttctcaaaaattaataatattccaagttgaagcaaaacatttgcaatgactaaagacaaatagggtgaactatagtgaacgccccgtgaaaaaatgggtcaaatgatataccaatttttttggtacttaagtgtccagtttcactgggactcagttgtcccacactaagattgcgttggttcgacttaattccttgtcttgtcttttagacttagctcatcaagagctttcgaatgataccaaatttggccattttaaagagtcaggagccccccttttcactcatttttcgagttttgaaccggttcaaaaaccggttt

SEQ ID NO: 22680 - DNA, 1965 bp, Heterodera glycines
gggccaagatgagaaggaaaagaaaaagggaattggacaagcagcaaagcacgggcgagggggactcggtgtcgacaagtacagactcagagaagaaggaggacagtgaccaaacgattacgaaatcaccacaaagcgaaacatcagaaaagtcagagatggtggccgaggatggtaacatttatttgtaacagatttagggcagaaaatcagttttaaattcaacgaacaaaagttgaaacacatttacacaccgtccgaaaaaacgagatgtgtaccaataaatagagtgccagagaaaaacattatctttttttctctaattttttgtctccttttggcgtactatctaatatttttattactaggtcgttgcataaaaaagggcgctttttgaaggaaaaaaatttatgaacaaaaaatgaaaaataacaatcataacaaagccgatcaaaaagctacttaacaaagtaattgccctgactgtctacaaccttttgccgccgagatgggagtttaacaatgccctttttgtaaaattctgtgccattctttgaacctaggtaattttcactggatccacgaccttgccatattctttaaagagcctaccctataaggaatttttgagagaaataatttagccataaattaagtctatagggtccagggaataagacgggtgacgtagcatgtcctataagttgttctcctgtcagccatgggccaatgaaatttggtgccaaaattagggacttggccataaccagaaaattgagtgtaactttattaaaagtgtaacaaattctaataaatttaatatcatctgatgcagaataacgagatgaattgaatggcgtcaattttaatgcactcaaacaatttttaaaaaagttatggccaaaaaatcccaaattttcccacttgaaaaatggccaaaaaaggctttagggaagttgtttaaaattttaaaaaaggatttaaaacaaggatttcctacggataaactatgctggaataattttgcatgtgttcaaaaaatataagaaaaatcctttgtccaaagacaagtgttttctccttggccttcgttttcagaaattcgaataatcgcccataacacaattttggaaacttgtgcgattctgtaattttttatattatttaagggcataaaaagcctcaaaaccccgatggaattattttggattttgtttttgactttcggtttggccaatagatttggaaacttggccaaaataaacatggccaaaaaattttgttttttctttttcagaaaaatttctttcaggctttttcttgttaagctcatcaaatttcataatctgaccaagttttaagtcgttttgacaattttaactcaagttatggacgttggtgtaaaatggtagccaaattttgttgaccttacccaattttttggactgtaactttagatataaaaggacaaaatcaaaatttttggcaaaaacatgacgagaacattcagataaaagaattacacacaaaaaagacataacaaacgttaatcaagtcttaaaaaaagtcattttgaaaaagcgcccttttttatgcaacgacctagtaaataaaatttaattttcaccgtagatggatttggcgtcaattgttgtttttcctgggcttggttcttaaaatgaagaattaaatcaacattatgtcatttgactccaaaatgttaaaatccgtttttgatttttcacacaaatgactttatttatgtatgccaattgtttttgtttatccctttaatttaaataataattatttcgtttttattgaaaattccaaaattttaccatcgatggatttggggtcaattgttttgtctgggaatgattctaaataaaaataagaattcattttttcaaatttaaaatggaaaaatcacctcaaatggatttggagtgaatcgtccaaccg

SEQ ID NO: 22681 - DNA, 1050 bp, Heterodera glycines
tctgactttataagataaatgggaatttaagcgaaggcttcctgcgaaataataatctatagaaattctctaaaaagtagctcctcgcagattcggggaccgtttctataaagctagagacatatgcgctaaccataaaaaagatgaatcattttttgaaaaatttatatagttcgactaaatttgcaaatcgatttatggtgtacaggatgtttgtcgaaacataactcgtcaggcctttaagatagacctgccattgctattcctgcaaatatggagtctagtcagcccaatcgattgctattcgaatggtttggggtcgttggcccaaacaaaagttgtgctgcttcttgcaaagaagacttagccaactgtaaacagcaagccatccaaatgcttcaatgtaaaaaaaaattacatttggatgcaacctttatttttcctcgcctctcttttcgaaaagaaaagctattagcaagcgtgtttggaccaattctaaaacaaatcggggtaattaatttaatctgactttataagataaatgggaatttaagcgaaggattcatgcaaaataataatctatagaaattctctaaaaagtagttcctcgcagattcggggaccgtttctataaagctagagacatatgcgctaaccataaaaaagatgaatcattttttgaaaaatttatatagttcgactaaatttgcaaatcgatttatggtgtacaggatgtttgtcgaaacataactcgtcaggcctttaagatcgacctgccattgctattcctgcaaatatggagtctagtcagcccaatcgattgctattcgaatggtttggggtcgttggcccaaacaaaagttgtgctgcttcttgcaaagaagactaagccaactgtaaacagcaagccatccaaatgcttcaatgtaaaaaaaaattacatttggatgcaacctttatttttcctcgcctctcttttcgaaaagaaagctattagcaagcgtatttggaccaatctaaaacaaatcggggtaattatttaatctgact

SEQ ID NO: 22682 - DNA, 1547 bp, Heterodera glycines
  unsure (1)..(1547): unsure at all n locations
gttttttaattttatgattttttaacgatttttccccttgaaacgaagaccacttccaaaacatagtttttcgagctctatcgattggtaatttttttgaaaaaaattcggtttttttccggaaatagaaaaaatttttggcctgagcgggacatttgagtcccgggcctataactcggcaggagttaagtttatcgaaaaattgtcttagaacatttttgtagagcattttaaatgctatcgaatggtgtactacatgatgtaaaattttcaaaaattttcgagctaggccccctagaaattttcaaaaatttttttggggtcgaaaaagggtgtgaaaaatatttttctggggtaaaataaggtgctgagtacgaatatgatgtctattttaagtttcagaattttgggaattttttaaaaattctttattttttggcaattttttggccctcgggattttggcctaatatttgaaaattcataactaacctcagggtaagtcaattttcatacagcaaagctttaaaaatagagaaaaatcaggagaattttatgggatttatttaggttttctaacatcaatatgaaaaaagttattccagaaattctggaaattttagatttttcagaaaaaaattcgtaactgccttctgaaaagctatttgagaaaagtaaaatactacaaaaatccgcaatttttttctctataatataaattttattttaaatttttatcacatttttaaaaaaagatataaaaataaaagtgattttgtgattcgggtccaaaggggggagcacatggtttttgagtggaaaaatttttctcacaaaaatcttccaaaaatatgtctttaggggttatttgggccgctgatcacgaatacgtgatcagattttacttttgacatcgtcaagacctcagaatccctgtgtgattggggattctgaggcatcattttgaggggggggggcaggttcgaatccggacggtgtaacattatttttttgtgcatttttacgttattttcaatgaatttaatttatttaaaatattttgttgagttaataaataaaaaattatatttaatttaatttttttttgataaataaattttataagtttaaattaattatttttttaattgatagaatttcatgtatttttttaattaaatttgttaaaaatattttcttttagatttaatgaatttactaatcactgttgtatcaatttatatttaaagatttgttgtaaattaataataaaagaatttatgtaaaaaataataattatcttataataaagaatttcatattttttttaattgaatttataaaattaatctcattttaatttaaatattcaattattgtacatttcaaaattctctttttattaataaaaggaatgtcgtaatttattttttagaatatataataaattcgattcaactttgtaagtattttaatcaatcgcacatgtacctcttctaatcaagaggtacctcttctancaatttagtacctattcgtgatcacag

SEQ ID NO: 22683 - DNA, 1212 bp, Heterodera glycines
  unsure (1)..(1212): unsure at all n locations
aaaaaataattatgatttattttgcaaaaaatnggaaaagtacgcaaaattgcaatgtctaaaattttaagaaaacattatgggacagttaaataattatatgaataagcattattctcagctgttaccctgcaaaacctggtgcgcttctgagcactactcgaaaaatgagtaaattaattttcactaaaaagttaagcctaaactttttggcctgtttaaagaggaattaaaaattttaaaaaattttattcatcttcctttttgatagaaaaagcatcagagagccttatttaacatgtaaatagaatttggtgcgtttaagagcactttctgaaaaaataattatgaattaattttgcaaaaaataaataaattgtgaacctttaaaaattcataggaaatttaaattcataggtactactgctaaatcaacgcagagacgcctttccttgacctttttaggctcctgcaaaacctggtgcacttctgatcactactcgaaaaatgagtaaattaattttcactaaaaagttaagcctaaactttttggcctgtttaaagaggaattaaaaattttttaaaatttattcatctccctttttgatagaaaaagcatcagagtgcctaaaatagcttgtaaataaaatttggtgcgtttcagagcactttctgaaaaaataattatgaattaattttgcaaaaaataataaataattaaataaaaacgaaagactctgattttcgaaaaaatttttaaacccagctagctcggcgctcatttcagtgtaagttagtcctttaccggggagtttccctgcaaagtttggtgcgcttctgatcagtttctgaaaaaaaaagttaagcctaaactttttggcctgtttaaaaaggaattaaaaatttttaaaaatttattcatctccctttttgatagaaaaagcatcagagtgcctaaaatagcttgtaaataaaatttggtgcgtttcagagcactttctgaaaaaaataattatgaattaattttgcaaaaaattggaaaagtacgcaaaattgcaatgtctaaaatttttaaagaaacattatgggacagttaaataattatatgaataagcattattctcagctgttacgctgcaaaacctggtgcgcttctgagcactactcgaaaggagagtaaattaattttcactaaaaagttaagcctaaact

SEQ ID NO: 22684 - DNA, 2416 bp, Heterodera glycines
  unsure (1)..(2416): unsure at all n locations
tcattatatcataatatgatgcatcaatcatattaatataataaaaatatattatatctaatacaacaataaaataatttgtttaggaaaaagtaaaacggattaactgattaaatttttttaaatggtattttctggtatttatttgtaaattatcgttaatattcaaaatcttctgattaatctttttaaccattcattagtcatcactcttctgttattatgtcaaacagttctaactctttattttattctttccactatagaatatgtcaaatttatgatcagatcaaattaggtgtcaaaataaatgttattttagtaaccagcgaccatggaaatcctaattgaatctttaatttctgaaaatgattttttaatttcttttatttttgaattatttatttttcccacaacttttggtcgctatttttcttaatcttcattggtctgatcggggtcgtttgtcgcaaaattgttggtgatctggaaccccgaccgaggcgatcacggagataagagtaataccactcctcaattatttgttcctattatttactccttaaaaatagggttggtcggaaccgggaatttgaggtaaaccgggactttttggctggaaaaaccggcaaaacccgggaatttcccggtcaaaactgtcaaaaccgggacttcggtactcagttgtccgtgttttggtcccgggcccgaccaaccctacttaagaactttggcatgctactactctcattagtaagtatactcagtccgcaaatgtccatccgcaaatgtccgtccgcaaatgtccgtccacaaatgtccgtccgcaaatgtccgtccgcaaatgtccgtccgcaaatgtccgtccgcaaatgtccgtccgcaaatgtccgtacgcaaatgtccgtccgcaaatgtccgtccgccaatgtccgtccgcatatgtccgtccgcaaatgtccgtccgcaaatgtccgtccgcaaatgtccgtccgcaaatgtccgtccgcaaatgtccgtccgcaaatgtccgtccgcaaatgtccgtccgcaaatgtccgtccgcaaatgtccgtccgcaaatgtccgtccgcaaatgtccgtccgcaaatgtccgtccgcaaatgtccgtccgcaaatgtcccactgcgattcttaggggtatatttttccttattattgcatttaaaattttctaactagcgtttttagtttaatcgataagactttcacaaaaattgttcaatttttaaagcaattaattacccattcattaattttataaatacttacttatacatttaatttgtttcaaaaatgttgtcattgttttataacgtaaatgtataataaattttttcgtttttttgtttagtgaaaattccaaaaaaagggaaattattatttatttatatgaaattaagacccgtaaataaaaaataaattttataaatatatttttcttgtctcttgaataaaattttttaaccgaataaaatattgcttttattttcccattttttacaaatagtttagcattgttctttctttccattctttgaatcttctttcttttattcgatcagaaccatttgacaaatcctgcttaaaagtgaaaaatatttttatattccgtgtccgacgacaattcggagatttattttagaaagtcatgccccccttaaaagttttttttaaataaaataaattttatattttaatttatgaattgaacaaaatattttccattcattcttaatgacaaaaaaagttagttttaattgttcgttcgttctgtctttacattcccccttttcttcttcctttaatccaatcagaaccacttgacaaattcggaaaaatgaaatgattaatgagtcattgctacagtattttttcattaatgatccaacaatacagcaatttttctaacttttatctttgcgttaagccgtggaaaagcttaattaagcgcttctgtgcatttgatatatgcaattcattgccttatattactgcaaaataaataatatattacagattctcttttttaagatggcgcttatacaaatttattaacctgattcagttactgtttttattactgaatttacttcaacggaaagaatggcggcaattaacacggcaaaatgatgcagccgatgctaagcggcgtgttcaagccggtcgctccgctgataacaatcacaacagggggtctggattttgcgattttgataatataatttttanaaaaatgtttttttcaacaagtaccaacattttggataggcctaggcctagtttcaatgtttgacctgagaaaaacccangtctgcgcccaggtcgacctagtccttcacctacccctggataaaacggtcgggcacgttgttgcaaaggtcgtcgctgcagc

SEQ ID NO: 22685 - DNA, 1025 bp, Heterodera glycines
aaattttcaaaatttttcgagttaggcctaaaattcggtttttcggtttttgaattttatgattttttaacgatttttccagggaaaacgaagaccacttccaaaacatcgttttttgagctctatcgattagtgatgtttttagaaatttttcgattttttccaggaaatagaaaaattttttggcctaagcgggacatttgagtcccgggcccataactcgtcgggggttggttctagccaaaaattgccctagggcaaaattgtagagcttttaaagttctatcgaatggtgtactaaatgttcggaaattttcaaaaattttcgagctaggccccctagaaatttttgaaaattttttttgggttgaaaaggggggtgaaaaatttttttctgtggtattttgagatgctgattacgaatatgacctttgtttttcgtttcataatttttagaattttttaaaaattcgaaatttttttcaatttttttgaccctcgggattttggggtaaattttgaaaattcatatctagcctaagggttgaccaattttacaggaataaagccttaaaaatagagaaaaatcaggagaattttatgggttttattaggattttctagcataaatatgaaaaaagttattccagaaattctggaaaaattcgaatttccataaaaaaattcagaactcggttctgaaaagctatttgagaaaagtaaaatactacaaaaatgcgcaatttttttctctataatataaattttattttacatttttatcacattttaaaaagatataaaaataaaagtgattttgtgcttcgggtccaaaggggggatgcacatggtttttgagtgaaaaaattttttcgacaaaaatcttccaaaaatatgtctttaggggttattttggccgctgatcatgaatacgtaatcagtttttacttttgacatcgtttagacctcagaatccctatgtgattggggattctgaggcatcattttttggggggggggggggg

SEQ ID NO: 22686 - DNA, 2264 bp, Heterodera glycines
  unsure (1)..(2264): unsure at all n locations
aaaagcaaaaatatntgccaagtcattaaggatatacataatnttcanaatcaaaaattatcgtcaagaaaataaaataaataaattttggagataaatttttgagaaatttttcatttcttaggggcgcatttttgaaaattttctggtcgattcttagggatgtattttttgaaaaaatttttgggtcggttcttaggggtgtatttttcttttttattgcatttttgttaacaaattttgggcaaaacgccaaaataggtgaaaataagtttttttaaatttttttaggttttttaggtgctaaaaataaaaacctagaaaataggtgctaataactcgaaaagtagcttaacaacagcccaaaaaaacatgtttttcgtgcgtttcaggccacggggagctcaggaaaaaaatatgtaaaaacctaaaaatcgaagccctattaattacaattataattttaaaaatgaattttgataaatctgggcaggccatttgagcgcagccattagggcgcggggaagtaaaaacggggtccggacaatccgtcagtggacaatccgtcagcaaattgcttttttgagcaatgatcaaaaccttgcaaaaatgattgttaaattaaataaatataattttttataggttcttaacatttctagttactttatatttcaattaattgaccatctcgaaaaattcatttaatcttttaaaaatgattatttcataattttttaatcaaattattaattcagattttttaaaaaccgggttatattactgtaaatattcattcatttacagttggcgatgttgtactgattttgcggttcaatatcactgacaattcaatacagtgtttccacagtttgcatatggtagccgtttataaacatttatttgacaaagtttgattcaaggattgtgtccttgaggccaaggacggctctgtttttggacataaaagcaagaaaaatggaaaaattcctttttttatgatcatttcttgaatgaagggccaattcatcggggtacagcagcactacgtttacccctccggaaaatttttttttcagaaatttacaaaaagagaatttttttgttaataaaattaaaaaaaaaattttttttaacattttttaaaaacgtaataaatttactttatcatttttgaaaaaatgtataatttttgctgcggttttaaaaaaaaaaggttatatggccttatggccaaacaattttttttaatttcataccatatgtttttcccccgaaaccccaaatttttgtcccaggaaaatgccaatgtgacatgtcaacatgccgaatttaccgagcatgggctgaagcaaaatgatcggcgtatgttgcaaatttttgctgaatatgatggcttctacggtgcttttgatggagaagaccgtgtgcaaaaatttgcccatcattacacaccggccaaccaaagcgttgccaaaatgtcaatcccaccatgggccattgaccatgtccaagtaaaaattgtgtccgtgccgttcaaaaattaaaaaaaaataataaatttgtggggcggagtcgttatttaaaaaaccatcaatatgatttgatgaaaaactatttataactttgctaaaagcaaccaaataatttttaactcttgatgtattagatagccctacgtattctctatcagtctacaaaatttcaaaccgaataggtccggtcccgatttagcctaaaattcccggccccgctctactcttaataaatctgttaaattggggtaaaaatttcaaaagctatttttatctgtttaaatttcgatttattttttccgtcggttcccaaaaattaaaaaaagacgccgcaaaaaatggcgtaaaaagtcaaacactgaacttttaatatgaaaaattaattttttacaaatatacaaaaattttcaaaaaggcgccgctcgtcggcctcatcttttcccaaaataaagaaaattaatttaaatagaaaattttaatacaatgaaaagaaaaattttttcattaacaaaagattcgcattaaaactaacctaaaataagttaataatatttgactacttaataaacattaatccccattataaaataaaatttgagacagataaaagcttaaacaataaaataagtttataaaaaaagaaattgaaacgtaatgtaaatatgtattaaattaagaaaatttccaagtttttaaaaataaattaaaaaatatgatttttagttcatc

SEQ ID NO: 22687 - DNA, 2362 bp, Heterodera glycines
ggacttgaactattattaagtacagttaaaaatctttcaaatgaatgcccttgggacatatggaaaatgaaaccaatacaatgggcgccacaagttgagagtaaaggagattggaatgggcaagcgtttttccttattccctccggaaatttacacaaaaatgatgttgtaatcgctgatggaacgggttgggcaaggctatcaaaatagagcactggtgcatccacccccttcgcatagatagcgcaccaatgagatccctccttgtggtgggggtcacggttcacaacaagcgctgccgggtactgtagtgtggatggaggcggcaaattgtcactggcgaagcagccccgaaacactcgcccggtccgacgattttcgcccaaaatctttgtgatttgtaagctgtccatttttcagccaaaaaattgagcagagttggtgtagtaccaggctgatgatgagcattaaatagagagcaaagagggcccagcaaacagcttgatgaaaaaagctgctttcctctggtatgtccttgcacatttgaataagcggtggaagaacaccagaaacatgctcatcaattaacttgtcgctctttggaggtgttttagctgttgttgcggttgttgttgtttttgtgctcgggaaggttgtggtacgtttgaataaagacaatcttcttaaatattcagtgtaggaatattcaggctcgtgttgttgtcgagtcaaagtcagattttttagataagcagaataggtattttccggttgtctttgttgttgttgttgttctcgcagtgttgaagaaaccaagggaagggaaattcggagaaagaacaaaataagacccagtctttttgaatacataatttatttatgagacggcaaaatgaaatgacaaacggtttaaatagtggtatctgtgcttattgatcggtttttgtccaacattacaagggaatcgcattctcccatcaccactagcattattcctccgacgggtactggttgattgaatttgatgctaaccgctgtggtcccattctttatcaaatcaaacagtgccgcttgatcatccccgctgttggtcaaattgaacacataaatgcaatgagtttttccgtattgagcaaaagtaatcccgttgctctctgttgagttggcgaaacccaccgcttcgttcatgtcattgaatgggcgaacatattttccatttctgtaatccaaatcatagggcgcttgggggtacggtcgcccatttgcactaatagaaatttcgcgcacattaaatggttgaaagttgaatggactgcgcaaaattgttccagcatagtcagtattagccaccagacccattgtcacacgacgcgggatttggtccataaacaggttagctgtaaactcatatcgaccctgactgatgaacatcgatttcatcattgtcttccgcacagcataacgggcaggtttcaactctagctttcgcgcaatgtctagcgccaacccatccatcagagacacctttttcacatacattttcagtcccacaacctcgaaacggtaccgacccccggtcggcgcaattaacacaaagtcattgtcattgggtagaatttcaatgtccaattcacagaaattgatcaggtatagcggttggttgaataggtcggtgtcaattttgacgatgaattgagctacgttactacccgcaaacaaattacgtcgcgctgtgcatccgcctcccatctccagagtatcgcccgtgtccctataatacccagcagcattcaaatgggagtcttttgctgtcgttgaataagagagttcatgtgagaaatatgatttgtaggccattagggcattggcattaaaaatttcgcgcccattgatactcatttttatgttgcggatgaaggtttgtccgatcatttgaattggtgcaatatttatgtcatcaatgtctaggttaatgagttgaccattagcgttttccttacggattcgaaactcggtgagcaaataacatttggacagatcaatataattttggctggaatgaagtttgaaatggtaaggtgtgtctgtaagcggattgctgggcagaagctcgaatacctttgaagatgaaacgctcacatttgtagggggtatacggaaaaagtccaatgcattggtgattgagttcacggagtcgttgtcgattttatggaaagccatttatttaattaataaagtcccaaagcgtccgatcgaatacgctttttttgcctgttttacaataaggcggcccaattaatgtttgatgaccattgcacataagttccctttcctttttatactccgtttttccgcttccaaa

SEQ ID NO: 22688 - DNA, 1465 bp, Heterodera glycines
  unsure (1)..(1465): unsure at all n locations
aaaancgcagaaatattagacaaaaaacacgaaaatatgccacaccccgatctctgaaaatttgtttgaatttagaaaaaaaaaatcataaacccataaatttttcgtcagtaaagaaaaaaccattttcacgaattacagaattccacaatcgggaactcccggttatcatttaccgaaaaatattgaagttggaaaaaattcaaaaattagtaattttttctaagaaatcatattaagcgaatgttgctaatgaaattttttgcacaatttttgatatttaatcaaaaaattttggattttagggacgtattttccaaaaatttccaataattttccatctttagggttagattttggaatttttaatagaaaatattcaagaaaagaatggcgccaaaattatgccgaaatttgcaagaaaattgacataagttctgcagaaattatgagatggaaaaaacgatttggaattcggtgtagaataactgacatttgtttttctcggcttatgtattttatctaagcttttccaaaaaaaaaaaaaaatttctgcaattgtccgcaaattcccaatgctttgggaacaaaaacaaatagaaaactcattgatttacttgtaaaaagataaatttgattttttaggcctttaaagtcggataaaatcacttaatattctcaaataactaaatgaaaaaattaaaagctattcatatccataaagtaaaaaaaaaatcttaaattttaagattcaatttcaatttatatttttatttacaaaaatattattctatatcagtagaaaaattattcatgatcaaaaatattattatttttttcaattaagtaggatttgtatatttacaggaaatcaataggaataaccaaaataataatcaaaaattatattttacaagaaaaaataaaatttattatttttttaatttgtgaagaagatgaaattccgcctattataccttccaattttattttttgtgattgaaatcaatcaaattaaaatagaaaataaaaaattaacgcaaaaatcatttgatgaaatatttggagaaaaatgggaagaaaaagaaggaaaacaacgaaatgaagagaataaaagagaaataattgaaaaatattataaaataaaagagaaaataaaggaaaaaggaagaaaatattcaaaaaaagaatggaacaaaattgatcagaaaatagcgaaaaaattggggacaaatagttgttatattcaaaaatggattaaagaatttggtcttcaaaaaattaaatgctataaatcaaaaactgatgaagaaaaacgtcaaattattcaaaaattcattaaaatgaaaaatgaatttaagcaaaaaagaaattattcaagaaaagaatggcaccaaaattatgaagaaattggcaagaaaattggcgtaaaacgtggaacaattggtaaatggaagaaacaatt

SEQ ID NO: 22689 - DNA, 1623 bp, Heterodera glycines
tgccatagttaataatattttaaataaattaacataatctcactgggcgatgtaagcctatgttggcgagcgattgcagatttacatattttgtagtgtatgggtatgtgtgccgtggggatgtgtgtgtgtgtgtgggtgtgttttcgcgtggagggggtcagggaggatggacggggtgggacaaaatcactagattttaatagaaatatcaacatgttttctacttcttttagagtgccgttggttccgtgcaaaccggacacggacgtcgtcacctttgtcgaagtccaaaagcgggggcgaaggcatccacgtctgtttcagcgggacctgcagacgcagcccccgctaaagacgaggacgacgacgatgccgaatttgtaggcaatgacgtcgaccatgacgaagattctgctgctgacgatgtcgacgacttcttttgtgtggttggcgtctgggagcgggccggctcccggtcgcgtgccacacagacggagaccatccatgtgcgcttccacaactgggagcgcgcgcagcgccccgaccgcctgctcgcacgctgcattggtcgcttgatgcagcgtgtgttggacgggcgtgcggaaccgctacgcgtcgggctgtcgatgcaaccgcccggctgggacagctgcttccacgtaccaatgcgtccgccacaacagaacagtgcgcacgcgctggcggccgcccttgaggcgttcgcaaagcagtacgacgagctcgacctgttctccgccgacgtctgcttcaaagtgtcggcggtgtgggccttgcccggtgagctcgtcgtaggcacccccaccccccccgtccctcgacaaagtttgacccctccccccaccgtttagccgcgcgcgtggagggcgcatgcgccgaggatgagcagcgcgcacgtggcactgtccgctgccaatcctttgtgccgatcgtgaacggggcgggcggcgaccggtggtgcatggcacgtgccatcgtgctggggctggcccagcggcgcatctgcgtactggagcggcgcaacgtggtccacttccgcgccttctgtctggcgcagcgtggcgaagcgggggcgcccgaggcgcgccgcctgctggaggacgcagcggtgccactcgaccgcccaacgtacggggcgccggaggcgcaacgtgtccagcgctggctggacgccagcctgggcccccaccaagtacggctagtcatcttcgcccgcgagctggcctaccgcgtggcgtggaagggcgcgcggccggcacgctttaacctgtgcttggtggcacaggacggccactacgggtacatacagtgcccggaacagctattccatgtactctacgataagccaaagaacttagaaaattgaaaagtgtttaggcgcgccagtactgtgtggactgcgagcagccggtggaccggcgcacgcacccgcaaggctgccgggcgctgtgcccccagtgtcttcgctttggctggggccgtccctgtgcgcgggagccgggccacgctccgtcgcgctgcgccgactgcctgttcgtgttcgagaacgcggactgcttcgaggcgcaccggcgccgggtggacccgccgccgcctggctgg

SEQ ID NO: 22690 - DNA, 1444 bp, Heterodera glycines
  unsure (1)..(1444): unsure at all n locations
gcttccggcaatgtggaggagttcaaatttccgaccgaaaatgttgaacaaatttttgacggacttttcgcattggaaatgaccggcgacaaaatgaaggccaattatgaagtggcgaagaaagcaaagcgagagcatcagaggcaattcactgccgaagaagagaggcgcgcagcgaaacaaaatttggtcaaagccaagccgaccaaatgccaaagtggtgggttggccagagtcttgaagcccgggttttagtgtgcccgagactgtttcatccggaataaaaaccgagaatttttgaattttaattgctttcatcatttagcgtccaaccaaaaggcgattcagtgctatttggacgaaatgactgagaaagccaacaacagctgggccagggttggaaagcggacggaaatgccgagtgggttgataaaataaaatttgcgaaatatttttattgttttttccaggacatcgtctaatgttggcatgactgatggaggggaaagcgaaggtgagaaaaagggggcattggtaaaataaaaatgcaaatggcacagagaatgtgccgtaagaagtcggaaaacggactcaaagaattccttaacttaaaactagggtaggtcgggactgggaattttgggtaaaaccgggaccgagacttttcgagttgaaaaccgggactttttggctgggaaaatcgggaaaaaacccgggaatttcccggtcaaaatcgggaattcggtactcagttgtccgtgttttggtcccggtcccgacctacctacttaaaacaatgttttctcggtggatggaacccaaaaaatgagagggttggacctgctttttctgcaacccctaggtcgatttgtctcattgacagctttcggttggtacatttttgtcgggattaaatgccgattggatgcctaaagtgccaaccatagaaccaaccgtcagggacgtatccaggatttgggcttgggggggggggtaccgatccgaaaagtcaattcttaggggtgtatttttaaaaaatttttcgcccgattcttaggggtgtatttttgaaaattcttcgcccgattcttaggggtgtatttttgaaaaactttcgcccgaacgacctttttttttttgctcataccagcgacgctgggaaaataggggtgtatttgaaacgataaattaccattttttccatcgtttttacggtggaggaagtaatagatgaatttgcgttgattttggaattgaaaagaaaggaaatgaagaaattgaagacagagaaaatgtttctttgtaatttggcgttggaatttaaaattaatatgttgctttcgttatgataatttggcgttaatttaaatttggcattcctttttctctctggggcgctggttggtcttgttggggngggggggggggtaccgcgtgggtgttg

SEQ ID NO: 22691 - DNA, 1987 bp, Heterodera glycines
accatgtctaaagtaaaatctgattacatattcgtgatcagcggcccaaataacccctaaaatcatatttttggaagatttttggtgaaaaaaattttccactcaaaaatcatggtcacacaccactgtggtcccaaattacaaaatcacttttaattctataacttttttcaaaaaagtgataaaaaactaaaataaaatttataaaatagagcaaaaaattgcggattttttgagtttattatttttataaaatactttttcagaacagagttctgaatttttttctgaaaaatcgaatttttccagaaattctggaataacttatttattttggaagatagcaattccaaatgaatctcataaaattctcctaattttttgctatttttcaaactttattccactaaatttgatcaaaaacgaagagagttatgaattttcgaaatttcactggattttccggggctcaaattttgacgatttttcaaaatttgtaaccaccttccaaaaagtctgaaaccaaaaataaagtatatattcgtcttcagcaccataaattaggccataaaaatgcattttggctaatttaggagcaaaaaaatttttcatgaaatgcaaaaccatggggtcccccctttggttttgaatttcaaaattcatttttattttataactttttttaaattcaagataaaaacatgagataaagcacattatattgggctttaaattctctacaaaaatgctcttagacgattttttgataaaatcaactcctgacaagttattgcgccagaactgaaattgaggcctagcaaccaaatttttctatttccaaaaaaattttgaaaaatttttctgaaaatcacactaatcgatagagcatgaaaaacggttgcttgaaagtggtcttggtttttccgagaaaaatccgcataaaatactaaaattcaaaaaccccaaaagtgacaagggggcctagctggaaaatttctgaaaattttcagaatttaaaaaattcacaagatagagctcggcgagctgtacaataagttcgctggcgacgacccgctcagcgtaacccccatcgagttattcccgaaaaccgaaaatccggtttttggcttttcaatttttagccacgcgtaccgggaatacggtaggtcgtagagaaaaatgtttgctggcaaacttgtagggcacacttcaacttaaaatcctcccagcaagtattttttgatcagagcaaaacccatcgtttcacaggctcttgaaaaaagcaaaaagccatttcagcgccgctggcgctcagttggccaccatatcggaatcagcggcccaaatatcccctaaaatcatatttttggaagatttttggtgaaaaaaattttaattctcccaattttttgctatttttcaaactttattccactaaaattgaccaaaagtgaagtgaattatgaattttcgaaattccgcttgatttttggaggcctaaaaattgacgatttttcaaaaatttttaaccaccttccaaaaagtctgaaacgcaaaataaagcgtatatacgtattcagcacctcaaattatgccataaaaatgcattttggctaatttaggagcaaaaaaattttcatgaaatgctaaaccatggggtcccccctatggttttgagtttcaaaatcacaattaattttataactttttttaaactcatggtataaacatgagataaagcacattagattgggcttaaaattctctacaaaaaagctcttagacgattttttgataaaatcaactcctgacgagttattgcgccagaactgaaattgaggcctagtaaccaaaaattttctatttccaaaaaatttttgaaaaatttttctgaaaatgacaccaatcgatagagcatgaaaaacggttgcttgaaagtggtctccgttttccccggaaaaatctgtaaaaaataataaaattcaaa

SEQ ID NO: 22692 - DNA, 1418 bp, Heterodera glycines
  unsure (1)..(1418): unsure at all n locations
attacaccacaaaattacaaatttcntgaagaattcctcccaaatcaacaaaattggatcactccctccaaatcaggacatttctgataaatcagaacagatccgcaccagggctgggcgaaacttcggcttcgaacttcgtgcttcggctattttacccgaagtttctggaaaaacacacccctaaagattgagtttaattggcttttgataaacttaaagttaatatatgtttgtttattaactttttgctttctgttccttattcacatacatggtcaaggggtatcttggttcttttcagtattcttcctttagatcaattcccctccaagtagttgtttttcttctaattttttaaaattattccttttttcaacggaaattcaatacaaatttaacaattaaaatcgcaaaatgtttttatttttggactaaatctgttaacaaaacgcactaaaaatttcaaaattttcccaggcggcgcctatcggcaccgctggaccctaaaaatcctctaaaaatagctcaaagtcgcaaaattggtaattttttgctgtaaatttgttaacaaattgcactcaaattaaaaaaaattttcccggcagcgcttattggcaccgccggcaccctaatttccatttcattttttaattgagtcaaaaaccgtgaatactctaagaattaaaaaaattttcaaaatacattgatcaaaaagttcaatgtatttattttattaaaaagggttggttgatctctagccgttctgttaattgattaaatttgatatttaaccgaaattttgtgatgaaaaaatttttgaaattaaaaaaaattttgaaaaaacttcggcttcgaaaacttcgggttttttgggcttcggacttcgaataaaaattgggcttcgccttcggcttcgagtgctaagccgagcttcgcccagccctcaccctggggcggacgaaatactaaagcaacgcgcctcatttgtgtgccgatggttgtccaccggcttttccctgtgcagcgtgtccatccggtccaaattgcgccagcggatgccgaaaatgacgaagccatggcgacggtgggtggaggggcgacggaggaccgcgacggggggaaggaagcggacgaagagcccatcatcattagttttgggacaaccgcctcattttggcgccattttggtccgacgaaatctgtcggggattgaaagccaaaattgccgaaaacacttggtgatgattagtagttcttacccaattaaatccaaattaattaggcaaaacgtatcaaaagaaggaagtcgtccaggttaattagggatttggttttggaaaggcttttccgggatcccgcaaaatcccgcgcgggatcccgtccccgcgcccggctctagtgtagatttaaaaatc

SEQ ID NO: 22693 - DNA, 2280 bp, Heterodera glycines
  unsure (1)..(2280): unsure at all n locations
tccaaacaaaattgcgacgaccgatgaaaaatgctaaaatcaagcatttaatttctacattngattttaattttattaattagtagttttcaattgatattaaatgtatgttntaatcgaatgaagaaatcaacaaaagcatntgagaaaacgagagcatcaaatcagcttcctattggcgagatcgatcatttctcaaattataattatttttcaatgctttcatccgcttcttcttcttccgctggcagcgacaatggcctaaaattatttatgttttttcgacaatcaaaaattgcttttgctgctcacccaatgcaactatttccaccccacacctcaaatcggatattgttcaaattggcacccgaataattggcatgccgtagagcaaatttgatatagataaattggcacccaaattttcgcggattttccacttaactggcgccgtctccccaattgggtaccgttgcaacagccaatcgaattcatcgatctcctgtttcagtgtcagcttctcattggtccgttcgttcaccaattcaaatggttcaattggccacagtaaaacttcaaaacaaattttgtagctgactgaagtggtggcatggagaaatgtctaaacaaaacaaaaggcaatcaattaattagtagtttaatgaaattatggtcggtcacctccttgaaatagttgatggactttgaaaaatcatcgcaacgcaatcgcttcggttgtccgtctttgctcggcgtgtgtaaccatttggccaacgcctgccaagcagaaattgcatttggtccaccatcatcagcgatcgcactggaagacagataaccggaatcgattgaattcaattgatcaagatcagtgagaattgtcggtgaaaccaaacgaagcaaattgtccaaatcatcgccattaggaaagctcaaatgccgaatgtttgttgcaaaaagtggccaaatttcgcgggtaaaaacatcccaaattcgctgatcatcctcagttttgtttgaccatatagacaattccaatttggtgcctcttctgtcccaaattggcttgttggaacggagaaatgcgagcacagaatggtcaatgtaactgaagaaatataaaaattgctttaatatatacaaaagtctaaaattacttacttaatccaaaggctcttaaagcgaattttggtgggcagcggacggtccggcaatggaaattccacccttttgccatcgatccattcagacagtttcgcttttggtcctttgtccttgcgaattgcgattgctttccaaattgtcaattcgctttttccatcaaaatgcgtgtcaaccaaaacatcgaaacggtcggaaagcaatgccattttgaggccgagttgggcatagttaaaagatggcagaatgtccatccaaacgtcgccacaaatccaactgaaacaaggaaaaaaattgggtagacaaaaattttaatttttcaaaaatttccttaccgtcgattcattttggtggctcaattagcacacttttccctttttcgattgttttttgtcacaaaaggcaaaaatctgttgttaacttaaaacagagacaattaggaaaaatgataaagcaaaaagaacaaaaaacaattttgaaacagaataaaacagacggagatttgtaaaaatattgttttttcactctaattcactttacctattatctctaattagccccccccccccccccccctccctatctaaggaggttgaacaataatcatccggggggataattagagatatacggacggtatcagctcaatcaattttgaattaggatacggagaatccaggaaaaaatatatgcatttacaaaaataaggaagccgtgtaaattatgtatgtattgaacaaaatcagcaaaacacccttccccattactctctctttatatacgcataaattaatgcgttatggccattattttggccaacaaatcattttaatctccccccatccgttcatccgttttcaaatctctcacttttattttggtagatatatagaggtcgaaaagactttttggatgcataatagcgatgcgatacaatcgcttcggttggccattttttgtcggagtgtgcagccatttggccaaagcttggccagcagttgcatttggcccatcgtcagcaattccatcggggcacagataaccggaagagattgaatcgattgatcaagatcgataagaagtggcggtgaattgtgatgccgcaaattgttccaatta

SEQ ID NO: 22694 - DNA, 1362 bp, Heterodera glycines
aattctggttcggaattttgaaaaacaaaggtcatattcgtgatcagcgccacaaattagcctagaaaaattagttcaaatgccttttgagtgctctttatagtgcggtcaattgagtccagcgtcccagctgagtttggcactccaattccggcactttttcggcctgaaaaagggcaagcgcgcccctaattctgtttttccaacccattttgaacatttttacatcgattctgaccgtttttaaacatttttgagtttggggactatgatcaatatttaccaaaactaataaaaaccctaaaaaataatagttcaaaaacgaaataataaatggaatcgaatgattgtttaaaaatatataaattttcgtcatctttttagaattttattgccggaaaataattaataatttttatttataagataatttaataatttcgaggaagaagtgatatttgtatttatcagacatttcaaatccaaatgagcacgcggtgaattggggagatgaatttcaactcggaaatgatgtaaaatattttagttgggaattcagaaacggttatggccaaacaagaattctgggccggcaattgacaaataaaattcttggcccagaattgataaaaaaaaaattcatattaacgctttatcggatttggacattacaatttttgctttaattagaaaggtcgattcgatttacaaaataaattaaatgattttaattaattaccaaaaacatgttaatcttttaatgattttaaaatttaaatcaataattttaaagaaaaatacacttttcctatagtaaatcctgtttaaatttcttaaatgattttctttggtttcataaatagatacaaatcactacaaaaaatggacaaaacttactgaaaaattttataaaaattcgtatgtattatatttaaaagcattaaaaaatttatgtttttttcaattgaattcctttatgaataaagtgactttactatttttttcagtaaaaatcttgccctggtttataattttcaaaatttcttttcatcgcccattaatttggaattgtatttgtataatgagcttcttggaattcccaattctgtggcaatttcgtggtcggtgagctcagaattttgttttttcatcttataatattgcttcatattgtcaattttctcagcaattttgaaaactttacgatctaaaaaagttgaatttgaaaaaaatttcaaaaatttaaatgggagaaaaatatttaaatttgaccttttgaaacattttgtttaatgccgaatttcttgtcccatttttcaattgttctataataaattccaaattatttgctcaattatttgc

SEQ ID NO: 22695 - DNA, 1871 bp, Heterodera glycines
  unsure (1)..(1871): unsure at all n locations
aaagtggcagtctttggtgagaatctgttaacaaattgcacacgaattaaaaaaaaatttaaaaggtcgtcagtttacatggctggacnccttcgcaaaaaatttggttgacccccgcccttttccatgtatgtccccgatcccccggctttcccgccccgtctaagtccttccccgggtttcctttttccttccccgggtttcctttttccttccccgggtttcctttttccttccccgggtttccttttttctttcccggtttccctccccctccccatccacggcatggccaactcgaggaatcgttgtcacattcttttttgttcagctctctgtcccccgggcactctctccgccaatggcctcgccccatgccgttcttgtcaaagttattttttacattttgcagactgttttattcatattagatggaaaatgccaaaagggacaggaaaacgggggacaacgaatgccaattgttacggaggaacaacggcacttcgactgcgccttcgatggctgttcaggccacgggaaatgccaaaatggtcaaaccttttaaaattttaataatattttaatttttaatttaggcttttgcatctgcgctttgggcttcgttggctcggattgttctgttccattcgacctttgtgacgcgcagttttgtctaaattccaccaaatgtctgtttgactcgctcaacggcactttgtgcatttgccagcggggtaaaataaaaaatatatgtattaaaattattttatttgttagggtttaatggtcgacgttgtgatgaacattctttgctctctcagcaacaaattgagccaaaattggcaattaaacagcaaaacggcacatgcaatgggtccgctgctgacaatgagggaatcgctgctaatgaatgtccaaatggagcttgcaaagggcaagcacttagaacttattagtttcaattctcaaatatttaagtggcatttgccaatgcaattccggatttgtcaaatcaacgaatggaagtggccaaatttgcttgccaagaaatccatgtttggcatcaaatccttgccaaaatggtgccaattgcttttatcaaaacaatggcagcgtaaattgcgaatgcgcggaaggtgtgattcattcgttcttttttgatgtaacatgctgagatagagaagaaagcttcccgagcggaagattaatggatcaattgaggcaacaattgatcctatatgatcgagcaaagtgtggggctggagagggcagggtcggtagttcagctcgtagaacactggtccggaaagccagagacgccgattcaaatccggcgcgccccatagtttttccctcaaaggcttccccagctcgttcatatattcaaccggatctttcagattttgtttaaataattaaatccatatcattgaacatttgacatttgaaggtggaagaacacggctttggaagttgttgtataaaagcgatcaaaaaggggaacagagcgaaaaggaaatggccaatctgtgggaaacattggaactttccgaaataattacgggtaaatattttaattgcaaaatattctttttttgatattttggtaattttaagattattgggacgaccgacagctgatttctcattatgaagaagcattgctctgcgatatgaacgatttggtccgaaccgaaggcaaaatgaaagcggagatttttctgttcatccgttggatttcctctcaattttcaccaacaaattcatttccggcaaaagtggtgaaaaatgtgcaaatttattggcccctaagtgtgaaaatgttggacaacttttacgaccagattgtttgacccagcagacactgcagg

SEQ ID NO: 22696 - DNA, 908 bp, Heterodera glycines
ccttggcgaattcatagaaaaataaaaaaattatgaatcctaccatggtaaatctaaacaattaattataaattaaaacttaataaataaataatatttaacaaatctgaataaatatttaggaaatttttccaaatagatatctttcttttttttttaaatattttttcataatttgcttcaaaggtttttgagaaattaatctttaactaatttttaataaaaaatttttaatataaagaaataacttataaaaacaaaaaaccatttgcgcatgctcactctatgatcagaggtaaaagtgtgtttttcatgtgtccgattagagtgttacgggaccgggaatttttgcaaaaccgggaccaggacttgccgggacctgagaagccggaaccgggacctcgatttttttcgggaccgggaaccgggatcaacagggaccaacaaggaattttaaaaaattcaaattttaatttatttcaagtgaaataatacaaaattaatttttgttttactatttatttataaaatccaaaagttaaagcataattaaattaatgaacattttccaatccattttacttcagttatttcagacaattaatcattttttgattcaaatgatcgaatattattagaaattcagatgtacttttcacatcattttttcggcgcgctttttccaaaaaattttggggaaaaaagtccggaggtgccgataggcgccgccgggggaaattttgaaaatttaagtgtatttttgtaaacacattttcaactaaataggtgctggttttttggattactaggctcaatttgtacggattttctttaaaaaatgataaaatatatgtaatttaaaaaaagtatgaagtataatattttgtagataggaaacctgtaagtat

SEQ ID NO: 22697 - DNA, 2568 bp, Heterodera glycines
ggatttcccgggttaggacacttcctcagggccaagggctttcggggcgcttatgtctcgtgttttttcgaatgcaagcacactggtcccccaggcaaaggagttccgatccacgaactcatagggcttgtcaaccatggcaatacgccactcactcgtataccaacaccaccaccaactttaggttcagcatccccagtgctgagttccccacagcatttgtgccttaggcaacatttacacaagtcaattaactcgccaaatttctttaacacacagacgagctgcatgttttattcatttcgacagctgccaatcgctggagaaactgaggccacgacaaaggtggcaccccagcagcagccatcaccgttcaatgccgagcacaagcgcaagcaagcacttaaacccagacggccgcgctccccacagcgaaatcgcttcttttttccagccacaatatcgcaaaaacggcccaaccaccacactcacccacgccaattaaccaacgcaaagcacatacgactaggaactttatacaaatttaaaaaagtaatattttgtatatgcatttaatcaaatttctactttctttataaatgttagctaattagtcagcgtctatttattttctgtaaaaatttgcctctttatttaaaattaaattaatataatttcatgaaataagacactaaatgtatagagaatgaattaacgtggtcgattggaataaatggaaaaaaaagcaaagtcaaaacacaaaaccttaaagcactagccgattgaaataaatggaaaaaaaagcaaagtcaaagacaaaaccttaaagcactagccgattgaaataaatggacaaaaaagcaaagtcaaagacaaaaccttaaagcactagccgattgaaataaatggaaaaaaagcaaagtcaaagacaaaaccttaaagcactagccgaagcaaagtcaaagacaaaaccttaaagcactagccgattgaaataaatggaaaaaaaagcaaagtcaaagacaaaataggaactttatacaaatttaaaaaagtaatattttgtatattgtatatgcatttaatcaaatttctactttctttataaatgttagctaattagtcagcgtctatttattttctgtaaaaatttgcctctttatttaaaattaaattaatataatttcatgaaataagacactaaatgtatagagaatgaattaacgtggtcgattggaataaatggaaaaaaaagcaaagtcaaagacaaaaccttaaagcactagccgattgaaataaatggaaaaaaaagcaaagtcaaagacaaaaccttaaagcactagccgattgaaataaatggaaaaaaaagcaaagtcaaagacaaaataggaactttatacaaatttaaaaaagtaatattttgtatattgtatatgcatttaatcaaatttctactttctttataaatgttagctaattagtcagcgtctatttattttctgtaaaaatttgcctctttatttaaaattaaattaatataatttcatgaaataagacactaaatgtatagagaatgaattaacgtggtcgattggaataaatggaaaaaaaagcaaagtcaaagacaaaaccttaaagcactagccgattgaaataaatggaaaaaaaagcaaagtcaaaacacaaaaccttaaagcactagccgattgaaataaatggaaaaaaaagcaaagtcaaaacacaaaaccctaaagcactagccgattgaaataaatggaaaaaaaagcaaagtcaagaacttattctacctaatttcatggtgactgacgaggcatttgactcccttaagagagccttcccttctcatgtacttgtacctaaaatgttgttggcacaaaaagtaaagggggaaaaagaagacaaatcatccgatcaagggctaagtctcaacagatcgcagtgtaaaagctgctctactgctaacaaccccctgaccagtagtcaagtcgtatacaagtgattttgcgccccgacgttccaccatggcacacgagtgctacggctttggcaatgtgcgagcaattaagcacgcacatcgggccagatgctggggcatttgtgctgcaccgcaagcggcgcataagtagtgcctcccgacaccggggagcaagaatattgctatcttgcctaggcgggattctgacttagaggcgttcagtcataatccctcagatggtagcttcgcaccattggtctatcgaccaagcacatgaaccaaatgtctgaacctgcggttcctctcgtactaagcaggattactatcatagcaacaggtctttagtagggtaaaactaacctgtctcacgacggtctaaacccagctcacgttccctattggtgggtgaacaatccaacgcttggcgaattctgcttcgcaatgataggaagagccgacatcgaaggatcaaaaagcgacgtcgctatggacgcttggccgccacaagccagttatccctgtggtaacttttctgacacctcttgctggaaactttacacattcaaaaggat

SEQ ID NO: 22698 - DNA, 1365 bp, Heterodera glycines
ctagtttctactctatatagaataatgttgggtttcgtttctaaaaccaaaatctcgggaacgggcgccgggaggggcgcgggagtgtgacatcacttaaccaacttttgacggcgcatctgggaaaaatacgggttttccggtccggtggccagttgagcgccagcggcgctgaaacggcccgaaaatttttttgtccgtttttgccggcctgtatctttgcgggaagaagcgggagcgaaaaatgcttggagaaagggcactgcaccgaacaatttccaacatttttcgtctccaacacgttcccgtacgactaacggtattcacggtatgcttgacagaaaattgtatggtcaaaaaccggttttttgaatttcgggaataactcgctgggggttaagcggagcgggtttgcgccgcttgagcatttgtgtagtttttaaagctgcatccgatggcgttttcagattttgaaaattttcaaaatttttcgagctaggccccctcgaaaatttttcgtttttgaattttattattttttgccgatttttcccaggaaaacggagaccactttcaagcaaccgtttttcgagctctatcgattggtggcatttttgaaaaaatttcaaaattttccggaaatagaaaaattttccggaattgagctccccatttccgttcaaggcttataactcgtcaggcgttgattttagcgaaaatttgtcttagagcatttttgtagagaattttaagctctatctaatgtgctttatctcatgtttttatcatgaatttaaaaaaagttataaaattaattgtgattttgaaactcaaaaccataggggggacccaccccatggttttgcatttcatgaaaacattttttactcttaaattagccaaaatgcatttttatggcataatttgaggtgctgaatacgtatatacgctttattttgtgtttcagactttttggaaggtggttaaaattttttgaaaaatcgtcaaaatttgagccccggaaaatccagtgaaatttcgaaaattcataaatctcttcgtttttggtcaaatttagtggaataaagctttaaaaatagagaaaaattggaagaattttatgggatttatttagaatttctatctaaaaaaataaaaaagttattccagaatttctggaaaaattcgatttttcagaaaaaaattcagaactcccttctgaaaaagtattttataaaaataatatactcaaaaaaatccgcaattttttgctctattttataaattttaatttagcttattatcacttttttgaaaaaagttatagaaataaaagtgattttggcatgcgggaccaaaggggtg

SEQ ID NO: 22699 - DNA, 1739 bp, Heterodera glycines
atcctgggaccgtcccagtctcaaacattactagttttggggtgtacgtacccacattccttccttcattccatccccctaccaaaacaaaatttttcccattttttctccatttattttttttattcccagacaaaccctcgtcctcctcctcccgtcggtcgtcgccgttgcccgtccaagtgggccaagactatgtgagcaccattgaactcagcaaacggggaggcggcgccgctgctggcggcggggaccagcgtggatggccactgaagtcgccgacgacgatgaccgcctccacctcgtccgcctgttagggcgggggcctcgctttttttcaaaaaaaacatctctgcctctctccctgtgaatgtaataaactgtttcctcaaacacacaatgtctcttcattttccttttgtttttctttgctgtgatcttcccgtagacttacttacttatcgtgtaatgaatgtatactcttagagtgcctatgcccttgtgaaaaaagtcccagaaatcatttaaaactcgatcattttgtttttcgctctcacttaatttctgctgctgtcatcgactactactgtatactttcactttccagggatggagttccgtttatttaaaaaaaaaattcggaagtcggaattccgtctcatccctgcttctactgtactttctattcatcaatcgcccctcccatttctaagagctctccagtgatcttttgttcgacttttgcttaattataatgccacacaaaaaggcgtgacctgcgcgaccctttgcataaacaaccaacaaacaacatgtgcccaattttcacttatttatttattattttgctttacaaaaaatattccatatttgtattttttccaaatgtactgtaatcactgtgcaataatgccgccaacacatcataatttaatttatttttcaagcttatagtccgtttttcctaaaaaaaaaaaactttccgattacattgttttttagcacacccatatcacattcatttattagacggaactaaaatccgccgctcctttattaaaatattccggactcgaggaatgaaaaggcaaaggaatttggtatttgcgctgcgtgtgatcgatcatcacatctgcgtcattttgtcatgattgatcacacaccatcaccccctttttgctgatcagtttactgcttgctgcacatgatgcttgtgatcgctgtggttttgctggctgatcacttattatgtgtgcattctgcccgctgagcgctcccccctttcacaccttccgccgctgatcaaaatgagctgctgatggtgaaatttcctccaacccccgatttgtcattctcgaacagagagcggcattccatcgtgatagtgatgggaggaaggcgggatgccatccacgaccattattcattcatccattcatgctgcaaaaaccacacagacagacgatagtgtgatcactgatctgcgtaccccggaaaaatatttaccgaatatgctctaattatagtccagtctctattaatcccgcagtctccaattatcccccagtctacgaggtgttttgaaaaataatccctctatcataatcccccagtctctaattatccccccttttctgaggaggttgaaaaataatcccccatgggctataattagagcatatacggtattcgacaactttttaggaaatagaaatttttagtcaaaaaggagggggaat

SEQ ID NO: 22700 - DNA, 1447 bp, Heterodera glycines
ataaaataaagatggatatgtattacgtatttttctccttacttaaaaagtaattctctatcgaatttggtgagaaaactggcgggaccgttggagctgaaatttttcgtaaaaatcctgctgggtcaattctgaatttcattttatcattccagaaatatcaaatagcccctgctaggccagtaaaatttcaaaaaaaatttgacaaatttttttttcttattttgtaacgaatcatagcgcctcaatcgtcccccccccgtcatttttcgctttgtggggggaacatttattatcatttatcaaaattatcagagagaggctcagtttgctgtcaattaggattccaagatctcggattgtttgggtctctttaataatttttccattaaattggcagggaactttaaaattatccttgccaatgtacagagaagctgatttttctggtgaaaatggtagaccccacataaaaaatttttggaaaaatacacatgtatcttatttgtaaccgcaattagtgaataaaattgcttgtcttaattcgaaattacttttcatgtagaaaacagcaattttaaaaattatacccctaaatttggaactttttcgcccttatttacggccttattcatcaccccataactttaaaattggatagaaaataaataaataattcagaatttttttctctattacctaggtacctatatgcaaaatttgttgtggatttatgtaacaagcagaaaaaaaataatttatttttacataattaaaacaaagagatagtacaccaaagtgagagaaattacaaagaaaaaaagcaactacgagatagtatgtgttaggcttttctctgcacagtggagttgacccatagagcacacctctgaactaaaaaaaccttataaatatgtcgtctcttggggttaattttcattttgttgtatcccattgttttttcatttgtttgcattttttctgatttctcccacctttgaaaaccttttgcttctatctctataatatgtaaactcggccaaatttttcttttttcacaaaaaacaatgaaaagctctaaaactgtttccgaattggataagtattccccacaaagtccttgcttttgtgagtcgaccttttgacactttcattggttgggtccatcattttgtgggcttttcctaccaacaaaaaaaccccaatttctgctgatagaggcaataatttattccgtttaaattttcatgtctttatttgctatgggattattgccatccaaaacgacaccatcgccgtcaccaccaccaccgccgaatggcacgactccatcgctgccgcagcaacctccgccagtcgccgcggctccgtcaccgtcgccaccggttggcaatgtgttgccgctgctcgccaacggacagtacgcagttggatgtgccgacattat

SEQ ID NO: 22701 - DNA, 415 bp, Heterodera glycines
cccccccccctcgttcccctccccttttctcggtgccattctccctctttttcagttcatgcgttggcgaccggactccgagtacatggttggggtggcaaattaccagggcgtgagcatgttcaagatgaacctcttcctcgattgggtcgtcggcgacaaaaagtgagtttttcggctgcatattttgggtctttcccatcgccgggttaaactgatttttgaaaaatttcctcaaaaattttgttttttaaatgaattttttttcaaaaaaatcccgttatttccgcttcgtcggtccgggaccccctccccccatcccttttgtcatctccaccattttttaatgtattttgtctttttttcgatcgcccgtccattggcatgcgccggtcgtgccgggtgagcagcgctt

SEQ ID NO: 22702 - DNA, 1121 bp, Heterodera glycines
  unsure (1)..(1121): unsure at all n locations
gtagaatagaatggccattgctctccgcgcncctctgcccatgctgggacattnngtatggtacaaaatttctcgcaaaaaagagatagccatttttctggcatagagaataaatttaaaaattccctgtagaatagaatggccattgctctccgcgcccctctgcccatgctgggaacatttgtatggtacaaaatttctcgcaaaaaagagatagccatttttctggcatagagaataaatttaaaaattccctgtagaatagaatggccattgctctccgcgcccctctgcccatgctgggaacatttgtatggtacaaaatttctcgcaaaaaagagatagccatttttctggcatagagaataaatttaaaaattccctgtagaatagaatggccattgctctccgcgcccctctgcccatgctgggaacatttgtatggtacaaaatttctcgcaaaaaagagatagccatttttctggcatagagaataaatttaaaaattccctgtagaatagaatggccattgctctccgcgcccctctgcccatgctgggaacatttgtatggtacaaaatttctcgcaaaaaagagatagccatttttctggcatagagaataaatttaaaaattccctgtagaatagaatggccattgctctccgcgcccctctgcccatgctgggaacatttgtatggtacaaaatttctcgcaaaaaagagatagccatttttctggcatagagaataaatttaaaaattccctgtagaatagaatggccattgctctccgcgcccctctgcccacgctgggaacatttgtatggtacaaaatttctcgcaaaaaagagatagccatttttctggcatagagaataaatttaaaaattccctgtagaatagaatggccattgctctccgcgcccctctgcccatgctgggaacatttgtatggtacaaaatttctcgcaaaaaagagatagccatttttctggcatagagaataaatttaaaaaataccctgccgaataaaatggccattgctctccccccccctctgcccatgtgggaaacatttgtttgggacaaaatttttcccaaaaaaagatagccattttt

SEQ ID NO: 22703 - DNA, 970 bp, Heterodera glycines
ttcaaaaaaaaatcacggtcacggtcacgaaaaccgtgaatttcacgggttttttatgtcacggtcacagtcacgattcacgggctcaattcacggtcacgattgacggttttttaagtcactgcgcatctcttctgtgtacacaccgcatatggtcaaaaattaaaatttttgaattatttcttttgatgctcattttcaaggacttcttgaattcaaggatactttcaaattttcaatcggaagggcccaatttcaaggaagtccttgccattcaaggacggatgggaaccctgcccttgtcgggcagttccgttagacgccgccgggaaatttttttgacattaatgcattttgtgtagaaaaattgattaaaatatttaaaaaattgccaattttccatggaaaattttttaatttttccatttaagggggaggagaagggattcccctccatcccaaacagggatggacgaaatttcgtttcgttttcgtttcgtcctacattttcggcaccttttgagtttcgttttcgttttcgtctaccaaagtttttcgtttcgttttcggtttttaaattttggattttcgtttcatgtttcgttttcgtcagagcaaaattggacgaaaaagacgaaaatatttacacattaagaatgacttttttggtaagaaaaaataagatatttcttgaagtattgtattaaatctgccaggaaattgtatgtaaagtttgaaatgttgattaaaaaccatatttttttttacaaaaatactaatatagattcgttctaaattttattacgaacattaaacaagtttttggagtccggcggtgccgataggcgccggcgggaaatttttttaatttgattgcaaattgttaacagatttatcgaacaaatttgcgctttttaaccgattatatgaattttgctaacgatttttcacaaaaattaggtatctataa

SEQ ID NO: 22704 - DNA, 886 bp, Heterodera glycines
ggtactcaaacaattatggggagcaaaaattcccacgcagaattaaagtacaggctatagggaagctattccggaaggattcggtctccccataaatctgggcgcatcggttcggggggactgccccgaaaacaaaaaaatcgattttttcaagtgtccgtttggggtactcaaacaattatggggagcaaaaatccaacgcagaattaaagtacaggctatagggaagctattccggaaggattcggtctccccataaatctgggcgcatcggttcggggggactgccccgaaaacaaaaaaatcgattttttcaagtgtccgtttggggtactcaaacaattatggggagcaaaaatccaacgcagaattaaagtacaggctatagggaagctactcccgaaggattcggtctccccataaatctgggcgcatcggttcggggggactgccccgaaaacaaaaaaatcgattttttcaagtgtccgtttggggtactcaaacaattatggggagcaaaaatccaacgcagaattaaagtacaggctatagggaagctattccggaaggattcggtctccccataaatctgggcgcatcggttcggggggactgccccgaaaacaaaaaaatcgattttttcaagtgtccgtttggggtactcaaacaattatggggagcaaaaatccaacgcagaattaaagtacaggctatagggaagctattcccgaaggattcggtctccccataaatctgggcgcatcggttcggggggactgccccgaaaacaaaaaaaatcgattttttcaagtgtccgtttggggtactcaaaccaattatggggagcaaaagtccaacgcagaattaaagtacaggctatagggaa

SEQ ID NO: 22705 - DNA, 1431 bp, Heterodera glycines
acaacagcaacaacagcaacaactgatcagtgctggcggcactgatcagcaggttgccgccgccgctgccgctgcggccgctaccacactgatggccaccgcgcagatggccgcgcatatggccgcggcatccgccgctggcggatttggttggtgtactattattgcaatgatcggctctgatcagtttcttacctttcttgtgataagcgattatcattgctttctgctgattggtagtaattgccaatgattatggtctgtccaattaagctttcattaattccatatgatcaatattttggtagtaattaccatggctaagatttgcccaatcaatcatcaattgatctcatatgatcaacatttttcactttaagattgggagtaatattatcactgatatacatatatctgctatttattatcaaattgatttacttaatggattttggatttattgccaggttttctggatatgctcggccaagccggcgcctttccaaaagcgtcgcccaccgccgaagaacaaagtcacgctttccaagcagtgccagcactgtgtgcagcagactcatcgcctgccgaccatgggacgaatggcgtcaacgatttgctgaccaatggcaccggtgccaacggacgccgcgccaccgctgctgcaacaatgcgcgcttccgcgccgccaaacgacgaagcggtcgtggacggaagcggtggcggcaccaacatcggtccgcctcgggcaaagcgtgcgcgtgccggaagcacaccgttaattgctggcggcgcggcactgcagcaaacgacgacgatggcactaatgggcaataatgagggcgccacgacgaacggaagcggacggacaagccgcgaatccggcggtgggatttaaatgtgccatttaaaatggggggggggggaacgagagcacttcattaattaatggtatcaaaattagattcgctttttctcgaactctcggcttaattgacacttctacaacgaaattccattcgcatattttgcgatatgcatattttacgtgcatattttggcatttttttaaacatactcaaaaatttgaaaaaatgggaattatgccaaacataatgtccaaaaatctcaattttcttcaaaattaataaagtttacatagctttattttgtattttttcttctaaaaagatgttatgcatttttaatataaaaattcattagcgttttaatcgattttttaattaatttccatcggaaaacaaatttatgtttttataacaaataaaaagtacaaattaatcaattgcatgttgtagacttatgttttccggatgtattttagtttttgttttgttttttgagcagacgacaaaaaataatcgtggcttaaaaattactaaaaaattaataattaaaaaaaatgcccgacaa

SEQ ID NO: 22706 - DNA, 1337 bp, Heterodera glycines
ttttcaaaaacatgacacacattagtgtctcacactaaagtcacagaacaaaccactaatgtttttcaaaagcatgacacacattagtgtctcacactaaagtcacagaacaaaccactaatgttttatcaaaagcatgacacacattagtgtctcacactaaagtcacagaacaaaccactaatgtttttcaaaagcatgacacacattagtgtctcacactaaagtcacagaacaaaccactaatgttttatcaaaagcatgacacacattagtgtctcacacgaaagtcacagaacaaaccactaatgttttatcaaaagcatgacacacattagtgtctcacacgaaagtcacagaacaaaccactaatgtttttcaaaagcatgacacacattagtgtctcacactaaagtcacagaacaaatcactaatgtttttcaaaagcatgacacacattagtgtctcacacgaaagtcacagaacaaaccactaatgtttttcaaaagcatgacacacacttttgtgtcacactaaagtcacagaataaacactaatgttttatcaaagacatgacacacataattgtgtcacactaaactcaaataacgaacactaatgtttatcaaaaacatgacacacataattgtgtcacactaaactcaaataacaaacactaatgtttatcaaaaacatgacacacattagtgtctcacacgaaagtcacagaacaaaccactaatgtttttcaaaagcatgacacacattagtgtctcacacgaaagtcacagaacaaaccactaatgtttttcaaaagcatgacacacattagtgtctcacactaaagtcacagaacaaaccactaatgtttttcaaaagcatgacacacattagtgtctcacactaaagtcacagaacaaaccactaatgtttttcaaaagcatgacacacattagtgtctcacactaaagtcacagaacaaaccactaatgtttttcaaaagcatgacacacattagtgtctcacactaaagtcacagaacaaaccactaatgttttatcaaaagcatgacacacattagtgtctcacacgaaagtcacagaacaaaccactaatgtttttcaaaagcatgacacacattagtgtctcacactaaagtcacagaacaaaccactaatgtttttcaaaagcatgacacacattagtgtctcacacgaaagtcacagaacaaaccactaatgtttttcaaaagcatgacacatattagtgtctcacacgaaagtcacagaacaaaccactaatgtttttcaaagcatgacacacattagtgtctcaca

SEQ ID NO: 22707 - DNA, 2463 bp, Heterodera glycines
ctcgagcacttccgcaatggataccattccaaaagacccttccgccccaaccgaaaaaggcgattttggagaaccgggggattctgaaaaatatgcaatttggtcaaagaatgtttaagatggatgaacagtccaaccaatgtcactggtgctgttctcattctccaccgactgtcccttttggactgtccgtcttcgagaatattcctgcacactctttaaggtaagtgctgaaaatgtttgcaatctctcggcaattcgccgccttcggcagttggaagaagcgtttttcccatccgaacatttttccgatggcgtaggttttggttcatcaactgtcgattgcgagacgttggaccgtttccgttcggctaaagaaaaacacaaacattttgccaatgttctcccactaacccttcgttcttcggttagttaattcctttttaggcttaccaatttcatcactggctaatttgatgaaagtgtcgtcatcgaaagtgtctgggtcggtcgattggcattctttgctttgtgccccctccaaacattttgcatggcacaccaaatcgcatttttcgcattgatttgcccatttcagccaaatttttccgccacagactccacaactcacattgaaacctgaaaagccaaagtaaattcatgcactttcattgaccacactttgtttgtgtttcaatggcacccatcgatgttcgtgatgagaaaagttagccaaactttggcacggatcatccgactgatgagtttgatggacgggggccgattgtgagagagaagcgcactcgcccaattcgacgggcaatccgtcggggaaaaaacgaaaagagatgagcaaatcgccgaagcataaacgccggtcgaacccattgtgacgactcaattggtcaaactcggcaggaacagaatggcaatcactgaagggaagagaaggaatcgggagagaaaagcctaaagggaccttttgggttctctcaaatggaacctttccctgtggcaataagacagtgttaacttaagcaaaagttaatgtaagtgggaattacaggtgacaaaccgaacagtcctcgacgagtcccggcacataaacactcgtctgaataaatgaacaaaaaatgaaatttaactaatagcggggaagtaaacattataaaaatagagaggagtctccaaattgccaattgcttacccatcccaacattatcaattcctctccatcatttcgctgcggttcgccttgtaaattgtttgtagcgtaaagacaaacactcaggtaaatcgtgtctttgttgaggccaaagagattggccattaattgggttctgaaaaatcaaaggttttgcattaatctttgattcatgtaattatatgcccatacaatttcttgctatttagtaaattattattaatggtccatctatctttacaatttcttagaaatcaattgcctttttccattttttatcaaaaaaatttttgacgcctaaaaattgatttaatgttaaagttttatagaatatttgcaccgtcccccgtctcaaaattcagggcaatatcaataaaacaataaatttcattggtaaataccaaacttcaacaaaacccatccaccaccttttctcactgccattggtatcatttacctttgtgtatgagtttcattgtgtcatttccatagccgatctcctcacaaatacgctctctcaattccccaaaatttgttggcatttgctgtctcacttcacttggcttcgcccccgcttcacaattgtttagtgcgcaaaaaacctcctgacaattaattcaggaaaattattgtgacataaattaatgataattattgcaaaccttataaaccaacgcgttggcaaacacggcgcctcgcgccacaaacgaattggcaaagttgcgcttgtttatgcgcttaaattttttttccaaaaattatggttaatacctgaaaatataaataaattaaacatattttaaaatatggtataaacatttaaaaataaaaacaattctacaaatttattaatcatagtattgatattttttagccgggcaaaaaatagcacaattaatttatttttaatggctaccgatttttctctatttctctaacacaattcttttcattttttctctctctctctctctcacttttctatttttcatatcgcacactctcctccctcactattttctctctttatctaactaccgtatttgatctaattatcaacccatgggggattattttttagcctcctcatagactggggataattggagactgggggataattagagcaaatgctgtattttctctctctcgaccccatccaataggtttgggtttgtggaaggggatgtcagagaaaaaaagtcgacacactctcataagggatcgaaaatcaatcgataatttgattgggaatatta

SEQ ID NO: 22708 - DNA, 2290 bp, Heterodera glycines
  unsure (1)..(2290): unsure at all n locations
ttacncactttgaacccaatcagccagcgtaaaaaacttgaaaaatacaaactaattaattcatcgcaaaaaataacaaaaaactcactggcacataatttgcctcgtatttgcaatttgggttcagcaaaagtcccgaagtcacatttttaatggtcaccgaccgtcccaaaaaaggacccataaacactcttttcgggtcgtaatcattcgcgtgcaaattgtcccaaatcaaaggctttctccgaagaacagtcgaaaccctttgaagatggtcggcggtgagaaaacgcgaaacaacgcgaggaccttaataatatttgaaaaaagggttaacaataaattatcgacggacctgtccacaaaatgtgaatgtccgggtgaagtttggttcccagcaaattgaggtaatcggactcgctcaaagaaggcgaggcggacgactcgcaatattcggtgggacagaagaaaaacagcggacatccgagcgactcgaagacggagttggacacggtcagctgagccagggcgaacgaggagaactgcttgcggtccatttcgttcatcgacgcctcaatgtcgtcgaagagaagcgaaaaagcggtgcagccgagggaaaagaccgaaaatgcgagggacggatagaaaaaagggagaaaagcatatttcaaaccaataaataacctacctaaaaatgcatcttatgaaaattgttttgttttttgggtgtaaacctgggtcagcttctcgcgaattgccttcagctccttggcactcgaatagacaatgtcaatgcccggtgaaagtgcgtatacaaaagtaattccgttgtctttggccgctctgatcagtgactccaacaatgctaaacaacaaaaaacgattggttcattcatttgcggtgcttctgcccttgcccaacccacccgcttcctccggcgtgtacagcaaccgccactccgcccggtgcttcaagtcgtcctttggcgcatacaaatacgtgttcatgccgaactttcgcaacagtgtgaacaaatgcttccgctgttcagcagtccatggtcggccataaaagcctttttttgtaaaaaagcggaaaatgaagcaattaatggcgctacttgcaaagagcgctcttttgaattctatcaaaaacaaaaggggggacccttttgttttgcaaaaaatttttgagatacaaatccatgaaaatttgttatccgggggttttagaggtcgctgatcacgaatctgacatctaattcgaggtcttggaccccaagaaccccagggaataaattttcatgactaaatattaaaaaattttgcaaacaaaagggtccccccttttgtttttgctttttgataatttcaaaaaggccctctttgcaagtatcgccgaaattgattttcatttgcctttctttgaattttcccttttcaggcgaagtcaaattttggaaaggcatccggaagtgaaggaattctttggcattggtcggtggtcattcaaaccttcagaagacaaatgccacctttttctgactgtttcagaccaaagcttcaaatatgtcgttgtttcgatggtccttttccaattgctcatggccttctttctcaggggtaattaattcattattaattggcccattaaagttttgatttaaaaatgatcgacaatgtcgttgatttcatgaaacaaagcttgacctgatgaaaactaacaattcttaaagttttgccttttcagattcgcattggcttttggtttgcctccaagcgtatttcgtcggtggcactttgtctcattcgctgactttggtttactatttttcttcctttttttcctcaaaatccatccccaatttccaatttatttcccaatttttgtaggctgtccacgagtgctcccacaatttgggctttggccattccaaaatgcttcaggtgagccaattcggctctgttgcagttttttcaaagcaccataattttttctcgtatcgtccaaattaaacattctttgagtcattcgataactctaaaggttttctattagcctataaaattaaaaaaggcttcgcattatttccatttttttgaattttaatttgctttttcaaccctcatggaattctttgcttttttatggtcgtataaattggcaataagtcgccatccccccccctgtttcatttgttcgtccgtccctctcagaatcgtctcctcggcttcgttgccaatttgccccatggcatcnccatgtcgatttcctcaggaaatacatttg

SEQ ID NO: 22709 - DNA, 1231 bp, Heterodera glycines
ttagtagtatagggacagaaatcttgcccccccccccctgggcagagagatgcgcattcaccataggagagttgagagaaacagagaaaaagagtaatttctaaaacaagggaaaacgattaaaatgtaaagagaccccccgaccaataagtttttgtgtaaaaatccctgtttatatggtattgcgggtgctcctcatcagggctggagcgcgaccgagatccgcgattcgcggcgttttttttttgcgcgatccgcggtcgcggccgcggcaatttgaatgcgcggccgcggtttttttttttgcgcgatgcgccgcgcattttttggttgtaaaatttttataaagaaaattttttgaagcgatgtcttttttgaatattcaaaatttaaatgaaatttttttgaaaacttgtattattttctcaaaaattcgttttaaaattccaatttttccccgtcagagctgacaaaaccttaatttttctttaaaaaattggctctaaatcacaaaataggtcattttttacaaaactttaaccaaattgcactgaaattttcaaaatttttcccggcgccgcctatcggcaccgccggatccaccccctcccatcagttcccaaaagtttttagaaaaatcgcgccgaaaaaagctgtctgaaaaacaaaaaatcataggatttccatgaatggaatcctttgcaaatttaaacactgactcaccccctcccccattcagtcccttcccgaattttatatgcatcgtgattttaattaatttttatataagaaaactttaaaaaaatgcgcggtgcgcggccgcggtttttttctgtgcgcgctccagccctgcaccggacccacctcccattccccaactttttttggaaaaatacaccgcaaaaatttttttttgttaaaaatctgtttttcagcccgatttcactgaaatgtatgatttgataattttttccccaaaattgttaaatccataatgggatctgaaaacggacgacacccaactcgtactaggtatgaccaaaactcgtaaaaaaatttcgtccataactttttcaaattggataaaattttttgaaacttggtatattgagagagaattataaaggctatcgaataataccaagaatgtttaatttggtaactttgacaaaagttgtgacgatttttttttgggaaaacggtacgagttggatttttaccgtaaaagaca

SEQ ID NO: 22710 - DNA, 2788 bp, Heterodera glycines
tttttgattaaattcttgtcgaagattgttttcaaattggttagattttttctcctctttaatttcataattgtattcgacctcatttttcaatttcagattgtaataatggaaattactaaatttgtttttaccctttttccaaaaacattttgaattatcattcagaattttgacgacggaaattaactcccttggactatctccataataaatagtaaatattggcttaactgctgaaaatctattggccaattcagagcttttaccttaaatatttatcagattttaaaaccattaatataataatgattgtgagatacgataatttactcatttaacacatttaattgttctccctaatctatcattaacaaatgtccctggggcgaaacggggcggtcccttcaattgttatcctccccccgtcgttctcctctgatcacttttgggatttggccaatccaaattgcgagagggaccccctcaggcgtccctctgttcccgaggacgttctgggctggggcccccagttgtacccctttattattacccaataaaggactattgttgacggtataccatttgtactggggatgcgactgggaaaagggccccccgctacactacgaaagttatggaggtcccgccctcgggaaaatgttaatgaaaatatgtaaataattggcaaatattaaaccaaattgatataatgagtagttttgtgaaattaattattatttttaatagaatgcaacagtaaaaaacatggaatgaataattaaaaattagttaaatggcagtgatcacattaacaaaatgtgtttaacaacttaaaattcaattctcaacatttcgagccatcgctcagacggcagttgccatttgcttggctaaaagccgagaaaaaattgaagaacaatttggcaaaagagagaaagacttacgacagaaagaccgcccaaagtgggatgagcttggctcccacggtgaacgtggcgaaaagtgccaatgttgttggcacgcttggagcgcttgaagcaacatttgtcaaaaaacaaaaacagggcacaaacgacaatgccaccacaaataagcccaatgaagaaattgagaagagtaaaaaggagaaaatgaagttgtggcagcgaaaagtagttgtgaaagccgttcggatcgaccgacggaccaaggcaaatgtttgggttgtcaaaatgtacgggttcccaacaacgattcgggctggcacaaggcattttgcagacggccttgggttcccaaacaatttcaagcatttttttttagactcaagaaataaattaagagaaaagtttaataaaatgggaaaaaggaacacaaattggaaagatgagaaatggatttggacgattaagtgaaatgaatttgaagaaaaaacattcaattgacaaatttccgtcggcttattcaatttcgcacctgcaaaattgtccttttctctcagttcagtgtactatttcgcactttttgtgttgacaattgcacaattttattcaccgttcactctcccacccccacccccctcttcccatctctcagcaccaaattttcgaccaatttcttggaagtgaaaggaaagagtggggacaattggccgaacttcggcctatgaacattgcttcaacaggcgccgttgtgatgatcattaggggccgattggaaacaattagcgggatcagaaaggggattaaagaatgtgactaacaaatgtttaatgggaaaaatttgccaatcacgagaattgggccaaaaatgaatcggctggccagccttaaagtgatcaacataacaattaatcaggaatgtgttgcgaaaatcgccaaaatcgcgaaaaaggccaatcctctaaacagagtaattaattagtaaaagacgggcgaagtaaagtcataaggcaaataatgaaacatttgtgctcaggcgaaaataaaagctcatttgggatcccgttaatactaggccatttgatttccactctcgagactctcgacttaagaaaatattaaataattttcactgattaaatattaactctgtacaatttagtattaaattttcacaattttagcaaaaagcaatcacatatttctctaaccctagttctacaaaataaaatatcaccaattgatttgcactttactgactgatcagacacagctgaacggagagtcgaaagtcgttccaaaaaaaggcaccattggcccaaaaagcctcattacatcaaagagccgttaataattaattaaattaatccgaaatgaataatttttactacagtcgttaagaaccactaattggactaaattttaagtcggagaagattggcacgacatttccaacgcctggaaacactggaaaagagggagattttcaaattggacgcaaacaaagaattgacgggaaaagaagcaaattggtggagattgattggcacgacatttcggacacgcggacacattgcgaacagaggacgaaatttatcggacaaaaacaaggaattgactgaacaagaagagaaggtgactttttgttatcttggaaaacatttttgaaagggctaaggtggtagaagtttcctcattttccattcatttggtgcgaatacggtattaaaattgggtacttttgaaaagtgccattgcttaaaaagcgagtgtctgagatatgtttaaatcatcagatttaatatcgaattggctgacagaaaaaggaaataaggttactaaattcctggcaaaaggaacagaat

SEQ ID NO: 22711 - DNA, 1465 bp, Heterodera glycines
  unsure (1)..(1465): unsure at all n locations
tgcattaattttatttaccgaccgaattccttctcccttctagagtccgtncaattntgaggatattcgggnagactttaacaaanganaaattgnttttggaagggnangnagnngnaaatgtanngnataatgagtnngaaaggtaatttaaaaaaaaaattagtggatttaatnaaattttatggtnntngatagnagnannatttgtggnatgnagttnattagagaataanttnagggggnntttgttnttnaggnantggnnaaaagaagaatnnaaaaaagngtaaaataggggggggggaggagagaaaaaagaaaaaaaggangaattaaaagggangattggagagaggaagaataaaagntaatgaaattggaagaagcaaaatccttttttggacccaagaaaagtccctaattagttaaatgcaccaaaagtttattcaattatttattggaattttatgggaggcatttccatcgataaaatttgtttggccatacaaaaaaggaaaaatcagtgaatttgtgtgagcatttcaaattgtgtgtatgcgtaaggaaactgagagccgaaaagggaaattcagcagcaaaaaatgcaattcccatgccaaattgaattttcaattgtaaaaatgcgctatttgtactgcccaatttgtacccatttctttgtttgtttttgtggtgcgaaagaaagaaaatgttcacgcaaatttaacaacaacaaaaaatgaaagggaaatgaaagattggcacaaaagaatcaaataattaacagcgcaaatggccataccaacgagggaatgcgattgtgtcacggatgttcgtaatgccaaacagtgcctgcatcagccggtcaatgccaagtccgaaaccggcacttcgcgggtggccccggcgccgcagttccacgtaccaatccaaatttgagttgggcggaaggcgctccgaaagtttgtccgcttcccactcgcgcacaccaccgccagccaattcaccgacttgggggacgagcaaatcgaacgactcggtggccttagaaaaatgaatttttgtttttggttaaaggggcaattcttaaccaaaaacatcaaaaagaaaaagggatatgtgaaaatgttttcccaaatcatttcccccatttacatcaaagttttgccctctcgaatcgcaccggcgcatataaaagggcttttccgctgcggggaaatgcgtgacgaaaagcggccctttgaacgcatcgattaactgaaattcctcccgcctgctcaatgagttcgtccattcatgctcagaacgaccaacaattttcacagcttcggagaaagaaacacggggaaagggacgtcgaaagccggtcaaataatcgaaagcattgttcggtttggtcacgttgctcattccggcttccttcggttgatcattttcttcattcgaatttatcgctttgcaa

SEQ ID NO: 22712 - DNA, 1010 bp, Heterodera glycines
gagctgcgatcagccgcaaaaagaggtcactaaatttgtcttccaaatataattatcaccctctctcatagccaccgcggctcatcgttaaactttagcgtgcttcttaaattctctggagctgcgatcagcccacaaaagaggtcactaaatttgtattccaaatataattatcaccctctctcatagccaccgcggcacatcgttaagctttagcgtgcttcttaaattctctggagctgcgatcagcccacaaaagaggtcactaaatttgtcttccaaatataattatcaccctctctcatagccaccgcggctcatcgttaaactttagcgtgcttcttaaattctctggagctgcgatcagcccacaaaagaggtcactaaatttgtattccaaatatcattatcaccctctctcatagccaccgcggcacatcgttaagctttagcgtgcttcttaaattctctggagctgcgatcagcccacaaaagaggtcactaaatttgtattccaaatatcattatcaccctctctcatagccaccacggcacatcgttaagctttagcgttcttcttaaattctctggagctgcgatcagcccgcaaaagaggtcactaaatttgtcttccaaatataattatcaccctctctcatagccaccgcggctcatcgttaaactttagcgtgcttcttaaattctctggagctgcgatcagcccacaaaagaggtcactaaatttgtattccaaatataattatcaccctctctcatagccaccgcggcacatcgttaagctttagcgtgcttcttaaattctctggagctgcgatcagcccacaaaagaggtcactaaatttgtcttccaaatataattatcaccctctctcatagccaccgcggctcatcgttaaactttagcgtgcttcttaaattctctggagctgcgatcagcccacaaaagaggtcactaaatttgtattccaaaaatcattatcaccctctct

SEQ ID NO: 22713 - DNA, 1555 bp, Heterodera glycines
  unsure (1)..(1555): unsure at all n locations
aggcaattttnttgctaaaaccgacccctgcttcttaggggcccgggactcaaatgtcccgcttaggcccctaaattttctatttccggaaaaaaaccgaaatttttccaaaaatcccaccaatcgatagagctcgaaaaacggctgcttgaaagtggtctccgttttccccggaaaaatcggcaaaaaatcataaaattcaaaaaccccaaaacctcttagggggcctagctcgagaaattttgaaaattttcgaattttttaaatttgaaaaaatcgggcttacaaaactctacaataagtccgctggccaccccccgctcagttcaaacgctaatgagttattcgcccggtactgaagtggacaaagttggtactgaatttctagccaagtctacaggctttcctattataggtagaggcctggaattttttttgttttttagaaaacacttcaacttaggttcctaccagcagacattttttggttcaggttttagaaaaaaagttatgggcgttcaaacgcacgcaaaaatgggaaatgggtccctgggactcagttgtccctcggattaaaaaacctatagttttcccagatgcgccgtctcgagctacccctcggtgcaaaatttcagccctgtacgcttagccgttcccgagattttgtttttgcaaacgaaacccctaaccattctaacatatatataaaaagtttcatttccgattatttttattttaatggtaaatgctaaaaatttgtccccattttttaacagggagaagcttaggtcttcattgttcattgtttttgcgattgagactttgaatctagcagtgttatgggttaacaaaaacagaaaatttggcctcaattttgatcaaaatgtttttaaaaatattcggccattttacatataattggtccaaaagccaaatattcaacttttttcgactttaggagggcatttttctaatagaatagaaaaaatttcctatagaaattgtaaaaatgcttcaataagcctttaaaagtgccggcatggtttcagtggcatctaccccaattggtccttacagaatgtggccaatggctttttcatataaataaagaaaaaagtttcatttccgattatttttattttaatggtaaatgctaaaaatttgtccccattttttaacagggagaagcttaggtcttcattgttcattgtttttgcgattgagactttgaatctagcagtgttatgggttaacaaaaacagaaaatttggcctcaattttgatcaaaatgtttttctcaatattcgtccattttacatataaacggtacagatcgtcagataatacggtatggtatccggtatattaaggttgtctactttagtaaaagttacagttaatagagaacatttatttgttagtgcaattgaatgatttcaaaaattaaaaatttagttactcttctctttagcaaaataatgtttggcaaatatggtatttgatggttttgagaaacgtccgtcccatcctacatgggaaacggtgcgtatcaggg

SEQ ID NO: 22714 - DNA, 1511 bp, Heterodera glycines
cctgggcattaatataatacacttagtctatgaaataactttatcgcatactcgttttgggtcgttttgtggacaacaattctgaacaaataacgaatcgacaaatgaaatttccatatgaagcttatagggaacaaacaaacttacatgcttttgaaaatatggatttgtctcgagaatttttgccggacagcactaaaatataatatattaagcaaataaactacaaaattgcataaaattaggtaagtttcaaataagcaataatgttcgtaaaccaagttttttgagtttgtcagagcataactttttttaaacttaactaattttttcaaaattttacagactatagaggacccttagggctatcgaatgataccaagattgttaggtttggctgccaatgaaaaaacttatagttcaaaaactcaggccacgcgaaaacggcatggttcgcccagggttgccgcccgagtctcccgaaccctgaattttctagctcccgaaccctgaattttctagtcctgaatattatggatcaggaagtctgttatcatatcagtttaatatttacgcaaaaatcagcaaaattagtttcaatttttctaataatttttattgtcccaaatccaggcagttttcataattatatttataaacacatacatacctcaagtttgtgtggtggtacacagcacttctaaatataaatatatatatatatttgtccctttactatctcataaaaaccactgagccacacatacttttaagtgttcatctcgaagtgggtcccagaatttcacctgttgacgacagcagcgctgaaaaaggtctccacattcatttaatgcataacacaacaaatattttgttataatttatcattagggctcccaattattatgcacatgcatattttttcctggactgaatagaaggcctgaaacgtatgcaacacatatgtttagcatgttttgaagcttctagaatgtacataacatgtttccatatgcatattttgcgattttatatgcatatttttgggagccctacttatcactcactcacttacccttaggtcggagcagcaagcctaaaaggtgtctcataaatatataaaattgtaattctaaattattttattgaaaacatacgtaaactttacagcaatcctaaaattgacaatttctttaaaatttaaattaaaaagataataacatattgtttctttgagatttaagaaactccgtttccgatcaaagcattttagccattgaaattttttcacctcattccccagtttaagaaaccccgtttgccgaaatttcatccccgctttctccgctgcccggtttccaaattttagactgacccgacggtgggggtcgactgggcgcccagtcgtcccggtccgtgacccgatacccccccccccccaaaaaaaaccctaccgccgctgacgatttggcggggtttatatcaagcgtacaatcagcgatgattttttt

SEQ ID NO: 22715 - DNA, 1217 bp, Heterodera glycines
aaaaatggtagcagcgacgagtcagagaagagaaaatagtaaggaaatgaagagaaaattttatttttttattcaaaacaatttagtgattaaaaaaagattcggacttatttaaaaataaatttgtaacatttttaaattaaaaaaaatttactgcattccacattgaaatttcttcacggatttgcaattcgtcgcgttccaaaatttcgcacaacattttttggtcaatttgcaaaaatccatccgatttgatcaaagtgtcggcattttcgtcaatgtaaaataaacaatggcaggcaaaattctaaatttgaatgaaaataaagtattaaaaaaaattggctcttgattgagaataaaaataagtgaaaaaaggaacattatggaaaaaatcgatgcgataatttccgcttttaaacacaatttagaaatatcaagttaaattgagagaagtttttctctcaaatttccttactatttttctcttctctgcccgccgctaaaaatggtagcagcgacgagtcagagaagagaaaatagtaaggaaattgaagagaaaattttatttttttattcaaaacaatttagtgattaaaaaaagattcggacttatttaaaaataaatttgtaacatttttaaattaaaaaaaatttactgcattccacattgaaatttcttcacggatttgcaattcgtcgcgttccaaaatttcgcacaacattttttggtcaatttgcaaaaatccatccgatttgatcaaagtgtcggcattttcgtcaatgtaaaataaacaatggcaggcaaaattctaaatttgaatgaaaataaagtattaaaaaaaattggctcttcattgagaataaaaataagtgaaaaaaggaacattatggaaaaaatcgatgcgataatttccgcttttaaacacaatttagaaatatcaagttaaattgagagaagtttttctctcaaatttccttactatttttctcttctctgcccgccgctaaaaatggtagcagcgacgagtcagagaagagaaaatagtaaggaaattgaagagaaaattttatttttttattcaaaacaatttagtgattaaaaaaagattcaacaatgatttaaaaataagtacaaaagtgattaaaagaggtacaaaagtgaaaagaggtataaaagtaagtaaaagaggtacaacagtgattaggagaggtac

SEQ ID NO: 22716 - DNA, 1680 bp, Heterodera glycines
atttttaacccccgcggcacgcacaattcagtcgaatttttgttgaaataaatcataaatttatgtgtcattttccaattatgttttatttgccattccgtcaataaaacagtttcttctctgctcgaggcaatgacttgtcaaatgacttgcccctctccgttcccctttcaattttctctcaattaaatgcgttcccacgccccccgggggagtgtcttttcttagtctttcctttccttttcccttcgtccgtccgcccctctttttttgctcattcatttattagccccgtttctccctccgttcctcatttggcagtccgcccccttttttccaaattgaatttgtctctcctttcattccattcatttcctcctcctcctttcccttccttcactcattctttctcccccttttttcttttcttttttcagtcccttaaaatgttccgatcgcccgcacttttcgcgatgtttcttctgatgctgattgtttttcagctgtttggggttggaattgtgcaggggtcgaagcgaagcaaaggccgcgcacggacaaaagaaagcgaaggcatttcgaatcgggggaaagaatcggcaaaagaaagtgagagaatttggaaaaaggaagggaaaggaagggagaaagaaaagaagaagcaatttagaagtggacgaattggagggcaaaaaaacgcagaaaaaggaagaggaggagcaaaaggaggagaaggaaaaggcaaaaaaggaccaattgacgggagagggaattggaatggcaccgacggggggacgaagagcacgtcgagaaggaggagaagtgagaaaagggtcggaggagggagtgggaagggggggggagggacaaatgagcaatgggagagggacatatgagcaatgggagagggacagacgagcaatgggagagggacatatgagcaatgggagagggacagacgagcaatgggagagggacatatgagcaatgggagagggacagacgagcaatgggagagggacatatgagcaatgggagagggacagacgagcaatgggagagggacaaatgagcaattagggagggacaaatgagcaactagggagggacaaatgaacaacgggaaggatggaatgggtggccggccaatggggaaataagaaatggggggatggacaagcaaacccaaaaattaattggaaggtgaatgaacaccgcgaggatggccaagggactgtcactttgagaagggcacccggcgaattgggggaaatgggcacgaagaaaaagcaccgcgaagaaaagaaacgacggatcagacgacgccaccacagcgaaaaatgaagaggaaaaggaaaaagaaggaaattaaaacaaaaatggaaaatttatttaaataaaataaaattaaattaaaaagaataaacatattaatgaaggaattttgaagagaagagattcattcacttaagaatagcggttttattatgtgaatgtcaaatttaaaaatgtacaaaaacaatcggaaaaaacgaagaaaaagtgccgtcggattaacggattataaagcgaaagtgaaacaaaacaaaattatgaagaaaaggacgcacaacggcacaaaatgccaatgcctttggccctattttctctttttttcgtctgtccgtcgcttcgcttccc

SEQ ID NO: 22717 - DNA, 1987 bp, Heterodera glycines
  unsure (1)..(1987): unsure at all n locations
gtntggagacacgtacaattcaatgggaaaaatatcgcggtggtgaccaccaccaaaattgaacacnacatggaagggttgggtactttaacatgacacgatgacgagtgtaaaggtgttgctgaaccgtgattcctaggaatccccggtatgcaaacacctgatttgcaccgatggggcacaaagcatcgggaataatcttaatattttttctaagatggacagtctcaatgtccaattggctcagataggcaaggttctcagtccgtcgtttctgtagttgcttcgtcagtcggtatgggccacagttgttgaatcggcacagcactctcaccaggttgtagtctcgttttcgcgttcgccgtcgctccaatagttgatcagatccagctcgtccactatcaggttgttgctgctgctgttcgatagttcgcaatggcgtgacagacacagcggcgagtctcccgggcaaatcttcaagtccttcagctccacatacagaggttcgctccttaaaaaatgcaaatgaaaatattaatatttagaaaacttaccacactatcccctcgaacttcttcttcggatagcatgttgagtacagttcaacgtcagcgatcagctcaagagaaccttcaatatgcacaggttggttcggatggtcagcgtttgcgatgtgtacacagtcgacagcacaaagtgggttgggatagagacaattcccaccttcaggcccacttttaatttcgtctttcaaacaggtgtacagatcgtctacactgcttagcccgtaactgtcgatcaaataacggattgccctttgcatgcaataagtaggtaaatatggtgtgtcagttttggcaaatgaaaatagcctttattaaaatttaggaaaaaagcggaccaactgaatgcaaacaacaaaaaagcattctttaaatactccggctactggctccacccctttgatcactcgctgtcgcagtttcatactgtatattcagcaattgttgatgttgggacgaataggcgtcgtcaatgaacgggttgctgtaataaccggtgctaccagacccattaagtggattctttcggttcactcgccgtagctgtttaagtatgtatgtgcacagtactattagaaacaaattgaacagatacgagatcggtatccaagcgtccgacatgcgtaaatgactaaaaacaccaccgataatgttttggtcgttgggtttataaattagataattaaagcggacgtcacttgaattggttacaaaagttagcgcacgattcccttttgcatagtcgccaatgtgaaatttatagatgcgctggtctctgatcacaaacacatggttgtccaccaaagtaaagtcgcttttatctggtggaagaaaggcgacaaagttgctcttcaaaatcgtatgtgcggaagattggttttttcgaagccacaaatgctccaggtattcaagctctatttcgctgatccgcctctgatgcttatcgatcagaaacaagcgacccgagaggggatcaaacacaacccgtccatgtttggacagtcgttgcacaatcttctgctggtgaccacggaagatagccgtctcaccagattctctgtcttcaaaaaggttaaaactatacccattgtattcaaaacaggccaatggtgacattttcaccagtgatttcattttgaaaaacacactctgatagctgtgcaaagtgtacacaatttgaagtgaaacggcccattcgctgtcacgctcacacttcgctattcggcatgctgtattccaactataaccaaagtgtagtgctgtcgcatcctttgaaaaggtacgatattttccgctgtcgaaatagttttgattgtcaaccgtcaaatccacatttatcagctccgagtgcaacattaacggcacacagctgaggaggaccagatcggcgtaaaaagcattcatgaaatgaaacatcatttttc

SEQ ID NO: 22718 - DNA, 1719 bp, Heterodera glycines
tctgaattcaagattttttgattacactcctgatgcctcccatctttttacccagtttaaatcaagttaaatatattttaaaaatgttatttttattttatggcatctattttttacttttttaggtgaacaaattggggttaaaatctatactgcaaaatttttccattaaccgaaataatcaagaccgaaaaccggttttagaaaccggtataacagaaaacctggggtaccggttaataaggttatgacgagctattataagttaaaaaatatttttcgcttaaattcaacacaaattcattaattttttcgttaaaataagcattttatcgaagcccaaaattcccggtcccgctcaactctagtatttacgcaaaattttttgccatataaatttgataatttaattatacaaaaagaaaagtgattcgctttgttatattaactaatagcattaccaatgaataaattaattttgaagaaaatcaaagtttgcctatttattttattttaaatatattgtggcaagcttcttcttcgtcggcgcctttcctcgttttttattgtgggcgggcccggaaaggggaccttcgatcggacgagcagttctttaaacagacggtccgccttaatcttaaatggttttttaatgcaatattttgcatatcctcattaatttacgccgtttatgaaccaaacgtgctaaattggaaaatatgaacttttgacttttttgttcgagttcgcgtcttgggtttgaaattagcaatccaaaaatatgctggggcccaaacgtgagggcccaactgaataagggtcgattttttggcgaaatccaaaaaatacacctttaaaccgaaaaattttgaattgttgaaaaaaggctccttagccattgtttgttgtttttaaagtcaattctgaattttacacattttttgtgcattttttgagggttaaaagtcatttttggcagttttaaatgcatattttagtgcatatttggtttatttttagggtttttacggcatatttagccattttaaataatcattttcctaaagttactatcagcagacggtaggtactatgtcgttatctaaagaaccatcacaagtgatattatttaaaaaaatcaccaaataaacaatttttcttatattcttcactggattggaattcagccaatttttttgtcaaaacccttgactttcgtccttttcgaacaaattttttgatattttcaataagatccttcaatctttcttcttcatcaatttgttagttatttttaaattaccctttattggttttgaactaagaacataaaattttggtcgaaattttttgtccaaacaaatgtccggtaaagagattaaagatgttgagactcctacgcaaaatttctggttgacctactccctttttaatgggtttttgattaaaaaaatacagctgaatcaatttcatttaaatttctcgattcccgagtcgagaaatttctcggggtttttgggtctcggctctcttatcgtttcccggggtcatttctcggttctcgtatcctttctcggggtcatttctcggttctcgtatcctttctcggggtcatttctcggttctcatatcctttctcggggttgtttctcggttctcatatcctttctcggggtcgtttctcggttctcatatcctttctcggggtcatttctcggt

SEQ ID NO: 22719 - DNA, 1597 bp, Heterodera glycines
acatcaacttttcaatgtttattcatttttaattatgaaaaaaaaggataaaatttagttcgtagtttggtgttttctgaaatgaaaggcacgcaaaatgctcaaaaatgcacactttttatatattaatttatttattcgtaaaattcaacaaaaaatgcttgcttgaatttttcctatgtttttgctgtttttacgctctttctgatcactgatcactctgtccgatgaccgaagctgttacaacctccctatggtcaaaatggcttggcttttgtggcaaaatcaatacaaaaaattacagataaacccgttgcattgcatggcctgtcaatgtactgtagccaatggataccgttcgccacataacaagtgaaccacgcgaattgttatcaaaaagtgggtataaatttggtatcattggatagagcagcgtcgagcttttttcactttctattaatttccatcctttacatttttttattcttttgcttattttctctaaagaaaaactattatacattttcttagtctaaaaaatgctttttaaaattatttatttatattaaaattaatttatttttgtgtggatttgaacccgagctccaaaaatgcgaatttaaccaactgagccaccaatttttagtgaaaacacagtcaaaatttcgatttttgaggccataactttatattttcctatataccactattactaaaaaaatcacaatagaagtcgaacatgctctctatccaatgataccaaatttatacccattttttgactaacagttcgcgaggttcccttgtaagaacaatttttttttgatttggctattattaaatattaaaatggaacccaattttcaaaccgaaaaaagagagcctgtgccacctgtctctgctttccttgaatccaaaaaggcttgcaaaattattagccgtttgctttagctgtcctgcgtcgattcggagggccgtgcccgtggcatgggactgatctccgcgcccggcctcgtcctgtcggtgtcgcttggctacgcgcgccgtctgctctcggcggactgcaaaattttggccgagctaagcaagcagctcaagttcgagacaaccattggcatgaacggcacaatttggtgcgagagggatgggattttatactcaactttaagagcaaaattctcatttttaatggggaccgccagagatttataatgggtgcgacccaaccctgggaacgggacaaaatttcggccgccataacttggccggcctaaatttcagcaacacagaatttcgccggccgaaatttaaaaaagttaaaacttggaaagtctccaagaaaaaaccttaaatgattttttaaataaagtttcaagaaaaaaacagagtttttagaatttttcaacaaaaaaccttcaaattttttcaaaaaagaatttttagcgattttgtgcaagaatttttgaaaaaattaataattcatcataaaacttgaaaaactcttgaatttttcaattttttgaaaaactcttgaatttttcaatttttcccttggttttcttttaaacaaataagacttctatttttttttattttg

SEQ ID NO: 22720 - DNA, 1108 bp, Heterodera glycines
attaaaaatagtttttattatgctaacagtaactaacgcaaaatagttgcttttttttaactttttgagtatatggcatatatgcaatagaattaattgtttcttaggctccaataatttcagccggaaattggaaagcatttggtgagaattaagttttcgtaatagtaaaataaaattgaaaggattttgttaagccttacatccattaagaaaaatatttatatctaattttataagaaaaggcgacaaaaacaacagtcttgtgtacttaaaattacggggctaaagcgaaattttaatcactaatagcaattttttatttataatatttttattgttgagcaaaatatttttcatttaaaagatttatcgtcttatataatgtgtgtttataggcatgaaattatcgaatattgctaaatatttttactcttatgacgaaatactataatccaatttcgtttcgataattatcgtgtgtctatcggaggcaactaccattataaaaatctttgcatttaaaagcatggaatataaatttttaaatgggaacaagcggatgcgtgcagcaattggttctggcgataagatattgaagctacttatgatttttctaaaatcttttttggggttctttcgactgtcctttagcttcctgcgggcgtttgcacctgactctaaattttttttgaaaatcacaaatagctccagtatctcagccaggaatccactgttgtatgcagccgcttgttgccatttgaaaatttatattccatgcttttaaaaataaaaatatttataatgttaaatgcctgcaatagagacacgataattcccgaaacgaaattggatatataatattttcttatatgaataaaaagattaagcaatattcgataatttcatgcctataaacacacagtatgtaagacaataaattttttaaatattaaatattttgctcaaacaaggaaaaaaatattacaaataagaaattgctactagtgattaaaatttcgctttagccctaattaattttaagttcacaagactgttgttttggtctccttttcttataaaatcaaatataaatatattttcttaa

SEQ ID NO: 22721 - DNA, 2114 bp, Heterodera glycines
ttcataaacagggcttcggtttagaattttcaaaggctcggttttgaaaagtttagataaatttgaaaattttgtgttttctaagccaaagaatttaattgtgataaattttctgacaaatgaaaactttttacatttttgtacaattccagaaaatttattttgttgaagcatttgatcatgcagcagcacacgtacacggaacagcctcaacgccaggcaattaattaatcgaaacttttcgcaatggcataaaccaattggattttgtttagaattaccaatactacccaaatccgcctcccccggtggtgtaagtgccaattgttaaacaatttgaaattaaattaatcagtagggataggaaggaatttgaggcaaattgttttttttaaacaaaaatcgtctatttttaaaaccaattaagcgcactcattagctgcctaattaggcactgccaaattgcttaaggtacgaacgtcgttacgtggagagggacagcggcccgcgctgtgtgccgtgctgctgctgcattccgtgcattccgatccctttgtgcttcgactgcggctgctgaacaccggcggagaagcaaaacgaatgttttgggaaatgcgcgaaaatggaaacgcttttattacaactcatcactcaattaattacataattaattgtcattaatacaaatttacatttgtgaataaattttttcagatctttatggacgtaattttaataaataaattaattgtggtcattcgaaaattcaaaatttatcttatgaggtaggcattttattttccgcaagatttatgcttttttaattttaataatttacaaaatgataaataaatttttttgcaaaatgatgagttgggttttcattggcggatgtgctgactgacgaacatcgatttacgaaggaatttgttggaaaaaagaattaataaaaatattttttcattattaataattttctttcttaattttatatttttcttatccacttattaatgtatataatatatatatatttttttttattatgtgtaatttagcaagtgaacgaaaatttaaagtcactgaaaagctaaaattaattttattattccgtcaattttaatgtttcgcaaaaaactgatcaaaattttattgtttaattttcttttattgccaatattatgcaaaaaaccacaacttcacttcggtactcaaattttaatataaatgattttatgtaaaatgttaaattcttgatacttttgagaaagaaagtctcccgagacttgagccttatttccaaatgttaaatttattaaatttaaatcttttgtatttgtcagtggatttctttttaaaattaccacccttttttcatgtcattagcacttaaaaattctcgccctaattgccaaatttaatttttggtcataatttggcgccacgtccttctgttttaggcatcgatccgctgcatttggacttggaatattgccgtttgtttttcgacccgactttggaccattgcgcccgaagcgaactgagcgcgaaactcagtgccgtgtccatttgcgcaaccatcgagacggatttgaagtacatcgaattgaaaatggaaattttgcagaagtcacgaagtgacagcttcggtttgaacataattcgcggggcatggaaaaattacgaggaaattatggcaaaaattgaggagaaaagtgggggcgaaaggatgggaatggtcgtagtgtgccaattgtggaatttcatggacggcttaaagaaattggtcgaatttatgagcagagacgcggaaaccacgaagaaagagatggacagaacgatggaacagctgagaaagatgaccaataacagaaggtgccgtttaaaacaaatgcaaaattaaaataataataacctattaattaacagttcgcaatgcaatgaattggccaccgtcgaaagtgttttcgaggcgaccaatggccaagtgccgccttgggtgttcgcattccgcgacttcgtctccgaaatgcacttttcatgcctaaacgaactgctggccgtagcggaagaagcgcaacaaaaggatttctccgtttgggccaatttttcag

SEQ ID NO: 22722 - DNA, 1213 bp, Heterodera glycines
caaatatcgtaagattgtttgatagggccagacaagagaaggcaactgttggtaccaagtttgcggtaaaaaaatgagaaaaaagagatagctattttttggtcaagaattttttttgtttgcgtttcaaatatcgtaagattgtttgatagggccagacaagagaaggcaactgttggtaccaagtttgcggtaaaaaaatgagaaaaaagagatagccattttttggtcaagaattttttttgtttgcgtttcaaatatcgtaagattgtttgatagggccagacaagagaaggcaactgttggtaccaagtttgcggtaaaaaaatgagaaaaaagagatagccattttttggtcaagaattttttttgtttgcgtttcaaatatcgtaagattgtttgatagggccagacaagagaaggcaactgttggtaccaagtttgcggtaaaaaaatgagaaaaaagagataaccattttttggtcaagaattttttttgtttgcgtttcaaatatcgtaagattgtttgatagggccagacaagagaaggcaactgttggtaccaagtttgcggtaaaaaaatgagaaaaaagagataaccattttttggtcaagaattttttttgtttgcgtttcaaatatcgtaagattgtttgatagggccagacaagagaaggcaactgttggtaccaattttgcggtaaaaaaatgagaaaaaagagatagccattttttggtcaagaattttttttgtttgcgtttcaaatatcgtaagattgtttgatagggccagacaagagaaggcaactgttggtaccaagtttgcggtaaaaaaatgagaaaaaagagatagccattttttggtcaagaattttttttgtttgcgtttcaaatatcgtaagattgtttgatagggccagacaaaagaaggcaactgttggtaccaagtttgcggtaaaaaaatgagaaaaaagttgtttgatagggccagacaagagaaggcaactgtttgtaccaagtttgcggtaaaaaaatgagaaaaaagagataaccatttttggtcaaaaaattttttttgtttgcgtttcaaatatcgtaagattgtttgatagggcaagaaaaaaaaaggcaactgttggtaccaattttggggaaaaaaaaggaaaaaaaaaaaataaccatttttggtcaagaattttttttgtttgtgttt

SEQ ID NO: 22723 - DNA, 1926 bp, Heterodera glycines
aaaattagttaatattcactatttcaccaactgcacctatcaaaaagatcaaaaaatccctttatttatataattttacaaaaagaaaaagaaataattttttggcgaaaaattcaaaaatttcattattgtccaatacaattggaaaaattttaggcaccgaagaacaaaaaagtttaatggtacttgaaaatttgactgataaatggcatttcattgtcaatagcattatcgggttggaaattttgcatatttttcttctttttgtattgttagttattgaaaaatatcaagagaattatcacctcgaattatgtcatgaatttttcagaaattttcattattcgataagggggggggggagaggcgtagtgcgctctgttcgacgcgtttttgatgttagtgtgcccagagtgagcgcaggcgtcgttcaatatggtcgccagaggcgaaggagtcgccggaagtgtcagcggcggggggagataagacggcggagggggcggaaagggcggcaaaaagggggccaccgggacggagatcacttggggccgtcggaagtcgtctcttccgttgcaatttttgatggttattttcagctgaacacaattttcatcgttgtcctcgtcacaaccaattctgaacaagaaaatgaaacagaaatctaaaagtaattaattaattaattgagctacgtttgagggcatcgccacggcaagtaaaattttggtgccgacgccataaaaggagaaaagggcagcgaaagcacggggaaagggccgccgccgcccccgcagctgtcgcacggggaaagtgcccccggcggaacacaacacggggaagggccggcagacattccgtcacgcttgtcgggttgagactcattctcatcatgtccttcctctttgctttctggacacgaaaaagaagggaagcacgggggcatcacaagcgaaggctgacgccgaaaacgaaagccgcccttaggacaaaaagaaaagtaatgccgaaaatgaaaatgaaaagccgaaattggcaatttatcagtgaataatggtggcttattgttgatcagttcactcacattcttcggctcactaagcccagctgaataacagcaaaaggcgaccattaggaaaagcattcgtcgcccaatcagtgccatttgtctgtcgttgcgccaatttgtgcattcactcaaccgagacggtgttggcttttagctatggctggttgatttgtcgactgagtggtgtgagttagtggtggtctgtcgcttgatcagttcagcagagtgtacctctgccctccgtcggattctgctgatctttcggcttggccttccgtgcccctccctccgtctcttcccttttctctgacctccccgccgtcttcagactgaagaagcggaataaaagtgaccagcagaaattgggggcgtaatttgaggaagaagacggaagaagcaatgaaagagaaaggaaattggacaaaagcggaaggaaaacaaaaagggggaaggaagaggagaaaaaggtgcgaaagagtgaaaagcgcaaggaaaggggggagggggaagaggcggaagagaaagaaagaattgggacgaaaagcgaaagcggaaaaggggggattgtgcaagagatcagatgcagtcaggcggccaattcttttgtcccttttcttgaccacagcttagtttctgtcggtccgatcattgagactctccgccttttacataactctgtctgatcaccacttatttcttatttctttcccattcatttggccatttctctccgattgatcactttcccttcccttttgctctgatcgcatttatacgttgaccatttcatctttcatttctctactgatcactgttcctccacttctgttcatgtccctcttttgcctcgccttttt

SEQ ID NO: 22724 - DNA, 2529 bp, Heterodera glycines
  unsure (1)..(2529): unsure at all n locations
ctgcaggtcgctaccaatttaaanttcgaaaataattcaagaaattatttatttacaataaaagataatgaaagaatcaaaacaaatcaaagaattaattcacagattgtgccgcctggaaagtacaggttgattctgtgggacaaactttctgcggatggccaatcccttcaaaacaatcgttggccaaatgttggcgaccgatcgctgtgccatcgcgacgaaattttctgttattattgtgcagagccggataatttgttgttctacactgacgtcattaagtttcgtctgaatgaattggaaaaatgttttgtgaatttttacacggtcgaaacggacgaaagaggccattttttggtgtacaaaaggaacaaaaaagcatttgatcaattcaatttttacattttgccattgaaaaattcggtaaaaattttttttaagtatttaaaaaagtgcaggaaatgagaaaaagaaaaacatttttttatgattatgaaaaaatctaaacagaatttttgttttacaatttttacgtatttttaaaaaaatgttttcgattattcgtctgcgttagtataacataatatgacttatattgtaatttaataataatgatatatttatatttggctgatatgttttccaatatatttaaattatttgcttatttctattaattttttgaggttccaatcagtggagatgattttgttccatacgctgaacataaaataattgtaaaagaaaatctaagaaaaaattttttcgaccctctcaatttggttgactattttgaatcgtcaaatgattggaaaatgaatgtgctcgatttgctgaaccattggttaagtgacgaaggattttcctatgaattatcggaaaaggcaaactcaaataactaattaattaaaatgttttttgaaatttttaaaattaattttatcttttttaatttttaaataaaaattattcagcaaaatttctttctgattgccaatttcaaatatttggtcgattttgccgagcagcaaaagattttccggcagaaaatggagacgacaaaagcgcaattgctcggcattttctgggactttttctccgaggcagcaaaagcgaatttattatggaagagattgcgatttgcggaccagcgaattgtcgagttggtagaccaattttgcagaattgacaagcaatatttgttgtcacattcccaaataacactggcattacgagtaagcggcgaattgaaatgataagaacaaaattttatccgaatttttgtaatgcctgagaaaagattcccgagaaataaggcggaaaataaattttctccagaaataccattttagaatcgcaaaaagcaggaaaagaaatttttagaaacttaaagaaaaacaaacccttcgctgcatttgttacacaaaattttaaaatttatttagttagtattgcggcgaatatgtgagggaaaacgacctaatttttcacaaaagttccgaaataaatttttatcataattaccacttttatgaccaattttaattaattggttcaatttgctcccaattttgcttatctcatagaatgtggataatgcaatggcattttgccaaaattggcttgttgcgtgtgctaaagcagcaaatgccatgcaaacgaccattgtgatggacgcattttcgcattggatttacagcggaagaccaccattaaatggggctattgaaattgttcatttttggattgaactgttcagcaaaagaacggcaacaaatgacatcagacgaatgtgccgatggcccgaaatcgataagaatcttttccggcgaatcggtgattttggcactttttgaaagtttttacaaaaatcgaaaaacttaggcattctctttgtcgaagccaatgaaaaatatgcactcaaattgaaaatattagaaaaaatcaaaggagtcagacaattgttggacgaaatttgtgccaatgtaaatcatttgtcattgacatgttgtgcacataattctttgcaaattgcgatggaccaatggaaaacgacggtttgcccaaatggccaatttcgagtgggttttctgctgatttgggtagaaaatctctttgttctttcttatgcatttaataattatttgtggaggggggggcacaggaaggggagggataggaactaaatctccaaaattatagtaaattaaattatttaaattattataaaaaattaaggcttttttgagctcattgttgctgattgtaacttattttctttcttttctctttttctggtgaaattggtagcaacaattgttttgcttcatgaacagctttcgaatgatagaatatttgtcaaattgtcaaatcaaatgaatgccctccctccgctacttctcgaacatcgagtcgaataaaggacgagaaagtgccgaccgattagagcttacatatttttttgcaaagctgaaaattaacatttatgcgtatggtttggtgaagtttttagtgtatattttaagc

SEQ ID NO: 22725 - DNA, 1198 bp, Heterodera glycines
aaacatatttcacatttcacttcataactttttgagttcgtcacggatcgagaccgggataagtccattggaaagagcagctcgagctctacaagaagctatggaaagaaaaaaatcgacatttcagggactttttcagaaatcatatttaattccccaatggggccccattttgggtcctcagccacagccccatgcttctcccaattttaagtcttggatttgtcaaataaattaacgatttcgaattaataataaaaaattctattataattttttttttgtagagggaaaaattctgaaccaaactactattttaaaacccaatcaaaactgggaaaaaatttgaagtcaaaaaattattcgaatttctccaattttgtttccataatttccgaatgttattcggtatcataatgccaaaccaaaacgaattcgttttaaaatattcttttctggacttgacttggtttctcaatatcgaagcttttttctccgcaatttctaaaacgcttataccaaaccctagatttttggttccgatgggtttcagaaaaaatcccgtgtggtgaaaacatatttcacatttcacttcataactttttgagttctgcacggatcgagaccgggataagaccattggaaagagcagctcgagctctacaagaagctatggaaagaaaaaatcgacatttcagggactttttcagaaatcatatttaattccccaatggggccccattttgggtccccagccacagccccatgcttctcccaattgtggcgaaaacaatatttcacatttcacttcataactttttgagttcggcagggatcgagaccgggataagaccattggaaagaacagctcgagctctacaagaagctatggaaagaaaaaaatcgacatttcagggactttttcagaaatcatatttaattccccaatggggccccattttgggtcctcagccacagccccatgcttctccccaattttaagtcttggatttgtcaaataaattaacgatttcgaattaataataaaaaattctattataattttttttttgtagagggaaaaattctgaaccaaactactattttaaaacccaatcaaaactgggaaaaaatttgaagtcaaaaaattattcaaggttctcccaattttgtttcccataatttcacgaatgattat

SEQ ID NO: 22726 - DNA, 1302 bp, Heterodera glycines
  unsure (1)..(1302): unsure at all n locations
agtaagtatataataaaaataatacttnaatatttattaaatatataatatatttttgattattgtntggtctgagccatttactttctgnagattttttggtcattatacagaaaatatgtaagataatttctttattataagaaataaaataaacttataaaatttaaatgtatattttggaagatattttttgcagtaaaaatatttgtattttaattttatttttattcaattaattcttattgtataattttcacttcagatattgtgccttataacgtgcattcaaatccgctttgaattcctttaatccaatttttgcgaaatctttaatgaccaaatgtgaacagtttggttgttgttgaagaaaagaatttgcttcaaactaaacaaaaatgcttttgcatttttaaaattattatttattaaaaatacttttaaatttttttaattataattgctcaatgattaccattttgctgtgtgtgaagcatacaatttttaaacaaatcgccggttgaacaaagaatataagaataattggaattgcaatcattttgaatgattaagcacacaatttttctttgcaaataattaggcacattatcaattttatttaagagtataattagtatatgtgagaataaaggacaaaagtgacaaaagtagtgcttattattagggatgtcaattttatgtaaatatattttttcctggattctccatgctctaaataggaataagaacaacactttcttttttgtgtttgcgaacaaaagttgggacttttatttacatatgtttacatatttcggggttttatacatattttacatatttcgtgagtttatgcatatttagtacatattttggactttttcggactttttcatacatttttttttacatattttgaggattttttgcagaaattattggaaattctcaaaaaaatccaaaacttcggcaaatttttcttacatatttccatattttttttttacatttttgaaaatttataaaatttcttgtgaaaaaataaaaattaaccaaaaatcgatttttcaaataacttatctggttctacgcctatttaccttattttatgacattttgtgcctatttcaccctttctgaagaatttttttttccaaaaaaataaccatttaaaaaattttatttacatatttggtacatattttgggtttttcttacatatttcgggatttttttttacatatttatgtacatattttgaccaatttttgtacatatttttgacatcccatacttattata

SEQ ID NO: 22727 - DNA, 790 bp, Heterodera glycines
ttgattttttttctttttgattattttaattatattccatcctgaaattttttaataaacattttcaaactttcaccttattaatttaaggcgaattttgccttttttaataaattctcttgtgaaaaggcaaaaaaataggctcttttaaatatgcctatttaaattactttcattgctttcctttcgcttacgaccataccacgttgaaaccacgccatcccgtccgtctgtcaagttaagcaacgttgggccttcttagtacttggaacggagacgtcctgggaatcgaaggtgttgtaagcttttttccttttttcacttgtaaatttatttaaattttcaatttttttagcttttttcgaaaatttttttgtctttttttcggcaggcactgcctctgacaatgttttttatttatttagaaaaataaattgattttttttctttttgatttattttaattgtatttcatccttaaattttttaataaacattttcaaactttcaccttattaatttaaggcgaattttgccttttttaataaattctcttgtgaaaaggcaaaaaaataggctcttttaaatatgcctatttaaattactttcattgctttcctttcgcttacgaccataccacgttgaaagcacgccatcccgtccgtctggcaagttaagcaacgttgggccttcttagtacttggaacggagacgtcctgggaatcgaaggtgttgtaagcttttttccttttttcacttgtaaatttatttaaattttcaatttttttag

SEQ ID NO: 22728 - DNA, 1092 bp, Heterodera glycines
taaggggaaattttccttttttaataatttctcttgtgaaagggcaaaaaaaataggctcttttaaatatgcctatttaaattactttcattgcttccctttcgcttacgaccataccacgtggaaagcacgccatcccgtccgtctggcaagttaagcaacgttgggccttcttagtactgggaacggagacgtcctgggaatcgaaggtgttgtaagcttttttccttttttacttgtaaatttatttaaattttcaatttttttagctttttttcgaaaatttttttgtctttttttcggcaggcactgcctctgacaatgttttttatttatttagaaaaataaatttttttttcttgttgatttattttaattatatttcatccttaaattttttaataaacattttcaaactttcaccttattaatttaaggcaaatttgcttttttaataaattctcttgtgaaaaggcaaaaaaataggctcttttaaatatgcctatttaaattactttcattgctttcctttcgcttacgaccataccacgttgaaagcacgccatcccgtccgtctgtcaagttaagcaacgttgggccttcttagtacttggaacggagacgtcctgggaatcgaaggtgttgtaagcttttttcctttttttacttgtaaatttatttaaattttcaatttttttagctttttttcgaaaatttttttgtctttttttcggcaggcactgcctctgacaatgttttttatttatttagaaaaataaatttttttttcttgttgatttattttaattatatttcatccttaaattttttaataaacattttcaaactttcaccttattaatttaaggcaaatttgcttttttaataaattctcttgtgaaaaggcaaaaaaataggctcttttaaatatgcctatttaaattactttcattgctttcctttcgcttacgaccataccacgttgaaagcacgccatcccgtccgtctggcaagttaagcaacgttgggccttcttagtacttggaacggagacgtcctgggaatcgaaggtgtgtaagcttttttcctttt

SEQ ID NO: 22729 - DNA, 1460 bp, Heterodera glycines
tttctatttccgggaaaaaaccgaaatttttccacccttttacgagtcgatagaactcgaaaaatgatgttttggaagtggtctccgtttttcccagaaaaatcgttaaaaaatcataaaattcaaaaaccaaaaaaacgttttttaggcctaactcgaaaatttttgaaaattttcgaaattttaaaatttggaaaaatcaagctaattatgctctacaataagtccgctggagccccctcgctcagatcaaacgctgacgcggtattcacctgggactgaagtggacaaagttggtactgaatttctcctattttctgcagcccttcctactataggtagaggcctggaattttttttgacttttagacaacacttcaacttaggttcctaccagcggaaagtttttgattcgggatttagaaaaaaagttacgagccgtcaaacgcacgaaaaaatgagaaatcagtccctggtactcagttggcccttggaccggaaaacctatatttttcccggatgcgcctcaaaaagttgtaagacccttccactactttcagggcgctcccggtcttcggccgggagattttgtttttgcaaacgaaactccttgtcaatataacatatatagtaataactagcgggtgcgtgaaccgttggcattttcgctgggaaaaagcgcttcgcgctttgggagcttcgctacctagactgtgaagcgattcaaattgatcgatttggttggagagatttttttgaatttttaaaaaattattagaggcttttagtccacatcgaggctcaagacgggcgcttcgcgcccgttttttaaatctgctgaacttacacgggagattagcggacgtgctttttgtagtttttgaaaataaaaaattattttaccatttgtataattttaaatttatttaaaaactcaagtataaaatattaaatcattattgaggatatgcattattagagcccagacagggcatgatcttgtacaggattttcccagaccctagtctggctcctgtttttctttatttaaaaaaactgttaagcccttttaatctggaatcctgcccgggttcatcttgggtttccgggtcctgtttttttcaaaatttcgtgctctagtttttggccgctgaattcagttgaaaagcctgtgtggtttaccaagaagctttcaagaaattaaaacgccctcatttccgtaatccttaatctcagtgtccaaaaacgccatcatttccaaaatgcgtaattgcgccttgcgcccatccctgtgtaagtgggatctgaagaccggcgttgccggaatttaaattaatttcactggtaaatttaagcccagtttaaaaatgtaaaattaataaaaaattatcagtttttgtgatcagtaggactggaaattttaatcaatcggtgaaagtatttttatttacattaattta

SEQ ID NO: 22730 - DNA, 2231 bp, Heterodera glycines
agaaatgagctgctcacaaatttgcgttatttagagcatataaataacccattaaatcgccaattaatttaatcgtcgttaattgatttgcctttcaaatccaaggccaatcacacaaaaatctgtgtcggcctttgcaattcaaatccgcatttattttgtgttaaaatggcgccatttcgcctctccgcacttcgcggctttgtgctgtcccatttggcaatgtctcattgctttggaggaagtgttaagcagaaatgccatttaaggagtgtcgatggcatttgagtgcttttcctcttcccctttgaactttttccctcccttttctcttttcccttttcttttttgacctttcctttgctttacttattattattattattattaattttcccactttaaactcattttaatgctttgccaatgaattaataacgttcattcattccttccttcctttactttatgttttatgtgcacattcattcttttttgttcgttttcaattctttttgttctgtggcgcgttaaaagtaaaagataataatggaaaatttactcattttgaaatcgcattaattggttcaattaatgcattcttgttttattctttttattcccctcgcccttttaaggaatgtcactccaaaatggcggcggattttcaatattctcatcaaaagctcagcaactgaaaaagagggtccaaccaagaaaaagaagggacaacaacaaaaggggcaaaaggtgaagcatttaaggagagagagagagagagaaagaaagaaagaaagaaagaaagaaagaaagagtggagggagagagagagaaagaggggaaagagagagaatgagagaaagaaaggagggagaggtgagagagtgagagaaatagaaagaaagaaagtgggaggagggaggggggagagaaagaggggagagagaaaggagggagaggtgagagaggggccattcatcagcagaccgaaaattatatcacagtgattaattaattctttttgctaatggcgctttttcaaagctttgtccgccgttgtgccccctcgagcagatgaagcacaaattggtggtgatccgtgacgagcactccaaactgttgggccatcgttttctcaattcgcaattgtccctttatttgggctccgtccaattgttcttctgtctgtgggcactcactcaacacatttgggcaatggcatctctcaaaaaggcacaaaacattcttttctttttccttttttatttgcttttccatttaaatttttccatcgctcaattcacaaaatgccactaatatttccatttccatttgcatttaagtgctttttcccaaagagtttgcctttggttttgacgaaatttgactctcagagaaaagatttggccaaagacgctcatcagagagtggccatggcatccggttgggccattaagcgaatttggggggttttacgaaatggaaaaatgaaataaaatggggacaatcaataattgtggattgatgggttgattgattaaaattgatcagttggttcattgattgatcggttgttgctcttttgtcaggtgctccattgcgacttttcccccaattcgtcccttccgccgcttctcactctcgacaatgccgtaagtacaaaagaaacgttcgctcattcgtttgctcacttcgctccatccaaacagataatcttcgacattggcctcttccacaatctttggggcatttccggctgtgttgcacaacatttggacggcggatacggtaaaggaacggttacggtcattggtcacaattgagaaacctgcggagaattccttctgttgctgttttggcattttgtcccaattctcccccttcggtggcattttgtcccccctttcgatggcattttgtcccccctttcgatgacattttgtccccccccctttcgatggcattttgtccccccctttcgatggcattttgtctcccctttcgatggcattttgtcccccctttcgatgacattttgtccccccccctttcgatggcattttgtccccccctttcgatggcattttgtctcccctttcaatgacattttgtcccccttttcgatggcattttgttggcattttgtcccccccccctttcgatgacattttgtccccctttcgatgacattttgtcctccttttcgatggcattttgtccccctttcgatg

SEQ ID NO: 22731 - DNA, 2407 bp, Heterodera glycines
ctgccccgaaaacaaaaaaaatcgattttttcaagtgtccgtttaggggtactcaaacaattatcggggagcaaaaatccaacgcagaattaaagtacaggctatagggaagctattcccgaaggattcggtctccccataaatctgggcgcatcggttcggggggactgccccgaaaacaaaaaaaatcgattttttcaagtgtccgtttggggtactcaaacaattatggggagcaaaaatccaacgcagaattaaagtacaggctatagggaagctattccggaaggattcggtctccccataaatctgggcgcatcggttcggggggactgccccgaaaacaaaaaaatcgattttttcaagtgtccgtttggggtactcaaacaattatggggagcaaaaatccaacgcagaattaaagtacaggctatagggaagctattccggaaggattcggtctccccataaatctgggcgcatcggttcagggggactgccccgaaaacccaaaaaaaaattttttggataaaaattatttaaatgaactgactagataatatttaaaataggttatttctcttcctttcagtattcctgcaaagtttggtgcgcttctgatcagtttctgaaaaaaaagttaagcctaaactttttggcctgtttaaaaaggaattaaaaatttttaaaaattttattcatctccctttttgatagaaaaagcatcagagtgcctaaactaacatgtaaataaaatttggtgcgtttcagaaccctttctgaaaaaatatttaagaattaattttgcaaaaaataaataaaaacgaaagactcagattttcgaaaatttttttgagccagctagctcggcgctcatttcagtgtaagttagtcctttaccggggagtatccctgcaaagtttggtacgcttctcgctcaattagcaaaaaatatgagtgatcgaattttcactaaaaaagttaagcctacattttttggcatatttaaaaagcaattaaaaaatttttaaaatttaataattttcctgcaccgaaggtactcactcggcctcttcgcggcctcgtggggggcgcttcggaccgcagacaaaaaaatttcaatttatatttatttatcaatatttgttcaaacggaatatattaaataaatgaagataaacgaacatgctcagaacggcaaataaaacagagatcatcagacgagaaaaaaataaatagatgaaaataaaaaatcaacttgttagcaggttagaacaaataattttaaataaaaattattacaaaatatataaacgtttttgtgaataataaaaataaataaatttgcattaaaagcatagatttaaaataacataataaatcaaagttattttacctaataaaatgaataaaataagtaataaatgaaaattaaacgattaaaataaattatttttaactgctcgttaaagatctatcaaaaatgttaactaaaggcataacaaaattctaattgatttccttcaaaaaagccaagcttacgagtttttagattagtttacaaattggctaaacattcttaccagtacaaagttttatcagttagtacagtactggagaaacctgaatctgtaattctttttgaaaaaccggtaccggtactggtaaggtgctaaaaataagaaaaataaccattaagaattcttttatcaatctcaatcatttaatattttaacttaatataataagaaatgggcaaaatgttaaaccttgggtgggaatcgaacccactcatgcaccctttccgtgggcagctctaccattaagctaccgaggcacatccgccctttctttttatggatcttatcaacccccgctttccgcgttttaaccgcccagccagcttcttccttacagctccatcctcatcgggaccggtccctcggtccattagttaattgctgctggcgcggtggggcaaccatccggtgctaccaataagaaatgggcaaaatgttaaacctcgggtgggaatcgaacccactcatgcaccctttccgtgggcagctctaccattaagctaccgaggcacatccgcccttaaattgacaaaagtatttagactaattaaacgtaattatttaaaaaaaaccattactaactaatcactagggcttccttttttaacaaatgcttacgcacttaacacgcaaagataagcacgaaaaacacattttccgccgcttggtttggggtgtctccgatgacttttataatgcctatttttacctatttcggggtttttgtgtttaaagtgcttatttaggattttcgaaaaattcctaaataaaaatgcaataaaaacaaaaaatacacccctaagaaatgacccaaaaaaatttcagaa

SEQ ID NO: 22732 - DNA, 754 bp, Heterodera glycines
ctttcaattgggcaccgtaggacagaaaaacattattcacacagagcttgtttggccacttaaaaaatatttccgtgaccatcacataaatccaaaatgactatggcaatttggagttgaattttctcgtgccgacatttcttaaaaaactgccaccatacgcatttcttaaaattgtttcgaaaaatttcaaataaataaacaaaacgcttcttgaaaaaacgcaaagaaaaattttcagagaaaattaatatttctaaagaaatatttttaaaataaaaaatgtaacacataaaaattcattactttgctcaaatacaaaaaattttattattagattttttggccataacctttttttaaaatattattgtttatagattctataaaggatttcaatttctaaatacaaaatttaattttgttgcatctaaaaaaggttaagcattaaacagctatgtttttgccacggtcatcatattatttataatcatttaaaaaatttttaaaatcatttaatatgcattttagtcaattatttttattattattcatacataatcataaatgaaaataaaaaattggtgtcaaatttttggaattgaattttgccgttctcttcaaattgattgtctcccgtcagcagacctttgttattttacaaatttttttgtttagcttcaggccaaaccttcttagacttgggttgctatgcgaaagacaaacattgcgacttttacaacaaagatgtgaa

SEQ ID NO: 22733 - DNA, 1603 bp, Heterodera glycines
ataacgcaattcaagcgctatcatatgataccaagattgtgcaatttggttgcatctgagcaaagttatgagttgatttagtcaaaaatttagcaaatttagcactttttgtccattggccaaccacgaattagtttaatgaactttttttcttcaagcataaattttgttgctttgtaacaaaatctgtcccaaaaaatggcatggttttcagttggcttttttaataaataataaataagaaaaggcttaatttatcaacagattttctccaatttctttatttcaatttgtaaatatttgaaaaatttccattttaattggaatcaaaaacaaaaaaagaaagaaagaaagggacgaagacagaagggcttagccactaagccacatatccaaagactgtatttgtctttaattttgaataattaattattttatttcccctcaaaaatttctcatccaatttacgacactaatttttcgctaacaaataaaacccttctttttatcagtgcatattttttcagttgccttacccgggacctggaaacataccaataaaaactgatttctttcataatttcccttaaattctgattcattttgagacttaattgcttaaaaatgaactgaactgttcgaagccactcatagtttgagctgaaaatgatttgttgttctgacaatgagctccaactgattgggaataacaaattgccaaacaaattgttaaacaaatttgagagaaattaagtaatttctttttaatcataattttttgaattaagatttttacaatattttgagtttattaataccaattagagatcggaattttgcgaaaatacggataagtatcagtattacgtacttgacaccgatacggattaagtacttacggactaaaaatacggaaaatccttagtacataaaaatacgtatcggccgaaaaaaaatacgtattacggactacggatccgtaaaagtacgtatacggatccggtccgtatccgatctctaataccgatggtacggagtcgttatttaaaaaatccatcaatatgatttgatattatataaaacttagttcaaaagcaatagcaataaaattcttaattcttgatattattcgatagcactaagtgttctctaccagtctacaaattttcaaaaaatttcattaagtttcaaaaaagctatggctagaggaactcaaaaaagcttgtttttcgagcatctttggccctaactttttttttttaatttcttgaaaatctttttcaaaaaagggtcttaccatcggtagtattaacataaaaattggagagactgtctatggattcaataaactaaaaatacattgactttgattaaaagtgcatgtaaataaatatgctttttaattttgcagtctgcacacattcattcactttcgacaacacgacttttcgaatgaaacgagaacttgcagatttgattataaaatggggaataacagcggagaagtcgaatcgtacgtgctacgatggcgcgaaggtcggctgtcagacataccagatgagtggatggtaaatgaacactgatcaatcaatagagaccggat

SEQ ID NO: 22734 - DNA, 2704 bp, Heterodera glycines
ttttccgtaaaattttatttttatcaaattgtttatgcaaagtttgcatttaaataaatagaggactatttaatttcgtgtgccgagaaaagtctgaaaaagacaatgaaaatgagtaataaaatagaacataaattgaaatttcagaaatttatttaccccgctataattttccctttaaagagcatatattcacattagactttgaattttatacttttttaaattgtggacctatatctctagaaaatggaatactagcaagttgaatactgcagaaatgttaggccctcgacgaaaaactatgaaaattatagccaagcattaaatatgtatttgactaaggctggaaaatttacattgccagaagctgatcgttgctgagattgatcagcagttagtaacgtggagtgaccagaatcagcatgtggcctagagaaaggcaaatcaacatttttctcttagcgaaaattgttttaataaatatcaacattgacgttgatatttatttaatatcaacataacattatgccatcaacgtaatatcaacgctatttttaaaattgggataattttttaaaatttaaagcaatttttcaaaaatgacttttggcggaaaataagatggggagagagataacgcaaaagtgagagggtgttatattcagccccagtcatacaaaagcatttttggtaaagaagaataaagaaaaatttattaaaaagagagtgttatgggaagagatttaagacagagagaagagaatagagaacatagcgaggaatctgcgtctcttaccaaaagaatcagcgaagaagagacatgactcccttcccattgcgctctctattgaaattgttttctctacctccttcatcaaaaatgttttgtatgactgggactgagatccagcactctctcatttttgcgttatctctcgcactaaaattataaaccgctcatataaattttaaaaaattttcgcaaattttaaaaattacgttgatatttgcgttgatggcataatgttagttgatttaattaaatatcaacatttaaattgataccccgcaaaaactaataaaaaggttgatttgccattctctaatgtggccagcatctctgcatgcattgtccgtaaagtttgaacaggtgttgggtatgaaagaataacacactcatttggaaagtttgctgattccaattggagttttttattttttgttgaaaggcaaataaagatatgcgaaaaatgattttattgattccaaaagcatttgcgagatttattgagtgttcggccacaaatgaatcttttcttgcagaaatgtttttatgtcttacaaaatcatttaatttaatctcaccaaaaatttatcaactattcattgacgaaagttttaaatagtaatttttgtaacaaattctctgtcccatcattcattctttcgtcactgaatttgctttcaaatgaatccgatcattttcctctgatcagatcagcatccgatcaaattccactggctcaatttgactgttcccattgcggtccatgtggccaaaccattcactgttctttgccaaatggtcagccgaagtgccattctttgtgtccaccaaatatgcaatggcttccttcatcgaaatggtgccgcttttgtccgcatcgatctaatttattaaataacaaaaaataaataggattacgaatggatgattcatttttcagctttaaatactagtaaaatttgaaatgacctttttctcactttaatccattcaaatcccaaaactttctatctcactatttttgatcatttttcattttcatttttgctttttaattcctataataatatgatttgcttatgaatggatgaaattaattcgtatataattaccgtatcaaatttttgtcgggattgtttcacctcctccaatggatgcacaaaagttgagttaccaccagccctacaaattatgtccatatttccatattgtgcatgttttggcattaaaatgtcaatcccaaatgtggagccctcatatctatggtcctcaactgttggaaaactcaaatttcaagcgctaggacctcaaaatgtcaaatcttcaaatgccgcaccacatctctctatccatactgtacctgctgcttgcgagacgggcatttggcttcttgttctccggacatccgccctcgccgtccttgcggcaattttggcacccttgcggacagtctttggcatattgtttctcgcaacagtagtaacagctgcacgacacatacaatgtacagtattccttggagcgatcttcgtgagtgagatcaaacgcgcagaccagacagttattgtggaaaatgttgcaccttgggtcaggcacaattggcttacaactaaaaaaattatcaaattacggccaaaactcctatatcaacaccctgcttcaaaaaatattttatttttgcatggaaatgcctgaaaaaaaggaaaaaatgaattaagcatcgttaagatttgagcattgttggcttactcggtggatgatatccgcaagaaaaatgaatacgacggacagcaaaggcaaagatgaggaaaatagcatcacgaaaattaatatttctaccttttgtcaggggtcgggttaggattagggaaaaggaaaaatgaatattttttatatatgacaaaaactttaatt

SEQ ID NO: 22735 - DNA, 2527 bp, Heterodera glycines
tttttttttgctcaaattgttttgaagaaaaggagctccaaaaacgccatttttggcgtaaaaaatttttcatttggacgtcacttttcgtcactagaaatcactattttggcggcttcgtcactaaaatagttaaaaatcactatttgggcgttttgtcactatttttcactatttcgacatttttggaaaattccttaacaaaaatgcaataaaaccaaaaaatacacccctaagaatcgacctaaaaattttttcaaaaaatacacccctaagaatcgacaaaaaaaaatttcaaaaagcactcctaagaaatgaaaaaaattttctcaaaaaggtattttcgtggcaagaattttaattttaaaaattatttttttatgtacctattttgtttttttgcccttaaaaatcccagccctactcatttgcaactgcaaatagtgaataaaaattatttttgctcaatttttggctgaaaattagtcactattcgtcactattttggacttttttcactattttgtcactattttggcactttttcgtcactattttagttaactatttcgggatttttcgtcactaaaagttgctaccctatttattagctttaacttttgggttttattaaataaaaaactaaataaaaatttaattatttaatattttcacttgaaataaattaaaatttgattttttttaattttttaaattttttgaatttttttgaatttttaaaaattcccggttggtcccggttcccggtcccggtcccgaagaaaaatcgaggtcccggtcccggcttctcaggtgccggcaagtcccggtcccggttttgcccaaaattcccggtcccgctctactctactatttttttaattgattgtttttaaggggaaaattattttgaaaaattaaattttcttaaattttttattttaaaacaaataattttacgaagtaattattttagaaaaattaatattttatttaaattaatagattttgatttccctcacttgctgggtcatagactcggcaaatgagtggcgactcgtccacttccgtgtcgttcagctgcaaccgaacttcatgatcacctgcaaatttaaatgcccaaataaaaaatcagattttttaaattgaaactaaatgatttattagtctcctttcaaatattaaacgcactgaccaactctgcgcggagtgaacacaatgcgtcgcgtggttggcccgtcctggtgaatttggaccggcactgtctctctgctgttcacttctatcaatgagaataaattggggcgcctcaagtttaaaaaaaaaacttaagcaaaaacaccaaggcctcaaatttctgaaagaatttttgcttttcaaagggtgcgattttattgggtttggtgcaacacgtcagaaacaatgggaaaacagcaaataaatgcgtgaaggtggtgcccaattggactgtgccatgatttagttttagcgtgaatgagggcatttcaattggaattttcgcttttttcaaatgcgtcctaccgtatgcctgggcctgcacaaccgcgtcagggttcgtcacggtaacgctcagttcaatggggcggtccacgcggctcagagagggcggttcgctgacctgaaaaacaattaatcagtgtttttaagtataataaagcaattagcttaattgtacgaattggattccattttcccacctccattttgcccggtgcatattctgtctctcgcgtgggcgactttggatgagcgccgttcatcacatttttgttggcttttttgtcctttttctttttgccagaacttgaaaaatggtaattaaattgcttgaatctttataaaaaattgaattttttaaaatttttgtcaaattaaaattcatttaattatttcccattttctgcttctcacatcatcgccgcctcgtccgtttggctcggctccaaaatgtgcacttcgaatgggctgcccctcaccacttctttgttgaacctggcaaagtgccaaactcaaaaattgaaatgcttaatcattaaaatttatattaaaaattaattagttattcaaattttacgttatgtgcacagtgtgtgttccggcagtggctgggttgaaagtgaccagaaatttggcggttccgctttcgatttggctgacatgtgatgggattataatgccgtcgtggtcctggcaaaaaaaaataaattaatattttagagttaaataaatagaaagtggtgtatttgttaattaataatttttattatcgttaagattggttgccacaaaaacatattatttttattttttaaagtttttacaacttcaaaataatttcattttttggtggtattgtaaaaatggtttatcaattacaataattaattatttttaataataaatgtgtaaagtctattcaaatttgtgttaaattatgaaatttctaattaatatattggaaataaaagattttttgtgcaaaatattgaaatatttctcaattcct

SEQ ID NO: 22736 - DNA, 1616 bp, Heterodera glycines
gattttctgtcaaattatttcaagagtgaaattctcgactcaattggataaatggcaccgatttggcaattctggtggtaatgccattgattgtgttgtatccgatgctgagattaatgcgcggtgccgagacggcgtgctgacgaagagcaaagtgagcggatgaaccaacacttggccacaaacaacccaaatgaggcgtaggttcgaaatgcgcaacagtccccggtccccgttgttgcccttcgtgtcctccacattgtcaattcgttccacctaagcaaaaccctacggccttgaactcgccagcccgacctttaacaccagcagataaaccaacttacgataaattcgccggcgattagtcgtaataatctgaaagggtcatcaattaatccgatgggcgagaggggggggggggtctttaatttggaagtctttgcccaaacacatggcaagccaaaagcgaacaccgcaacagtaccgggtgtccaagtcgaacaggacgtcccggtcgtgccaaattgagtccgaagcggcaacgtcctttttgcccatttcaacacacaaaattaggtaaaattgcgaatttattcgaaagtttgggaagggtttccatggaaacaatgttatgttatattatgttataaatggtcacatttcacttcaatttgcttccgttattaactcattcattctctggcgaaatcatcagaatttgtttgacgccacagcctaaaaacacaaaaattaaggcaaaggcattttttaatttaaaatggcaattttatttcatttttattgcccccccccctccgttcatttaccaatcgcatttttcatcgcttttccgtaattttccaaggaatttattttgtgcggctgtgctttaattcgtccactcaatgccaatttctgtagttctccaaacatttttcgcactttttctccgttcgccgaatttccgacccattttccaatggaaaagaaatgcgaattgataccctcagcaatttcggcacttttattcgacaattgtcctaaataagcttgttttaatcccccaattttgaagtgctcgtcgctttcccaccatatgaaataatcgtatcgcctttagacagagcggaggagaggagaagggcacttcgaccgccgacgcaatccaacgccaaccgcggcttagggaggcttttagcatctgccctaaacccttttttttggtctgaaaatctatgggatgcttcgctttaaatttcacttttcaaattcctcttcgctaaacacaaagtcggctcccaatgctttcaattcgtcctttagtgcgtcgatttcctttctgtttcgcaccaaattaatggtgtggtagccaaagtctgaatggtccgtccgtcgtttaagcaaatgaattggaaagcaaatcaaaacaattggccaattggatcactgctcggccgaccccgcaatttgacgcattttggaccaaaaagtcgcccttttcgagtgggacaatgtgacggagcatggcaaatgccggtgggaaattgatgcccaaagtagcgggcaaaacctggcaaaaagaaggtaaaagcgtcagaaaagctgcttaatcggtg

SEQ ID NO: 22737 - DNA, 1097 bp, Heterodera glycines
atgcttatgatattggatttgacgaatctcaaaaaatgaaaaatgaacgactgattgtgagtgattggcatttaacgaaccattttcagagagaggagaagagaaagggaaaattgtgaaaagggaaaacgaaggggaaaaaagtgacgagggagggacaattgtaaacaaaaacaacggaaaaggggggggggggggggttcacctttttgagtttgtgccgggggtggaatttaatatatttaatgctattgaaaaatctgtgattctttttacaattcaaaaaagttatttacaaatttcttttctacgtatagagttcttttttcataaaaaattctcatcatccatttaaattgctatttgccaaattacaaaataaattttttacaaatgatatttgtgacgttttattatagataattgatgtaacacaaaagaaaagaagcagggatttgtgccttacattttacaatacatttgattgtgcagttttatcggatggattgttttatttttctgaaatttcgcctaatttcattttgttgcgcgagccctaagcagcggaagtcggcaagaaaaggcgcggaataaaagcctgaagggatgtcaattaggcacgtaattggccaatccgaccgtcacttgcctccacgttgctcagtcggatgccctctttgtttatccgccgaatttgcgtttcgtttaaaagtcccaataacgaaatcgaggccaaatacttgagagagggcggttggagccacatttgctgcagggaattgcagcggcgttcggagagttcgtcggtgcaaccgccaaacacaaacaaacagtcgtcctaacaaatagcagcaaaattggccatttggaatttttaaataaaaatcacgacaatactgacggaggtaagggcagccgaatggaaaaacaccgccttcgccaagttgttgcgcattcggacccattgggcggtgttcatgtcgaacttccaaacgtcggctatcagctgatggcttcgattttgctgaatacccttctctttcgcctcgttcatcacaaaggcccctcacattttgttgtgtttctgcgtcgcgaca

SEQ ID NO: 22738 - DNA, 1254 bp, Heterodera glycines
tgactgattagcgactgatgccgggttggccaatgcacccgtttaaatagggtcgtcggccaagccaaacaaccaaaaaaaaggcacgggcccaacactttgatcacggccgctgatcagacggaattgtgctttgtcattctgatcactttttcgtatttcctgtacagagagagaaaacttcgtgaacataattatcctaatcatcagtcgggcgaaccaattagcagcttcagcagtcgcatttcgttgttcgtcctgctaatttgtgctgcttcgtttcgtcggatgcttttcattttgtaaaaaaatttcccgcgcacctctaaaaaaatgggggaaaggccttaaggcacccaaagaaatgaaagaatcggccgctaattaataagcaaaaaaggggggagaaattgttgtcatttatggagacaaatcaatgagcaaaaaaggcattgatcggacaaaaaagtgatcaattggtgcgaaaaaaacattatgatagggaggggggggagaagaagcagacggaagaaaggagagaacagagcccaaattgggctggaaccaatttatttttatgccactaaaaaactaaacggttccgggcattaaaagagtgaacatttgaaaattgaattttttgtctgtttttttttgttaaattttttatatttaatatttttatttctttttaaattttctcttccaatgctctcttcaaaatttgtgctcttttcaatgtttttctttctcgaattgtttcgtttattctcgtccttctgctgtttttgcgcttattgatcggacagcagcggaaacgataaataatttcagtgcaataatattttttattgaatgaattacccttttaaattgttattaaaataatcaacaaaattctttgttaaaaaattaattcatggaattttatcagacataattattcgcttttttgagtgatctatgaccgaccattgcttggtttcttgaacaaaaaaatcgaagaaaatttgggcatcaaacttctaggaattaatttattataataattttatacgcaaagcgtgacgccgccaaaataaaaacaacaataagataaagcaaaatggtcacatatgagagtggtgcataaatgtgtaaaacgatccaaatcaattgagtcaagaagtttagaaaaaacagttgaattttgtaagctaacttctttaggtaataacctatagaagcgagaagcacgaacaaaaaatgaatggt

SEQ ID NO: 22739 - DNA, 1751 bp, Heterodera glycines
  unsure (1)..(1751): unsure at all n locations
tggcaaattaaaaatttttttttcntnattagcctcantaannttaagttcgataatctcttttcattttatgtcaccttcgttgcacaaagatttggtgcacacgcacagaatggaagacgacgactgaattatttaaaatttggcacaaaaaataatttaagttggcggaaaagcccacccctggcggattttaaaatgcttaaccttttggcaacatttatttaaaagatattaataattgcagaagatgccaaatgacagaatagttaagtcatttgtacctgtgtgttgtgcctgctaattagtggcattttgccattgttttggaaggtcttcttccactattttattattttatgtatttttttaaattttaacatttggaacgattcccaaatgtgcacttgacatatttaattaccccgcccatttaattactcccacccatggcttcctcccccgcgcttttcgctttgccctgcccattgctttccccctttttctcacgtgactcgtcggtgctgcgggtggtcctgccacggtttctgccctgctctgttcctctactgttggtgctgatacgcttctgccgcctcgtcttttgcctttgccaaacggtggcaaaaggcgcgccccggcggtcccttcgacaattaatggcaacaaagggtcggcggaaagacgcgcctaaacaaaaaaccgtaaattatgctaattaaagaatcattagccgcttgcccagctgtccaacggctggcaaatgccgccggcgcctccattttctgccagccgagtcagaaatggcgccagcatttccgcgcttccggcggtcgtgcagaatttgcgtacgcgtgccctcgcggcgccgtctcccgcggaatcggtcggctgctgcaattccgccacggatcggctgtcagcagcgatggtgaagtgcaacagagtggaacaactgttgaacggagcggaaggcataagtgcggatgccgcagggcattccacggcctaaaattgcgcgatgattaagggaaaaggaggggttgtttaaggaataaacccatttcccgcgacttccatttttggcactcatttcccctctatgggtttggcaccctctgttttcccctggcttttccacccaccctttgttggcatggccccgtttcgtcctgtccctcctgcactttgcacgtgtagcagctgaatgtgccgcctccgccgtcttctcccccaattccgttgccattctcatcgccctgttcttgctgctgctgctgcgctgtctcgtgaaaaagcattggcacaaacagaaaaagaacggcacaaattgatgaatttatcaaatggagggaagacatctcttctcactttctaaaaattgagtaaggagcaaaggcttctcagtttatccataatttgtgttaaatattaaaactgatccggaagaattagcgggggaagcgaaaatcaaacaaaaaaagcatttcaattcatttgagccgtcaaagcgccccggggggttgatcagtggcagaagcaaaagcagcagcagcagcagcagcagatccgattgggatggatttgggttgcgcggttctttttttcggcattgtattgccccccggggttgagggattaatcgaacgacgacggacgaacatgacgatgggaagggatgggaagaatgggaattgggggaattggagaggggcaaaagagggggggagggggaaggggaggggggggtt

SEQ ID NO: 22740 - DNA, 1096 bp, Heterodera glycines
tcgatttttttgttttcggggcagtccccccgagccttctcggccagatttatggggagaccgaatccttccggaatattttccctatagcctgtactttaattctgcgttggatttttgctccccataattgtttgagtaccccaaacggacacttgaaaaaatcgatttttttgttttcggggcagtccccccgagccgatgcgcccagatttatggggagaccgaatccttccggaatagcttccctatagcctgtactttaattctgcgttggatttttgctccccataattgtttgagtaccccaaacggacacttgaaaaaatcgatttttttgttttcggggcagtccccccgaaccgatgcgcccagatttatggggagaccgaatccttcgggaatagcttccctatagcctgtactttaattctgcgttggatttttgctccccataattgtttgagtaccccaaacggacacttgaaaaaatcgatttttttgttttcggggcagtccccccgaaccgatgcgcccagatttatggggagaccgaatccttcgggaatagcttccctatagcctgtactttaattctgcgttggatttttgctccccataaatgtttgagtaccccaaacggacacttgaaaaaatcgatttttttgtttcataaatatttttttcagaaagtgctctaaagcgcaccaaaattttatttacaacttaattttagcactctgatgctttagtatcaaaaaggaagatggagatttaaaaaatttttccttatattttggttatatcgttttgcttttggtggggtgcttggaacagtggaatcatgcgcacccgtccgatctggcaagttaagcaacgattgctgactagccaaaaggttcggtgccgtgatgaaacgaaccagcactgcttaccccgcggcactcggcacggtccccgaaggaatggatttaattaaattctctccttcggggatttttttcattaggtcgtccgttagcgttcaattgctctagtcatttttaaaaaattttttgtgaaatatttgtcgtgtctgaggggggggggggggggg

SEQ ID NO: 22741 - DNA, 1612 bp, Heterodera glycines
ctcagttcgctctcaaccacctctaacgaattgtagggtactggtcgggctttgcgatagactggccttgcgtcatcttttagggcaagatgagccttctcctttaggcaatggcccaattcctcactgaaaatttcgtgaaattctttttccagggcttgaatttcggttcctgtcccagcaatctgcgttgcttcattcgggataaaattctcagcctttttgccattcgcgtggcatgcatttactgcagggttgctgatcttcagctttaattcgtctaaaagcccaaataagtccatcattttgcagctcaacaaatttagtgagcctgctttggcaacaaaaaatgtttgctccacttcaattttaccaaatttgaatgtaccgaatccttttccaataaaggaaatttttgtgccgtcgaaagccttgccaatttcgttgcatttttcgatcggtggtcgtccaacatattggtgcgtcaattgatcaatgacgacaatgtccgaccccgtgtcgagatggaattcgactggcttcttgttgaacagaaccgctgtttttagcagcgaaatggaattgacggcatgcgtggtcattccaatacgaaggtggccaacgcggttgttgcctttctttttggcattttggcgtctgcgccactcttggacacgctcgcattgtttgtccaaatggccaacaaactcacacttgcggcatttgctcgttttgtaacggcattcgtcaggtcgatgcacgccaaagccacatcgccaacatattgtagttgcctcagtgttggtcctttctttgaatttgttcggcaaattatttggctttggactttccttgacgtatttgttcgttgaattgttcggctttgaattttgtcgaatcgaattcactggcctcgaagaacttgtcgcttcgattgcctttgcttctgaaattgtggattggaagctgattaagtcttccaccactccatcatagctgatgttggcgcaatctgctgacaattttgtcagaattcgctgtcgcaatgcagcttcgttgggcgctttgagtgccatcaataacatgaggcaattaaattgctcttttgtcagctcatcgaatttaaaatcggtcagcaattttttgtgccgatttatgaactgcctgaattgttcgccttctcctctcaccgcttttaaacactcgtagcggtcgatgaatatggactgagccttggcaaatagcttctcaagcttttcggtcgtcactttaaaacttaaatctgtgaccgacgatggcagaactgatctgctgtattcactgaatgccgattcgctcagcttattcatcaggcatttaaccttgacttcgtcgtccgccgttggtgctgtgcaatccaacgcgaatttgaatcgctcaatccattccgaaattcggctcttgtcgtccgttggctcgaatggtgaaatgtccggcaatattggcactgaatttgctccttgattgggctgtgccgccgcatttggtgcgttttgtccgatcgcaatcagttgagcaatttgctgtgattggtcctgcaccattttctgttgatccgccagcattttcacga

SEQ ID NO: 22742 - DNA, 885 bp, Heterodera glycines
aggcccaccatgagtccgcgaagcggccgagtgagtaccttcggtgcaggaaaattattaaggaagagagttcattatttatttgttttttgcataattaattcataaatatttttttcagaaactgctctgaaacgcaccaaattttatttgcaagttattttaggcactcagatgctttcactatcaaaaagggagatgaataaaaaatctaaaaatttttaattgctttttaaatatgcgaaaaattttaggcttaactttttttttataaactggtcagaagcgaaccagattttgtgagatcatcaaaaatacaaggaaaagccatgattatgaagctaactccagtaattctgaatttaaaattttttactaagttgagaggttcagtattttatttttttcgcaaaaccaattcttgagataagaagtagtaatctcagatctctaccgttcaactgccgataccagagttggtaggctgtctagcaactttcaatctctggtggggttttgacaacctcaatttttgaaaaaaaattactagattgaataaagttcatcgaaaattcaagaggaaaaacgattttcgataaattagcactattttggttggagtcgaaaaagttgagccgcaaatatcgtttttggaattaaaaaagtgataatttggcgttccgttggccgcaaatgtccgatttccagcaggccgcaaatgtcgggccgcaaatgtccgaaaatggcccttaagaaatgggccgcatatgtccgaggcgcaaatgtccgaccgcatttgtcgggccgctaatgtccgattttcagcaggccgcaaatgtctggaccgcaaatgtccgggccgcaaatgtccggaccgcaaatgtc

SEQ ID NO: 22743 - DNA, 1663 bp, Heterodera glycines
ttgccataatcagcatcagatcactctctctctaatcacctgtaatgcgtcttcaaatgtgtcatattgggcataaaaatgcatcgcgttgagcagcgtcgatttgccgttgcccgttttaccgagcagcaaaaggttcttcactatgttctttttgctctgacgctccaattctctgttcagcaaatcgagtgatgtaaacgcatggaattggtcgccatggtcagcaaaaaaggcacaacggaaagtcaagtgatcgacgcgagtgccaccgcagtcgcagaacaaatgactgatcggagcctgttggaggggggcaaatgatcaagtgaaagtgaatggcataaaagcgattcaaaaacgaaagaaacggccatttcaattggccattataaatttaaaacggccaaattttgtgataattttcggttcatttggcgcttatatgctgacggcactttctcactttctgttccatgtcgtcattcttctgtttcccgaattttaaagtctgtccgcattgttcacatccccaaaaatggtcgtcgtctcggcatttaccaccgaatttttcggcacaaggacacggcaaatgacagggccataaaagttggtcagcaggagaagggatcttttcagagtcagaggactgaaatggtaatatttaaaatcggaatttacaaaaatgcccaaatgttttttcacccacccgcgcagtgcacacgcccaacgtttgcgtctttttggcaacccaatcgtctgtcaccaattgatcaccgctcattttgatcagtcgggcgccgatcagtgggaaaatgtccaacgaattgctgatcactttcggcatttgcgtctttttgtgcccgtccgaaaacagctccaaatccacgaacagacaattcttgcccgcttcggccaatttgaacaaatagtgaagagccaactaaaagaaaaacaaacgaatttaaaaataattaggagcattttgaaatgtgattttacaaaaaactgcttcaaagtgtcgggcgaggaattcggtttgttgctgaaaaggacaaaattctccgtgggtccaattttgccactctttttttggccacacaaagcattcttcaattgttgatggtgacgaacgtacagtatccctggaaatttattagtttaattactgtgtgcttaatgcctaattagaggtaattaccctttgactccaatttcttggccaattccatacgtttgggagcagaagcgcgggatgggtccttttgctgcgcatttttctgatcatcggccacttcctgctcaagttcggccatttgctgttgcgcttcttccccattggcaactcgcagattttcgacactttggattctaagccaaaaatgaatggagataaaaaaggatatcccaagttttagggattatttcaacaatttcagacgacaaatgtaagattttttgttacttgccggttaatctggtgagcagattttcacaaatttttatgtttttcgctataacttttttctttggcatccaaatccaagattgttggtatcattcgaaagcttaacatgtttccgaatctaattctatgtatcacttcgcgattagacaattaccaaaaaagttatacatgaaaattgcgaaaagggcgaaatta

SEQ ID NO: 22744 - DNA, 1141 bp, Heterodera glycines
  unsure (1)..(1141): unsure at all n locations
caatcctaatggatttttgaatcgctatttgtttagaaacattgccttggtctgttgggttgactccatcggatgtattaagaaaagtcggcatcattttttgtcaaatctattcaaacaaaataaaaggctttttacgtgaggattttcaacttttttttccaacaatgaatgtaatttggataaaaagatgtgattaaataagtaattgttgattattttaccaaaaacataggatttgttcgagcatgaacaaagttatttataaaaaccaggttatagttaattgattgcactcataaagtgcaataaattttcgacttcttgttcaatcgtccggttcgcggatttcctaatcaggttgaatgaaatagccgaatcgaattcccctatcatgaaaacctcgaaaaacctttgcttatttgaaaaagaaaaattattaaaacttttgtatgtatgcaaaatggacatggaaaaactcaaaaaataaatgtggaaaaatgtgaagaaatgaaaagacaaaaaatggagaaaaaaatccgaaaattaaaaggaggaaatcaatgggaagaagaagttccaccgattattattgctgctgttggtctgtttttgtttatgtaatgttcatttattttgaagtgaactttggaagggatgcggaattttttgataccaagatcgttaagattgaccgtcatttgacaaagttacggaaaaattggggtgtcgtaaacatatgacaatgcttatacattaaaatttatttacttattaacaaataacttcattaaaaataaatttctagattaaaaagcttaaaagtatccaaatgttttaaatgtaaaaatgaaaaattaacataaattaaatttaattacttgcccaattcggacttcgtcctagcaccttttggacatttcgtggcttggacactttgtggggccgccatttggtttgggtccacatttttggtcaaatttttcaaaagcgtaaccagacagtcagacagtggactataattccttaacaaaaatgcaataaaaccaaaaaatacacccctaagaatcgacaaaaaaaatttcaaaaagcactccgaaggaatgaaaaaaattttctcaaaaanggtattttcgtggca

SEQ ID NO: 22745 - DNA, 1822 bp, Heterodera glycines
ctcaagaccgagattcttgtccagcaccaagaatgaatatgaaacgaattaattactgctgcatttcgcatttgcctgaaccctctgtcccactttacgttaaagccgtaatattttttcaaaaattttcataaattttctttttaccaattccttcttttttcaagaaaaatgatgaatgattatttcgttgtcgcattaaatgttttttaatgcttctttaatcaaatgtaaaaactaaaatggcgaagaaaaagttttacgataaaaatgcttagtaatcattcaaatgtctgtctggttgaatttttctaattatttaattaaaaaggcattcttcgcaaaattgtttcacatcaattgcttctccattccttttgtcatacacaaaatgttaacaaccaaacattttttttagtataaattgagaaatttttgtaaacaaaaaatcaaaaataaattaaatccaaaaattcctccattattgaaaaatttaaattaaaaaatgaagaaattttccatcatcccaatgccgcttttgctggtggtggttgtcctgctaataatcccgtttgtcccttttacgctttcacaactgtgcttgtacgacagtgtgacggagagctgtctgaaagtcaattgtctaaatgaatgttatgttgatagtccgggcacgtgcggatgcaatgcgagagtaagcaaaccaaaggcgcctaattaggcacagaaagtttaggtcattatcgacttgagtgtcgagaaatttttcgagtttttttgtctttgttttcttgaaattcagtccaatgatgccaaaattcggtccgaaaaaatgctggatagcgggattctggtagccatggaacatacatgattcagtcccgtaacccgaaggcttctagattgttataaattttgtagagatatatcgaatgatactaaaagattgttcaatttgatagattttttgaaatttttatttttcattttattattatgagccacccttactggaattaattaatatcaattcttctaaagttcaaataaatctaattcttcctgtcatttttccaaatattaagatgaaatttggcagcaattgaagcgcttggtgtagtcgtggcacaaaatgaaaaggaattcaaatcgacggcatcagagttcggcacacattgaatgattttccgaaaaatttgatttgttatttctaattaaaagatgacaaagaataaaaaattaacagattcaatcatcataaattgtcaaaattttaaataaattatctggctaatgattttatttaatttaagtaaattttaattattcttttattcgaaatctaacagaacttttagaagaatatgtacatatttatgcatcaatttaattaaattttaacatatttataattaaaaaattgataaaatcaatcatagtaagcaagacagatttttgatttttacactttttgtccatcgtcactatttgcacttttttgtccatcggccaaccactatctcatcatctcataatcatcgactttctcctacagtacgaacattgaaattctgtattcggttactgtaattcgttgagttgggcatcagttgtgttgttcttattgttgttgttgctgttggagcatttcccttcaaaaagggcacaattttgtaaatcattcgcacaaattcaactcgcatatctttacaaagcgccataaaaagaaccttcaaaagccagacttccggttaatgaattggcttaatgaatggtcagcagaggatcaattagcttaattagtcgacaatttaaattgggg

SEQ ID NO: 22746 - DNA, 1650 bp, Heterodera glycines
atttcatgaattttccccactatgtccttgcaaatcggcatacccgtccttggaagccgactttggacgataccaaccctggtgtaatcagtggctactttgtccaacctctaacacagttctattaaaacaaattaaaaaagattaaattagtaaaaaatgtataaaaaaatccttttttataataagctatatttattcaagtgaaataaaattacaaccatcatgaggtttagcttttctaagtattctcttcttatgaaaaccatattaaaaacgcaaaggacctaaataagaaacaaatagaaaaatcgtgaccggaaaatcggtcagtggaaaatgtttcagtagaaaatgcgtcagttatacaacaaagattttaaaacaaagttctatggcattagtattgtaatatagtagtaaacttcgataagaacatcgttataaattcgaacccggacccgaactataaatacagaacaagatcgcacaaatatcacatgaaaattgataagcaacgataaatttcataacggaattacatattatatagaaatatattattaaaaaggtgatataatttaatacattaatagtttaattaaaaattaatattcaaaaaacttaattccatcaaatttttaataaattgactaatatttaatatcttagaagattaatgctgttcaaaaatctctgtatcgataatcgacttgaaaaagagtaaagtctcggttttttaatttattagaaaattagggcacgtgttgaagtaaaagtaaaaaatcgaaaaggatagaaatattcaaaaaaataataattctaacctaataatactctaaaaaatagaacaaaaaaaaattcttaataggcataaataatatgttatttatataatatttcaaataaaagaaaaattatattattctaacaaaaaaaaacaaaaaaaaaattataatttatgaatataaattttatttaaaaaccgataaataaaactgaaatgagaaaagtttttttttagaattttcaaattttattttaataataattttaattttttttttaattaaagccgcgattttgggcatgaaaatcgctaaattggcacctaaataacttagcaaaatcaagcaagtgattgtgatgcgacatttgcagtgcggaataaaaatgatcccaaaaagatgagattttttgtttatgttacaaggatttcaggataatattaaaataaatataaattaaaaatttttaagaaaattttgaaaatctggaaataattcactcccgacttctgcattctgacatttttcttcggttatttttaaattaaagacaaatgtaaattttattttttagggcttgaagaaatattaaggaatatatattaatgaattaaaataaaatttggaaacaaattaaaattataaacctaaatgctcaaaaatccaataaaaaatttttacacaaaatattaaatcatgttttcataatatttattattgctaaaaatatttttaaaaaaatatttttcataaaatttagaagaaatgtaccaaataaaaaaaaattcaaattattcaaaacatttatataaaaaaatggtgtttaatattcacatttaaaaacccagtcaaaatttaataa

SEQ ID NO: 22747 - DNA, 2164 bp, Heterodera glycines
aatttttcaggaaatatcaaaatattgcatcctttttcagctccgttagctttctctgccgcggccgccggcgcttttgcaaccgccgcggcgatgaccgccgccgccaatggctttgctttttccacggattggtcaaacggcggggcgccgccgcgatttgggtgcgaatttttgcgggggttcgaaatttaattaaaaattgtaatttatttggaacgatttgattatttaccataaatttgcaggaaacaacgccgggagcggaccaccttctcacgcgcccaattggacgtgttggagggcgttttcaagaacacgcgctacccggacattttcgtgcgcgaagaaatggcaacgaagatcaatctgcccgagtcgcgagttcaggtgggaggacacgggcgagcagggcaatgatcggcggataaaaccccgggggggggactgatgagtaattacctaattaaggggaggaaaatcccacaccccccccccctctaatttggcaatggacaatgattgacaataattgttaaggtttggttcaaaaaccgaagggcaaaggcgcgcagccaaaagaaagcccagcagatcaccccccccccaccaggtacagttggggtgttcacacttcccattcgtcctgtttttcttagtccgcttcttcctcctccggttcctctgtcgccggctccaatccgtcctcagccgtcgaccaccacggcaacggctcctccaccgcctcgtccggctccaactcgtcgctggagagcaatggacactctgacgacacacacttggtaattaggacaaaattcgcttttaatttcttaattttgctcattttagcttcaaatcaaattggagaagatcgaagacggcactttgaactcatcggcacaaaacggcggcatcggctcgggtggtatttcgcccggctctcaactcgaagtgggcggaccaccacagagcggtgggctgtcgtcatcgtcggcggatcatttgtcgaaaatgggtggttgttatttacccggcacggctggcatttcgccaagtaattttgaaagcgcgtcaatccgagactccctcgactgatcaatgaatttttcagtgatcggacaatacacctcatattacagtccgttccgcaacggtgccgcccatccgtacatggcggcgtacgccccgtccgcctgctccatggacatgtacacagctgcagtgagttttgctcttcccatttcgtacaattccattttatgagtttaatgaacaattaattcccaattaaggcgtaccccgcggtgacaatagcggcggcggccaacatgaacattaattattcggcagcatcgaacatgaacggattcatgaatggttgacaatgggaaggacagaatgtgaagggacgacgcagtgaaatgatcaaaattttacaattttttcaccgatcaaacgaaaattcttacaattagcagcacaaagaacacttttgatcggagaaacattgcaaatcggaaaaatctatcttttcttttcttttcccactacattttccacccgtcgattgatgcaatattccggaaagtccaaatgttctttaaaaaataattatcgagatttatcccttcatttgaaaggctgagattttaaacgagagaaagagagagagaaaaaacagtttaatggcaattcaaataaattttatggcatttcagactttggcataaaatctcagaccgtcaaaaatatatcagaaaatgtataaaaatgtagaagacacataattaatttaaaaccatatcattgtcattcgtccatttcgtcgtcacatttgcacttctcagcccatcccaatcattcactcgtcaaaatcgaagaaaataacaatgaaaaagggcaaaacgaaatgggagacggaaaaaggggaagaaagtgaaaaggggcgcattttgttaatttttaaaactgcaacttatgtaattaagaagcatttgtttaaattaaattggcgagaaatggacaacatacgaatgaatgaacgattcgttgttcttcgcttttctttcagttcgtttgtccatggtttttgacctttctcctccgtccgtcggtgtgcaaattaaaatttgctctccccaaaggaaattaatggtaatgg

SEQ ID NO: 22748 - DNA, 1621 bp, Heterodera glycines
cggtcgttggccgaccattcaaccaaagcggtgccgctttgttcgatggcatgccgaaaacgcacccattttcggattaattttaaattttccatttttggcatttgcccacttgaaaaggccattggcgtgcggtgacgcggccaaaaggccgacactcgcggcgccggcactgaacccccacagagtgagcagcgacgggtcgcccccaaaacggcgcaaattgtcgtgcaaaaattgcagtgccatcgcctggtcccaaaggccgtaattcccggcaaaggaagcgtcgcccgtcgtggcaaagcccaaaaagtaacaaaaattaaaatagctaattacaataatattattttgtttttattaaatttatttcactaaaaatgagatttaacaaaaatgacagttttttcaattaaattaattatcgtattatttaaatatttttattattttacccaacattgcgagtcggtattgtatggtgacaaacagaaggccacggcgtacaaatttggcaatcgcttcgggtttgaattggcgacttgtgccggcctggaaaccgcccccgtggatatagacgagaacgggggccaaattggcatcatcggacggcaaatggaaaagaaacattcattattattaattaatttaatttaaaatttgtactttttccggtccaaaaatgttcatatagagacaatcctcactgagctgatcaggcttcaacataagatgagattagcattaaattaattaattatttcattcgaaaaatttaataaataaaataaaataaaatattttttattttttaaatttaaatttaataattatattcaacattcattgtgaacctctgcataaatttcggcacgcgcaatgggccaacacgcgggtgccatttcagaagcattgaaaactccgctccatttttccggtttcaaaggcttctgtaaaatttcagctatttgattaattgccacaatttcaattgcctcaaatcgcaatttgcccagcggcggtcgcgcgaagggcacacccaaaaaggcggtgagtgccacgggttggccatcgacggggtcgacgacgtgcaaaagttggccacggattttgccaaatttggtgctgacaattggcgaatcgtcaggaggagacgaggaaaagcatggggacggagagaggaggaggaggaaaagcagggccaagcaaaacggaagagaaagcggaagagcggacggcatcggcaccggaggaagcctaaatgaagaataaaccacaaaggaatactgtagaaaatggtagaaattattgcgtcttttttaatttaacattaaaccgtgttgaatttagaacattctgtcgggtttacggtatggtctgtacaacagaaaataaaacggttggaatggccaaatacacttggttggtcccactaattatccgaggggctagcagcgattaaattaaattgggtcccgggattcgtccgagaatctcgagcaccccgaacaatggaaaacaaaaatatgaacggacaaatgaggaaaatatgcaaatcgatttgcacaaaaatgggacggacaatcggcggacggaccgaaagaattggggggggggg

SEQ ID NO: 22749 - DNA, 2059 bp, Heterodera glycines
tttggttataactctttgtaaatttttttctagattttaaaaaattaaataagataggatttgataggatatgtaatgcatcgcgtaataccaatttttattaatttaactaaatttaagctaagttatggtttcttattagcaataaaattaaaactaataataaatttaaatgtttctatttatattacataattgatttaaaattaaagttataatcggaaacattgctgattttcatgttaaaaaaaattaattacaatatttgtcaaatttttgtatctcaaaataaatcactaaaaattaaggaattgttggatccgggcaaaggattttacgacaaagacgagaacaaagtaaaattggccattgatgtcattgtggatgagccaaaaactgagaaaattatttccgatccaaacaaatccaacggcacactttcgatggaaattgaaaaactatcggaatttgagcgagaaatcgaaggaagtcatcgtaaaagtgaaactgctgtgtacataaagggaatgccatggaaaatatttgcatatatcaaaatgaaaaatgaaagcactgagaaatggttgggctttgcacttttgtgcgacgcttctgaaaaaggtttgcttatcaaattatataatagaaataataattattttttctataaaattggtgtaattaattattgaaaagacttatgtaaacagtaattttttaacataaaattagaagtgattttttaaaggaaatgcgttaaaatataaatttgattattatttaatttgctttaagatggaaattggagccgcaaatgttcgggaacacttcgaattgtctcgcaaaagaacggtgtggaggattttaagaaagaactcgatgaaacagtttttaacaatgaatcgaagtcttgggggaacaatttcatttcatttgtggtgagtggaaattaattagttaatttacattttaataatgtaatggcaaattaaggaattaatggacccaagcaaagggttgtacaacaaagacgaggacaacgtcaccttggcaattgattttacatgtgaatagcgtaaacatttcgagatggattgaaaagtgaaaagaaggaaatcagcaggatgagaagagagtcttggagggcacaaaattttcttggtgcttaaattttatattttttttatgttttgtaaagtattttggtttcataaagcaacatattccaatgatagggatggatttttatgtgctaaaatcgagaaatatatatacctaaagagttgataaaaaggcagaaaaatttgctaaaatgcagaaaaatgccaaaatagttgccaaaaaattggaaaaaatgtcaataaatgtgtgagttttccagaattgcccggattcatgatcagcattcgaaatacgctttcatgattttggtaagaataatttttttgaaaatatgttcggatgcggggttcggaattggcagaaaaagaaagcctaattcttattcagcactccaaaacgcgctttgaaacgttttaaaaatttcgggaccagtaaaacacattactatcgtttaattttagctgcaaaagaaaaagtcaaaaataaaattaaaattaaaaatctgagaaagaacgaattctcgtcaaaaaccaatttacaaagcaagcgcccggagggccaataggcgctccgggaaaactgaaaatttatgttcatttgctaaataaatttatgaagaatataaaaagatgtaacttattgctgatttaaggcttgattcaaaaaacactaattgagaagagaaatattttttgtttttatgagatttggtagaagattttgtgcaaaatgccaattttgaaaatgtgctccgtcagggtccgattatggccttttgccaacaataaaaaaagttttatcacaacaagccaaaataggcatcaacaactttgtatgatatgtatcaccacatgccatgaaactacaataggcacctatctttttttttttttggtagcctacagtacccttatggggggcgtgcgcccgcggggga

SEQ ID NO: 22750 - DNA, 673 bp, Heterodera glycines
caactcatccataaccaactcatccatatacccaactcatccatacccaactcatccatacccaactcatccatatacccaactcatccatgcccaactcatccatacccaactcatccatacccaactcatccatatacccaactcatccatgcccaactcatccatatacccaactcatccatgcccaactcatccatacccaactcatccatacccaactcatccatacccaactcatccatatacccaactcatccatgcccaactcatccatatacccaactcatccatgcccaactcatccatacccaactcatccatacccaactcatccatatacccaactcatccatgcccaactcatccatatacccaactcatccatacccaactcatccatacccaactcatccatacacaactcatccatatacccaactcatccatacacaactcatacatatacacaactcatccatatacacaactcatacatatacccaactcatccatacacaactcatacatatacccaactcatacatgcccaactcatacatacccaactcatacatacacaactcatccatacccaactcatacatatacccaactcatccatacccatctcatatatatacccaacacatacatacccaactcatacata

SEQ ID NO: 22751 - DNA, 959 bp, Heterodera glycines
ctagtcagcaatcgttgcttaacttgccagatcggacgggtgcgcatgattccactgttccaagcaccccaccaaaagcaaaacgatataaccaaaatataaggaaaaattttttaaaacattttttctccatcttcctttttgatactaaagcatcagagtgctaaaattaagttgtaaataaaatttggtgcgctttagagcactttctgaaaaaaatatttatgaaacaaaaaaatcgattttttcaagtgtccgtttggggtactcaaacaattatggggagcaaaaatccaacgcagaattaaagtacaggctatagggaagctattcccgaaggattcggtctccccataaatctgggcgcatcggttcggggggactgccccgaaaacaaaaaaatcgattttttcaagtgtccgtttggggtactcaaacatttatggggagcaaaaatccaacgcagaattaaagtacagactatagggaagctattcccgaaggattcggtctccccataaatctgggcgcatcggttcggggggactgccccgaaaacaaaaaaatcgattttttcaagtgtccgtttggggtactcaaacaattatggggagcaaaaatccaacgcagaattaaagtacaggctatagggaagctattccggaaggattcggtctccccataaatctgggcgcatcggttcggggggactgccccgaaaacaaaaaaatcgattttttcaagtgtccgtttggggtactcaaacaattatggggagcaaaaatccaacgcagaattaaagtacaggctatagggaagctattccggaaggattcggtctccccataaatctgggcgcatcggttcagggggactgccccgaaaacccaaaaaaaattttttggataaaaattatttaaatgaactgactagataatatttaaaataggttatttctc

SEQ ID NO: 22752 - DNA, 1514 bp, Heterodera glycines
cgcctcgcgcatcactttcccaagacggaaaatcaccccacctttcttaaaattaataatttttagagagccaaataatgtatcagacagcgcgctcatactgctgaatgacctgtaaattagggagaattagaaattggaaatgtgtgaaatttgaaaaaattgcccggatggaaagacaaatggcgcaagggaaacatatgattgaagaacaataggaaaagcagatcaaaagtgacgaacagcttctgcaaaataaaaggaaagaaattttttgtttttccgttgagttttttgccttacccccgcgaatccgtgtcatcagagggcctaaaagagcgcgaagacgattggcgttcaagagaagacattattggtttctgtatgattaagagaggatcgctttgtttgttaaaattacaaaaaaaaaaacaaagcataattgagagggtaaggaaattttacaaattatgaagtaacaaaaagcggaaagtgacagaaaatgtggaaaagggccaacttaaataggcaacgaaatgactgacaattaacatttctcattatgtttttctcccaaattttgccaaattcgtttatttaaaagagaccgactcataaaacttcttaatccacggcttcgaccttttgtcccaatcaacaaatttaatacgcttattgtgttatgtaatgcataaaacaattaaatgcaattaattgtcattaaacaaattggcaattccgaaatccgtctcattgttttcttcgcataagtccaattgttcagattgttcttcaccaattttaagccaaagcaatgcgctgactttcctcctaacggttccgacttttctgacgaggcttttcgttgttggacatatttttttgcacgcgggctttttatatttggccaaacattccacgagggctctgccaaaacaaaaaatgtacaaatagcaaaataaattaatttaacaatttaattaaattaatagtcacattttgacataaaaaggcaattttttttccgtaattgacaaaatttaataaatggagcatcatttcgtcgggggcggaaatgaaaatattggtaaaaaaacgaattttaggtgttgtagctttaggaccatcgatcgcgcaatggccagtcacgaaccaaagatatttttaaatattatttatttttgaaaaattagccaattttttaaaagatccgcgactggccatttatcatttattggcccgtgatcggcaacagatgaatgtccttttccgcagttttttgttcaatgtcagtgacttacaattagcacaatttggttaattcagggttcgcagatgaaaattttcaaaagcctcatttggcaagcaaaaaagcctcattttgggtcaaaacgcctcatttttagaaaatttattcaaaacacgtataaaatgttcaaatgttatatttttgattgtccatgatctatttgaataatttttttgttcgaaataagcattttgtgagattctga

SEQ ID NO: 22753 - DNA, 1083 bp, Heterodera glycines
  unsure (1)..(1083): unsure at all n locations
gaaattgtgaataattctcagaaaaatggctatctctttttaggacaattttctatctcgtacccccgatgctaatccgttccgcagagcctcttcaaattttttccattaccgcaagagttgcggaaattgtgaattaattctcagaaaaatggctatctctttttaggacaattttctatctcgtaaccccgatgctaatccgttccgcagagcctcttcaaaattttttccattaccgcaagagttgcggaaattgtgaattaattctcagaaaaatggctatctctttttaggacaattttctatctcgtaaccccgatgctaatccgttccgcagagcctcttcaaaattttttccattaccgcaagagttgcggaaattgtgaattaattctcagaaaaatggctatctctttttaggacaattttctatctcgtaaccccgatgctaatccgttccgcagagcctcttcaaaattttttccattaccgcaagagttgcggaaattgtgaattaattctcagaaaaatggctatctctttttaggacaattttctatctcgtaaccccgatgctaatccgttccgcagagcctcttcaaaattttttccattaccgcaagagttgcggaaattgtgaattaattctcagaaaaatggctatctctttttaggacaattttctatctcgtaaccccgatgctaatccgttccgcagagcctcttcaaaattttttccattaccgcaagagttgcggaaattgtgaattaattctcagaaaaatggctatctctttttaggacaattttctatctcgtaaccccgatgctaatccgttccgcagagcctcttcaaaattttttccattaccgcaagagttgcggaaattgtgaattaattctcagaaaaatggctatctctttttaggacaattttctatctcgtaaccccgatgctaatccgttccacagagactcttccaaatttttccattacccgcagagttgcggaaattgtgaattaattctcagaaaaatggctatctctttttaggacaattntctatctcgtaagcccga

SEQ ID NO: 22754 - DNA, 1318 bp, Heterodera glycines
tttttttcgtatatttctttcatattaccttttcataacagtgatttaattattttcagaaaaacgaagtttccaaaatttattatcagctaacttcttcattttaagctataaaatcctaaaaaaaagtataaattctccagatttttctctatttttagtgcttttttgcactttaattgatccttttcgaagtgaattatgaattttcaagcattcgcctaaatttccaaggttccaaaaaatgaaaaatctttttaatttaaaaatttcaggttaagatttaaattgtagcaataattttgacctatttcaaaaactaataaaaattgctattggaaaaatttgcataaaaacattgaaattttgtaaaaaagggttgaacattaaagccccaccctcgagtataaccccattttgaagggggttttattcgaggaaatacggtataattatgaaaagcccttaatccagacttggaaccattacaggtccaggtccaacaaggaatccaagccaggttcaagcattttcaagatagcaaactctctaatcatcaaaatattatttattaccaacgctttttgtaaaatcctcttttggtatgagtggaaaacgaatgttggacaaaactgggtcaagcatttttcgtcgattttcagcggaacattcgatgcctttttgacggcactgttcgtcggaccaacggagtgccttaattttagaaaataaataattgtaatttataatatttaatttaccgcattccaaatttcgatttcactgcttctcagctcatctctttcgagaatttcacacaacaaattttgatcaatttgcaaaaaggattctgatttgatcaaagcactgatatttcgatcaatgtagtgcaaacaacggagagaaaaagcccaaaataaaaataaaatatataatataaaaaattatataattattactttaactcgtcggggaccgtaccatagaattttaccgatgttttcggttgagaatttatccttagattatttatagggcccggatttatattgacaaaaaaacaccaaaatatgcattatattataaacgaaaaatatagacaaaaagctaaaatatggacaacaaattacagttgtacgggtccgggaattttaagaaaaaccgggaccagtacttttcggggtgaaaaaccgggaatttttggctggcaaaatagggaaaaacccgagacttttcccggtcccggtcaaaaccgggacgtaggtactcagttgtacgttctttcagtatcaggtcccggtcacgtacaaccctataa

SEQ ID NO: 22755 - DNA, 2503 bp, Heterodera glycines
  unsure (1)..(2503): unsure at all n locations
aaaaaaaaaattaaaaaaatttaggccaaaaaagacattttcaaaggaaaaaagaaccaaaaggaaacatttttggcttgatattaaacccggtccaaaagcccggtttccgggccgggttgcattttaaaaaaacgaccggttttcggggcccggtctctcaaaaaccggtcaaacgngattttccaaaaatcaccggttccggttccgggcccggtaaaaaccggtaccgggcccggcccggtccggtctctactattgatcaatcatcgtgcatgttgaatgcctgatttagtctaagtgccttaattcattaatccatttacccttcataaatttatttttcaccccaattcctggctttattttaggaacttggtgtccagttttccggtgttcaattttccttcggtgtccaaaattccaacggtgtccagttttccgcttggtgtccaatttaccggtccccgcccttactattcgtcactgtttcggcctttttgtcactattttgttgctgtttatgtgttctactcgtgaatgcgtgacatcgatttattttcttagcatcaatgcataagcaacactacaacaaattttttatgaattttaagaaaattttcgaattcgggtccgggattgaaatggtctaaatggaggtatgtaatttttaaaaatttaatagaaatttacaaaaagttgtaaacaaaaaagctcgaaaagtttgggctcaacaattttaccgtaacttttttgaaacaataaaattttttgaaatttagcaaaataatagagaaatctttgggctatcttttcatataaagtgcagtgtgaattaattgatctttaaacaatttcatgcatttaaacgaccatacattttttggatagccataaaaatatgacactattaattccttcataacttttttctgaatgaatgaattttaattttgtttatataattagatagcccaaagatttctctattattatattaaatttcgaaaaattttattgaacttcaataaagttagggtcaaaattgttaagtcaaaatttttcgtacttttttggttacaactttttgtaaatttttgcaaaatttttaaaaaaatacataaatagtagaggatactttgagctgtcgctaaatactaaatttcattaatttgacaaagtttaggctaagttatgattaattatttagcaaatttaattaaaataataattaaatttaattacaaacattcagacttttgttacttcggctcaccacgattctctattttatgtactttccggtcatttgaagttcttaaatttctcacatttccctctctctctctctttctccttttttctctccctctctctctctctcctctctttctcttctcatttccactgacccacccgtctctgttgtccccgctgttctcttcccagctctctcatcattgccaactctctctccccgttctccaatcgcattgtccattcggtctctctctccgtccattccatttctttctcctccattttttccaatttggtccttatcccttccaattccgtcctcagtccctcaatgattgcgtctttgccggcacaaatccgtgccaaatccgcaaagtcgcgacccaaaccccggttcaattcggcactcgatgaacttggccatcgtctgctgagtgtgtcgcttccctgtggtaagataccgtacgcctttcgccaaccgtatgntcgatcacctttctgtgggtgcctaactcctctttctctcttctggcccatcttcctcgcctcccaaagactcttttcgtccctcttttttcctgccccccgcctcccttgttggatttggtgggtccccctttccctggcccttcaaaaatccacctggtggtggcccatttcctcccgttaataatttgggggaccaaaatttccaaacccttcaaaattgtttcccctgttttctcataaacttcccaaaaggaaaaaaggtttttcccggcccccctaaaaaaaggaaaaaaaaaatttttttattttttccccccctttttttttttaaaaattttttaaaaggggggggggtaaaaaccaagaaaaaaaaaaaaaaggggcttttctcccccccccccccccccccaaaaaaaaaaatcccccccccgccccccccccccccccccccaagggggaaaaaaaaaaaaaacccccccccccataataataaaaaaaaaaaaacaaaaaaaaacacctcctttttttttttttttttttctttttcgtaaaaaaacaccccccccaaaaaaaaaaaaaaaaaaaaaaggcctctggggggcgggggggagagaagaaaaaagggggcccccccccccccccttctctcctccccccctccccccccctccgccgcccccccccccccccccccccccccccctttttttttttttaataaaaaaaaaagaaaaaaaaaaaaaaaaaaaaaaaa

SEQ ID NO: 22756 - DNA, 1673 bp, Heterodera glycines
  unsure (1)..(1673): unsure at all n locations
tctagagtnncttgcgtgattaatgtaannagaattgaacaaanttgccaatctcgatatgccaaaaattcattttgctaacggatgacaaaacttaatgaatagagggaacgcacctgttcacaaagcacacattcggagtccaaagagaactcttaacaaaaaaggatcagaaagtaatggtaatggcacggttacggtgagaaaatggtacggtaatggacaggtcgaggggatggcattaaattcgccccttttagaggaaacgaaacggaccgaccaatttgtgagaaggcagcgaaatgttggagagacaataattcagcgaagagaagtccaagcgcgggtccctccaaatttggctaaacggcaaaatcatttcggcacaaacgcaccaattcattcattcattcatcggtcggttgcttcacctgaaccaaacgtccgctttgaaactgctggagaattcgctgatctccgttatgctctgcactgttagctcgacgatcaccgaagtgtggttggaggacggcaaattgttcttgtcgtagtgattctcggcgaacagaccctaaatgggacggggggagcgagtgtcggcattttggtcaattagcggatgggaagggcctaatggcggcatgccattgggctttgtgcgactcagttcggcaagtgccatccctgtctcctccccgcgggcgttgcctctgatcagcctaccacccacttggatcagtgccttccttcggttgtcatcgatcggaatgcattccctcgtcggcttttccctcacttttgcctttgtcctcttcgccttttcctcgcgcgctttctttcgctccaaatacgcttttcgcaattccgtcgttgcagcagtgaaattcgctccgccgacaaacgccgcgaggggcggcgcgcctttggcaaattctgccgattggttttccatttttggtatttcttttgctttctttttcttatgcctttttttaccgttctgtcgttccctgcctccttcagcgatttgttcgagacgtacagagtccgtgtaggaaatttgtgggagaagaaggacgagtcgggtcaaaaaggaaataatcattgcattggggggacaattaacggggggaaagcggggggacggggacacggggaagggaggggacgcaacgcatggcaaagggaagggacggacaaacgaagcggcggcggaaggacggcagagacgaagagagactgctggtgattaagcaattaattaagcaattccctaatttcaaattttacaatttctgattttttaacttttcttttgcctttttcgattggtttctcatttagaggttatttttgaatgttaagcctaaaatttcgttttgagtgacaaagtggacaacaaatgtgcttttgaagtcatttcgcctctactgacactaatgaatggtgccgaaaagcgcttggacgtttaatgggatgggaaaatggctaattccctcgaggtcccttcctttcccaccgaattgcaaggcaattcattcattcattatcaaagcgaacactttgacacagcaattgttgtgcattatttggcaacgcaaaatcaatcaaaaaatgccacggcacttttggccatttccgcgaaaattatgctaataatcgcactcattgtc

SEQ ID NO: 22757 - DNA, 1299 bp, Heterodera glycines
  unsure (1)..(1299): unsure at all n locations
aaataatggtggcaaagggaaactccgacacggaacccaaaaaagcagcagaaggcaattcccccctcgcctccccctctctctttgtgcttttcccccgccggtgatgccattgcaaagccaatggaagagaccaactttttcttcataaaaggtccttttctgctgcttaaccgtcgttctccgccgccgcccatccattgaggaaatattagggcctcactgaccaaatattgcacattaatatggaccgaaattccttagagtttttgggagtcgaaggaagtgaatgaattgcgtcgggggggggggggggggacggcgccaggcaatggcccggcacgtttttgcttattattatatgtcggtaaggcaaatgggacatttgtcacggggccgtgggcagaaggaaatgtgtaatttggcaatggcagacgacaaatttgggcattcccattcatttgccggtgttgcggcataaaatatccatttctgatgagaacaaaatgaaacgcaatacaattgtttatcaattgacgttaggaaaaagccgaaaagttggcaaagttagcaaattggtcgtctacgaaagtgccgccggcagagggcttcaccccgaacggatcgtcggcgccattttcactcccgccgaacgggtcggaggagcgatgccgaacaaaagggtcgccttgggaaagggacgaaacgaattcgaacaaatgaaatgagacgaaaagccaagccgaccaaattttaagtgctctttacctttagggctgttcatctccgctgagttcgttctgctaccgatgactgtctgaaaaagcgaattccgtcgtaacagtcaatcagcagagaattattgaaaacgaattcaagtaaaacagggaaaaaagaatggggggagtacggtaataatgcaaattacagactatcacattacagaacccagctttcttaattaaaatgccaagtgataaggaattttgacacggctaatcaaaattcgaaattaaattgagagagttgcgttggttaatcaacctttggtttaaaatggtcgaccgaatgccgccgattttgatctggatcattttcttttttcccccaatgaacgattggtcagtcattctgctgaccaaattcaccctgttcagttggaatgtcctctccagcagttccctcttggccccctcgtatcccttttcaacgcctgtcaaaatgcgctccatttcctgggagaccgccttcagtcgtgcgcattcctcactcatttttgacgacctgcagnngcatgca

SEQ ID NO: 22758 - DNA, 2617 bp, Heterodera glycines
tttagaatgggataaatgtttaaatgaagcaagcctcccccaatttccaagaggacttcgttcgctttttgctaatatccttattaattgtgaaccaaaccacccaggtttattatggaacaaatataaagacgacttaagttatgatcttaaaaaacaatatactgaaaacattgcttcgggatcgagaaatggtccgtataatcagttccatctaaggcctacaataaaaagcaaagttctttgggttttttctaaatatttaaattaaatagtatattaaacatataaaaaacttaaaaaaaacttcaaaaaacaaacaaaaaaaagtttatcattcatgcatttctgacatcttccataattattgctatctatcgagagtttttagtttttctattaaaacacaaaaaattctaaggataaattattcgtatttttctctctcaagaattaaatttagaagaaatttaaatgtatgttaaaatacacggtcatgaaaatttacatttttgatatatataaaaaggaatctaaaatttttctagtaaaggattttatactgaaaaaagcttgaggtatttggaaaattggaaatttaattgaggtgcataactcttttgagatacgaaagcaaaaattaaggaacagtgaacggtaaaactaagtgtttgatttgatttcgaccgaagtctatcgatgggaggtgaattaaatgagggaaaatgagaagggctcaaaaaaaggagtagaggaatttggcttcgaccgtatatgaattcaaataaaatttgggattagtcaaaacaaaaggtataattttgtgactcaattatccggaaaaattatttagaaaatttggaattgcttcggcagttttaaagtcaaaaaaaatcaagcaaattcgaaatctttgacaatcctaagaaaaacggctgaatacagtattccagtgactacggtaggaaaatgtcttagcaaactgtttttggtcaaagtccgtcataggtgtaaaattgacggatgcttaacagaacggagagaacgctgccctttcccctgcccttgcaactctccctttgctttcgtccctctgctgtatccctgcctttctcaccgctatttgtctcccccccttcccccccccccggcgatgagaacggcgattgaaatctgccggtctgacggaatcaccgctgcattagcgcttggcttgcccgtatacgattctccttccgccccattccttcccatccaccctttggcgtcgttcaccattctttcaataaacatttagcaattggaaatttatgtgttcattaattgttgaacaatttttaattgtttttaaatttaattattttattacttttaattctttatttctttttagcgaaaagcatttaattagtgatctttcttcaattcaacaccaacaacaaaagagggacatcaacagcaaacagtcagacgatcggacggacttggcccggtggacattcgactggcccggcccatcagtgacattgtgcttcggtatttttggcaccaacgcaccggcagtgtgcttcggcgagctcaaggcgaattgtgcggtccgactgaaggcggacaatttgagtcggtgatattcggcacgtcgacggtgcgttcttccccgcttcggcgatttctacggatctgtggtgttcgactacgtgtgacattggactacgaacgacttgcgcttggcgaatctgattaagagaactttgagtgtggttcggactgtcaactgcattcaacgcttcggcggcaaaagtgcgacacatttcgcattgtgtggacactgtgagtcctagttggaattgtattacgaaggccaaacatttttgttttgcttaacaaacaacatgctttcatttgattaattaaataaacttcgttacgcttttaattattcgttatacactaatgcgcttttatggcccttaaaatttaaaaaataattggtatttaattgatttggtgtgtaaattccggtcaagttataccctcttggtacaattgaaggcgtttaagagcattgttttgttttggatttcaatcaatcattttggagaattacaggtgaagagcgacatcagtggtgaccaaacgcttcggcggattccaagtgaacggataaagctgattgattggacggacatttgacttctgttggtggacaaagtgaattccttttcctctattaattaaattaaacaaaactaaacaacaaaacaaaaccaaataaaataaaaagggggaattgaaataaaaaggggatcaaaatcaaaaattaggtttgcttcggaagcatggagtacacagaccttgcggtctgtgataaaaggcctatagaaggcaaacatatgagtgcgcaggcaaaaatcagtgacctttctcgggtccatgatgatgttattggtttagaagaagggatcaatcgatacctgagggctctaaataggaaagtgactcaagtagtgggccgagttagtgacatcgaagccgatgtgaatacgggttttggcacaacagcggccagggttgacgcgagtggggaagtagttactggattggaacgtaaatttga

SEQ ID NO: 22759 - DNA, 1048 bp, Heterodera glycines
aatcttccaaagaaatttttttagaattcccggcccgttaatcaacaaaatactgcccattttttctgtactttgtttttgcaaccaatcatttccgagttgaaactgacattaacatggtttcagtagcatgaatcttgcaatgaaattttttcagaattccaggccgttaatcaacaaaatactgaccatttttactgtactctgttatcgcagccatacattacgagtcgaaactgacattaacatggtttcagtagcatgaatcttgcaatgaaattttttcagaattccaggccgttaatcaacaaaatactgaccatttttactgtactctgttatcgcagccatacattacgagtcgaaactgacattaacatggtttcagtagcatgaatcttgcaatgaaattttttcagaattccaggccgttaatcaacaaaatactgaccatttttactgtactctgttatcgcagccatacattacgagtcgaaactgacattaacatggtttcagtagcatgaatcttgcaatgaaattttttcagaattccaggccgttaatcaacaaaatactgaccatttttactgtactctgttatcgcagccatacattacgagtcgaaactgacattaacatggtttcagtagcatgaatcttgcaatgaaattttttcagaattccaggccgttaatcaacaaaatactgaccatttttactgtactctgttatcgcagccatacattacgagtcgaaactgacattaacatggtttcagtagcatgaatcttgcaatgaaattttttcagaattccaggccgttaatcaacaaaatactgaccatttttactgtactctgttatcgcagccatacattacgagtcgaaactgacattaatatggtttcagtagcatgaatcttgcaatgaaattttttcagaattccaggccgttaatcaacaaaatactgaccatttttactgtactctgttatcgcagccatacattacgagtcgaaactggaggttcagtagcatgaatttgc

SEQ ID NO: 22760 - DNA, 1439 bp, Heterodera glycines
tagagtcttttccttcataagcgcccttcttttatgcaaccccctccttaaaaatggaaaagagcgcgacccggacggctcaattattttatttggcgtgtttttaattcgagtgaaaatggtcatttcttgaaataaatattgcgtggatcctttaaaaaatgataaaaaagggcttcaattcacaatgcttctctcccattgtcttttgcagtatgtttctgatcagcactgtgctgttcagtgtgccttcctatttgttcgccatacgcaatgatcgccgactgcgcgccgtgacgccgtacggcggtgtgttggccatgctcgcttggttcagtttcgtcctttgatcgcttcccaaaacaattgcaacaaattcggacggaaaagagaataattgatcaaattgtggaattgtaatttcaaatttttaacaatgtatctttattttgataccacaaataattttttgctcgtcattctcaagtttaattgactttatctcattgtctaaataattgcttattaaaaaaaatgttttttttcgtctttatcatttctctattatgttcaatgtacatatttctcttttttcggctgttttttaattttcaattattacaataaaattagaaatgccacaaaagcgtcggaaagaaacccgagcgatcaatcgaattcgaaaacgccgtgcggagttggaattgttggtgagcggcaacaaggatggtggacaaaatatggacagcaaaacggacacaaaacgggccaaagagacgaaaacggaggacgaaggttagcggcaaattgtggggttgatttaacaaaaagtgccacggataaggcaatgattgggtcaatgaattatgatttcaaattcatgggatttgctcgatagtgtcattttcagagcatcttttcgcggaactgcgccagcagcatttgatttctcgcgactttttgagtttgatttgctgatcagaaaattttcaaaatgctaaatagctgatcttcgatttaatttcttaacttttactttctgccaggacttccgattgcggcgagtgtctcttcaatttcggacatttcgcgcacaacgaaagcggtgaaaatttgtgatgctgcagaaaaggtgcacgcggacacaaaaaggacaaaagggacgacaacgaaggaggggaacggaggtgaaagatgttcagagactccccgatatctagcgatatttcacgaacatccctttttgtttataactcatcccaaactcacaccaccgggggatgtgtcccaggaaggggaaagtggcgaggtctaacgctgcctcacttatttgtctaatcagaaaattgaaaatgagcctgtctctcctcagccccattaagtcgaaaggaggtaccgagttaaatctgctcacaaatcttttggtcttttgcatcaca

SEQ ID NO: 22761 - DNA, 917 bp, Heterodera glycines
aaaggtaattttgaccaagtaaatggcactttaggagattccccaatttaaaatatcgaatacaattattagactcaaaatccaaaaatacggcacacacggaagacataccgacgcgtcaccgaacgttcgccaatttttgtaatcgactgcgaaatgtgtttgacgacagaccaacggttggaattgacacgcatttcgatggttggtattgaatgggcgtagttaattgatcattaaaatactttaatttcaaaaaggtaaacgaagcgggcgagacgctaatggatgagctggtgaagccttacaacaaaatcattgactacatcacattcaaaagtgggattaccgagaaaatgctcagcaaagtcaacgtaagagaaaatgaagaggaattttacttttaaatgctaaaatcattaaattgtttattactcattaaaaatcatttttgagccatccaatttctgctcaaagtcgtgccatttttatttttagactcgtctgaaggacattcaaaagcgtttctgtgccttgctcaccgacgatgccattctgtgcgggcacagtttggagaatgatctgctcgccctgcaattgtcccacccgtcagtcccccccccttcatttcgatttattcccccttttcctattattagtatttaattgtatgattaatttcagtttttgcattgacacttcgctgttgttcaacttttctggccgtgcctttgtgcgcagtggcctcaaggcattggcggacatttttctgaacgaaaaaatccaaaactcgcgccagggccattgctctctgcaagacgcaatggccacgctaaagttgctaaagctgaagctggaaaatgggtgggtgttagagagagttatttttaattcgttttttatgagtgtaaaattgc

SEQ ID NO: 22762 - DNA, 2143 bp, Heterodera glycines
acgcaaaaaaaatctgtttgttcacgaatcaggcgtccaattctccctccacatttgcatgagcagcagcctgtacaccataggagagagaatttgtaaaggtaaatttaggaattttctttcagtaattgcatctcccgaaatgggaaaaaataaacatctaccaatcggaaattttaaccatttgtcatctcaaattacaaaaaaaaaaattcaaaaatcaccggcatacgcatcttggcgcgcatcttaattttattttcttcatgcctaacatggaaaagtgtttctggtttcggacctgctgtttttgcactcattgctgaccactctttttcttattgttagcatcctcaagccatttgggtggcatgaacaagcgtttttccatgccattaatttgattgccaatggatgagtttgctatttcatggggctggaagtagtctgatggtgatgttgctgatgatgctgagccacctgcttgttcaactggcatgagccatgatttaaaggatgaactattagcccaatctaatgtcggctttaaaagagttgatctgtcttgaaaatttgtgttgctcctggttgtatcagttccggttaagaactggacactgctagcgaactggtctttgggaacattgtagtgcttttctttcttgggactcgcttcacaaatttttggcaacaacacacaaaccagcaaaacaattgcccgcatcagcacagcagcgaattgcacgttcattttagcggtaatgatgatgatagtgtgtggttagggtttggaaaattgcttaaaacaatatatatatatattaattatatatatatatatatatatatatatattaattatatataatatatataatttactgaaaaaatttgccgcctatgattttgcctagattattggcaaaaaacggtaattctttaagcttcttttaatttagaactaaaaaattttacaaactaaattttaaaaattctgcctgtttttagagccttttagcctaaaaaccaatccctagtaataaaattattaaagcagaaaatatgtatggttgcctgcctgaatttgtgctgttacactggccaagcagtactcttttattggcacagattctacttcatttttacatgcaaaattgatcttaaaattattgcgtaaggccaataccattgttgacttcactgttttctccatgctaagtagaaattatttaattgctttacatattgcgagcgagagatagtgagagtgagaaggagtgagagagagagagaaaatggagaaaaagagggacacagagagactggagactgtgggaaagggaaagcgagacagatagagatagagaaatggggaaaaagaatacaggggtgatagcgagaaagttattagaaaagagaggcagagtgcgagtgagtaagcaaaagaagtaggaagagagagagagagaaaagaatgagtacgagttggagggcgatataaaaagcattaaataatcctactcttcaatgatggcataggtaatgccatgaaaaaacaatgaagccaaaaaattgcaatggccttggcatcacgtaacatcagtagaaaaaattttattgcaaaaacgaaggaaatccaaaaatttaaaaaaaacaggcaaaaaataataatgttcgaccctttttttagcgaatatcttttctaaaaatttactagaattttttcaaagtttccttggcagtccaggttatcctatcgggacgggaacctgtggggaccggaaactcggcttaacccgtccgagtaacccctttttcaccgtggttgccgatggacaaaaagtgcaaattgggcgacggactaaaagtgcaaaatttgctaaatttttgactaagccaactcataacgtttcccagacgcaaccaaattgcacaatattggtgatagcacttgaattgcgtcattagcttgctaaatttcaaaaaaatttattaagattttcaaaagttctagccaaaaaacaggacaaattgtcataacttttgaaaaaattaataaatttttttgaaatttatcaagctaataacgcaattcaagtgctatcgcatgataccaagattctgcaatttggttgcgtctgag

SEQ ID NO: 22763 - DNA, 1642 bp, Heterodera glycines
tcggtgcgcgaacattcgcagaaattggcggtcgcttcgctgaccgaacttttcgttaatgtgttgcccgggtacgaaattcgaccgctgacggactcagaaaagacgcaaaaaatgaaaaaggaaaccaaaaggtaagggaaattttggtgagatatttcgttccctttttcttttgggctggccgaatacgaacacgccctgctcaattactatttgaaattccttcgtttgctcgagaaaaatgcgaacagtcagtctttataagccattcattcattttggttgactttttccagagattcttcagaagggcaaaaggcattcattggctgaggaagcgccgactttttccacccaattttcttttatttgcgtccgatgtttgtgccgactcattgacaaatgttcacattttaatttcgccaagaatgtcatcacttgcttggtccggcttagcacaacgccgtggaaaaaggcaattaaacaatgaatgaattggcggggaggggggggggatggaagaattcgtccaatcgctgtttttgccgccattttagatgtcggaggagatttgtgcgaccatttctgaggtgttcagggccgattttcaactgcaaatttctgcccatgggacgaattcaattgctcttttggttaacaaaaaggctgcttccgtgccggcggcacttctcgcaacttttttggcactgaatataacggtgagcgggaaaaacattttcaagttacacgtttttattatttctgttttaaggaaaatgaagcgaatataactgagaagaaaaatcagaggcaaataggaggaaaatggaaatcgaaacgatcgaaaaaggcaattttatggacaaaaaaagagtaaacaacaaatgattttcagtacgacaagcaaatcggaaagattgatgcggaactgaaagaagcgattgagaccgaagcgaagtcgacgaaaacgcaattggtaaaaagacgagacgattgaccatggattggcataaatcaccaatttcaccacccttaggctactcaaacgatcaaaaatgtcttcttgacatattgtcgtgttctgaagcgaatgcctgccaccgctttgcttcgccccgtcttggccggcttgtcgaagtttgtccatttgattaatgcagaactgcatgaggatttggcacgtcatctcgccaatttggtccatcagaaggtcgtccaatgggcttccgtttcttcaccccccccccctccatttcgtttagcaattcggcttctccgatgttttgcattgtgttcacaccgctgccgtcgttttggagggcgatggccgtctattgggcgtcgatctgctcagtttttatcgggctatatttggcgctttgccgaatgtctgtttccaacccgagcaaagtgcgttttcagttgtaaatgcatttgttcgtcttgccatcgtttcgttgtccaatccttcgcttttcagcactatttacggacctttcgctgctttctaaatcgctgcatttgctcttcgtccgccgtcgtaagtcggccgtttcgcccgcgcgtgtcgccgcctttgccaagcgattggcccttctcgcgttgccccttcagtcccatgctcaggacgtccttctac

SEQ ID NO: 22764 - DNA, 1347 bp, Heterodera glycines
gatgtagatttattgttctttattagttctatgcaaggattttgattcagaaaaaaagacgacaactagtctctgacaaagttcgagcgacgcacgaatgtggacacgcttgcatatgttggcaagcaaaatactcggacggagttgtatccgtaagttggcaaatatggtattgcatagaatcattcaaacaatcggcattttaattagagaccggtaaaaaatttttccgggaacgggaacgggaaaacgaaaaagaaggggcgggattcccgaacgagattcccgtgtttttcccgttcccgtaaaaatcccgtcaattttaacgggaatcccgccgggaacgggaaaaaatttttttcgaaaaaatattgattttttttttctaaattttaatttaattattctcttaagtgaaaatattatattttaaacgattaaaataatttatttctgtgtaaatgattaaatattattgcttttattaacgaacaaaaattaataaaatttaatttttttaattgatttgctttaaaaataagtcgataacaatatttcgaggtacggcaagaactggtaattttcttagttctaaaattcctaaaaaaattttttatagtgtaataattttagttaaatttattatttttttaacttccaaaatattcttttagaatttttctgtcttttcaacttattgacaaaacttaattagattaaatcgtttttttgcggcgcacgtttgccaaaatttttggggaaccggttggaggtgggacggcggtgctgataggcgccgctgggaaaaaatttgaaaatttaatgaaatttgttaacagattttatccaaaatatgtccaatcagtggttaatttatgggtctatggctgtttaaaaaaaaaataattttaaatcttattataaaattttaattaaaataatcaaaacaaaatataaaactctactatcccaatggggaattgaacccaagcgaaaaataatttaagtcaaaagtgttaaccactcggctacacacatatgtccacttgttgatttgaaatctatttatttattcaattttttctttaaaaattctcttttcccaccaatttccttcaaaatttttcactcagacccccattcttaccagtgtacttttatttccgtttttgagaaaaaatttacgggaacgtgaacgagaaaacgaaaaagaacggggcgggattcccgaacgggattcccgcctttttttcccgttcccgtaaaaatcccgtcggcgaaaaaagacgggaaacgggattcccgtcttttcccgcgggattcccgttcccgccggtctctaatttt

SEQ ID NO: 22765 - DNA, 936 bp, Heterodera glycines
ccccccccccccccgcccttcagagcacgacaaatattcaacaaaaattttaaaaatgactagagcaatgaacgctaacggacgacctaatggaaaaaaatccccgaaggagagaatttaattaaatccattccttcgggggaccgtgccgggtgccgcggggtaagcagtgctggttcgtttcatcacggcaccgaaccttttggctagtcagcaatcgttgcttaacttgccagatcggacgggtgcgcatgattccactgttccaagcaccccaccaaaagcaaaacgatataaccaaaatataaggaaaaattttttaaaaatttttttctccatcttcctttttgatactaaagcatcagagtgctaaaattaagttgtaaataaaatttggtgcgctttagagcactttctgaaaaaaatatttatgaaacaaaaaaatcgattttttcaagtgtccgtttggggtactcaaacatttatggggagcaaaaatccaacgcagaattaaagtacaggctatagggaagctattcccgaaggattcggtctccccataaatctgggcgcatcggttcggggggactgccccgaaaacaaaaaaatcgattttttcaagtgtccgtttggggtactcaaacaattatggggagcaaaaatccaacgcagaattaaagtacaggctatagggaagctattcccgaaggattcggtctccccataaatctgggcgcatcggttcggggggactgccccgaaaacaaaaaaatcgattttttcaagtgtccgtttggggtactcaaacaattatggggagcaaaaatccaacgcagaattaaagtacaggctatagggaagctattccggaaggattcggtctccccataaatctgggcgcatcggttcggggggactgccccgaaaacaaaaaaa

SEQ ID NO: 22766 - DNA, 1681 bp, Heterodera glycines
  unsure (1)..(1681): unsure at all n locations
tctacggcctactgtattccgtgtacagtcgtggaactttgcttacttttttggccatttcagcgccggcggaataactcgtcggggttttgagggaggatgtcggtgtaagcggcttttttgtacagctcgacgagctctatccaaccatgtttttgtatttctgaaattttcagaaattttcgagctaggccccctcgtcacttttgaggtttttgaattttagtattttttgcagatttttccggggaaaatggagaccactttcaagcaaccgtttttcatgctctatcgattggtgtcattttcagaaaaatttttaaaattttttttggaaatagaaaatttttggttgctaggcctcaatttcagttctggcgcaataactcgtcaggagttgaatttatcaaaaaatcgtctaagagcttttttgtagagaattttaagcccaatctaatgtgctttatctcatgtttttatcatgaatttaaaaaaagttataaaattaattgtgattttgaaactcaaaaccaaaggggggaccccatggttttgcatttcatgaaaaatttttttgctcctaaattagccaaaatgcatttttatggcataatttgaggtgctgaatacgtatatacgctttattttgcgtttcagattttttggaaggtgtttaaaatttttttgaaaaatcgtcaaaatttgagccccggaaaatccagtgaaatttcgaaaattcataactctcttcgtttttgatcaaatttagtggcataaagtttgaaaaatagcaaaaaataaggagaattttatgagatttgtttggaatttctatcttccaaaataaaaagttattccaaaaattctggaaattttcgatttttcagaaaaaaattcagaactcggttccgtaaaggtgtttttgaaattttaaatactgaaaaaatccgcaatttttcgctctattttatcaaattttaatttagctttttatcacttttttaaaaaaagttatcagaaataaaagtgattttcggccttcgggaccacaggggtgtgaccacgatttttgagtggaaaatttttttcaccaaaaatcttccaaaaatatgtctttagaggttatttgcgccgctgatcacgaatatgtaatcagattttactttagacatggttaagacctcagaatccccgtgttattggggattctgaggggtgggagcgcccgtcctgaggccgcgaagcggccgaatgtcccccaaaaaataaaaaacgggcgcgaagcgcccgtcctgaggccgcgaagcggccgaatgttcccaacaaaattaaaagacgggcgcgaagcgcgcttcctgaggccgcgaagcggccaaatgccccccaaaaattaaaaaacgggcgcgaagcgcccgtcctgaggccgcgaagcggccgaatttccccaaaaaaattaaaaatggcgcgaagcgcccgtcctgaggccacgaagcggccaaatgttctcaacaaaattaaaagacgggcgcgaagcgcgcttcctgaggccgcgaagcggccaaatgccccccaaaaaattaaaaaacngggcgcgaagcgcccgtcctgaggccgcgaagcggccgaatgttctcaacaaatttaaaagacggggcgcgaagcgcccgtcctgacgctgcga

SEQ ID NO: 22767 - DNA, 997 bp, Heterodera glycines
aaaacgccggccccattctatgaaatgatgagcgaaagtgagctgaatgtaagagacgggtgccacgttttgtttaaaaacagaacatttgtgcattttagtttacacaaaaaaatttttttttttttttgaaaaactaaggagtgggggaggggcttggtttgcattttattgtagaaaatggtgtttttttacatattttcagggtcgtttgtcatggaattatatttttttcattagaaaaaaccaaaaagttggttggtcttccctttggttttttaaaaaaaaaatcaaccgccccaactaaaaaagtgacgattttgctataaaatatggcaaagtttagtgtattttgtggtcaaattattgtaaatattcaatgaaattttaagaccaaacaaaaacttttgaaccgaatttatgaggcaacacacccaggtttagcaaaatttaaaaaatggggtacaattttttaatactttcaaatgccactgacaatttttacaatttttttataaaaaagtataaattccataaaaatcgaaattttttttgaaatatttggaaaattttgtaatttttcgaaaataactttaaatttctctcagaaattgggatttacttcatttcttcgttttctccaccgaaatttttaaaacacttaaaattttcaaagattttttttaaacattatctaaaaaattgtaagaaaatagggaggaattggattttccaaatttttttttaaatttccgttttaggcttaccctctccctaaaaaagttcccattttatttatttttcagtgatttcaagcgacacgccaatcccgcggaaagtgcggcgcgcattggcgacggacgacggcggcggtgacaaaaatggggcggctgaacggcaacgggaacggaggaccaagttcgatttttaggggtgtattttagggttttataaaacgattaaaaggtgcttttttgccgtgctaattttcttaaaa

SEQ ID NO: 22768 - DNA, 1785 bp, Heterodera glycines
  unsure (1)..(1785): unsure at all n locations
ttcagacggggccacgcggcgtgcgaggcgcaccgtgtttagagggaccggcgggggacagaggggcggacgcgtcgcaaggcacggagggaccggtgggcgaacgcggcccagtgggccctgagggaatgatgggcgtgaggggtgcgcacggggacgaaggaccgacgggacggtgagtaaagtaggagaattttccagacatccccgacaaattggccggggatttatgtccccgacggtcgggggcgaaccaaagtcataaaatataatatacctatttgctctttttatatgcccgggtatattatttttcaaccccctcagaaaggagccaacccaaagaatgattgtttaggactggaccggatgctgagtactgtccatgcccgcaacatttgacagaagttgggctacagcagcagcaatattataaaattggacgacggcagaggctttgatgagccaaagaataagacgatagaaaaaaagaaaaacggcggaaggaagagagagcgagagagagaaggagagacagagagacggagagtttagtatataaattgtaaatcaataatatgtcggattttgaaaaatataaacgattttacttcatgccattcggcagtggtccatcaaggattgccagcctttacagcccaacaaatttcgtcgcaaaatgttctacggcatgggggctggacgggttgagaataaacattctttgaaattgggagaaaataattaaaaagaaataaaaatttaattaattcattgaaatttcaaagatttttgccttggctcctcccccaatacggaatatttttttaaattaaattatgggaattttccaagcaccgaaaataaaaaaattaaaatatttaatttcattttttaaacataatcaaaaagtccaattctttaggtgcaaaatcgtttaacaaattgtgacaaggtttccgaaattttccggcgaagcctgttggaaccgccggacccaaaatccctaaaatttttaattaatcaaaaaaccagaaaagtgacatttgaggttgaaaaataatcccccatgggctataattagaacatatacggtaattttattcagtacaaaaaattctcgtctcttctcgtattctcgcgttttagggtctctcgttctcgtgactcatattttatttttgtctcgtttttctcgtgtctcgtattttttcgcaatatccttgtctttaacttttccttcccgtacacttggaaattgtttggacagctaccaccattgttggagctcgtaatgaattcgaatagttaattaaaagaaataatattataataggacgggtaaaaaattaccgggaacgggatttcgcctttgtccctaaaatcgcgtcaagttttaacgggatcacgccaggaaacgggaaaaatatttttctatgaaaaaattggtttttaaaattttttaatttaattattttttgaagtaaaaataatattaatcttttattttcatttcacaaaagccaaaattaattcaaataattcaatttcacagtgcggaattggaataactttttgctttaatttttggcttttgtgaaatgaaaaataaaaaattaatattacattttttacttcaaaaaatatttaaattaaagattttaaatcaaattttttcatagaaaatagcaacttcgagttttttanattttataacaagctanaacaaaattacctttatataaataatttttcaaaaatacttncaaaatctncaaattttaa

SEQ ID NO: 22769 - DNA, 970 bp, Heterodera glycines
gagtcccagtgattggaatgctgttgggtttagtcccagtgattggaatgctgttgggttgagtcccagtgattgaaatgttggtggattgagtcccagtgattgaaatgttggtggattgagtcccagtgattgaaatgctggtgggttgagtcccagtgattggaatgctggtgggttgagtcccaggcgattgaaatgttggtgggttgagtccaagtgattggaatgctggtgggttgagtcccagtgattggaatgtggtgggttgagtcccagtgattggaatgctggtgggttgagtcccggtgattgaaatgttggtggattgagtcccagtgattgaaatgctggtgggttgagtcccagtgattggaatgctggtgggttgagtcccagtgattgaaatactggtgggttgagtcccggcgattggaatgttggtgggttgagtcccagtgattgaatgctggtggattgagtcccgttgattggaatgttggtggattgagtcccagtgattgaaatgttggtgggttgagtcccagtgattggaatgctggtgggttgagtcccagtgattgaaatactggtgggttgagtccaggcgattggaatgttggtgggttgagtcccagtgacttgaatgctggtggattgagtcccagtgattggaatgctggtggattgagtcccagtgattgaaatgttggtggattgagtcccagcgattggaaagtctgataattgagtcccagtgattggaatgctggtgggttgagtcccagtgattgaaatactggtgggttgagtcccagtgattgaaatactggtgggttgagtcccggcgattggaatgttggtgggttgagtcccagtgattgaatgctggtggattgagtcccgttgattggaatgttggtggattgagtcccagtgattgaaatgttggtgggttgagtcccagtga

SEQ ID NO: 22770 - DNA, 1106 bp, Heterodera glycines
  unsure (1)..(1106): unsure at all n locations
tgcaggtcaaantttaattaaattatttnntttccttttaaantggatttttaccttttatgattaaaaaaaatgggtacgataactcgaaatcagctggttggtgtacgatagatgactcgtgggcagctctggcccgtacaagaactcgtacaaaaatttgcatattaaattttcaaggaaaaactttaaggaaaattgatagaatttgggtgatcccagtgcacattcagagatttgttggaatgccggtttccgatatttttgagccgtctgaattcgaattttcgatttcttaaatctttttgagctgtcggaattccgagttccgttattttgggcttaaaattccagtttttcgattgccgaaattttttgaaggcgtcggaattccaattgccggctgaaaaattattcgaactcggatggtcccattataccttgaatttgtccatttttggtcacctaattaagattaacccaaaaaccattccctgttatatgaccattaaatattaatattcatctttcacttttaatttttgataagcaaatagagcacaaagcacgtgaacacttaaaatagtaagaaacgctaaatttgtaagttttgtctgaaattaaaaaaagtttttggcacatcaaaataattgctgacgcctaagtgcttgtggcagggatgtggtgtgccgatgctctcaaaaaatgtttggcaatcggaaatcggcattccgacggcgctgaaaaaatttcggaaatcgggagtccgaggagtccaaaaatacctgaaataggaattccgtacccaaaatcaaaatcggtattcaaacacatccctgctggtgtgtgttccctctgctggttggtttggtccccaattccgcacccggaaaaatgccaaaaaatatttaataccatttttaatacaaaacaaacaaataacggggtgcttgattgcctgcttatctggcacttgctgattatttgaagatgattcattgcatcctgctgctgtgccctctccttaacacccacataaacaccttattgaagtgccaaggcactgaattattggccaaatacccccggnncgggggggggggatt

SEQ ID NO: 22771 - DNA, 878 bp, Heterodera glycines
cgacgaagctttccttcttcagtcacggaaaaattgcatgaatagtcgtgcgcgagactgatgaagatgatggcacaacaaatgctgtccgttccctgtcaatcacacacaccccaaaatttgttggcacacgggttgggggtgtcgttcgtcttgggtcatccataggtttttctgtcgaacgagaggccccctttgaattttatcccgaattttccactgttaagttcgcttgtaggtttggtgccggcaaaatggccactccttggcactgttactttcttctcctgctgttgtgcttttcccccatcagctgtagtgccattcctcacttgagctctcctcatgccccagggcattcattaagtcagtaatgaaccaaagtactgaataatttatgtgccattttttccgtgccgttgctgttgtgttgtgctgtggtatttcagtgccatagcacatgtgtaactcgcgcagcagcacttctcccccccccccatccattcatccatttttacaccaaaattccatctcactggagaattagtgctccaaggttgtgctggaactgtaaaacaaattccttttttaggccaattaattttttttcaccgagggttggcacaaaatttttacgagtgtttgaatcgagagagtagtaataaattgagaaatttacaaatttttttgttagattggcgacaaattacgccctccctcccctacaattatctcagcttaaaaaataaccaaaacgagaattgactgttcccgagaaccagttgaaaatcagagaaatgtttttttggattcagcgcccgaattcacaaaattcacacataatttaaaaatttggctaacggctaacataaagcata

SEQ ID NO: 22772 - DNA, 1591 bp, Heterodera glycines
  unsure (1)..(1591): unsure at all n locations
atgggaccagtaaaagtcagtattacctgttcttctgcccaattcaactcaattaggccagggaaaatgagaaatgtcaaaaaaaaacattgatttttattttgggatagtattattttttaaacttttctactaaacccctccccttccccctaccattaaaccattcgtatatagaagggaagccaacagccatcatcaaaccaaaaatatcttaaagctttattatccaaataaattgttatccttttggatagataaaaaatggtttaatctgaatttcatccatatcaaagtcccaacccaaacaaagaagagctcaagctccaattaagaggcagtgccggtaataagaaagaagacccgccgacacaggcacaggatggcaaaaattgaaattatgatgttggaaaaatggcaaaaagggagggagagaattttatgggacgaacgaaacaaaattgaattgaattgaattgaattgaattatggttaaaaattattatcaaaaattttcttttaataaacatgatgaaaaaagcattaattcctaattcttaataaacaagatacatcgacatatttatagatttatacatcccatcccctcggacccataaatttgaacatgacgtcctagtagtcgggtatattttgaaacattgatcgataaaactgggagttttattgtagacaaaatcaaacaggaaattatatacctttcaagagtccatagttattgactcgagaacttaaatacatacatattatgatatcggtaataaatctatattggtcatatttcggattttagtccatattttaactgccaaacattttttcaaacaaaactcaatctcgggcacaacgttaaacagatgcaaataattagagagaaaagaaaaagtaaacgaaccataagaaatttgctttccgacagacatattttttgggataaaaaataaatgtaatttttggaattaagctattgtgagttacaatcctatttgtgtacaaatatgtattattttttatttactgcttatttattttaataggctgagaatttaaacaatcctaatggcaaatgttaaaaaaatagaatttaatttacttattttttgagtgaaaatagatgatttaaatttcaaatatttttcacttcataaatccataagtttaaattagagtgaagcggaaccgggaccgggccgggaattcccggtcatccgaggtncccggggttttgaaaagctcaggtcccggtaccggtagggcaaccgggaaccgnngaaaacagcactggtaaggaatggggggtctgagtgaaaaaatagtgatgaaaattggagtcaaaggaaaaaaaaattaaaaaataataattnaatattctttaaaagtaacactacccattgtgcaaatggggctagtctccatgactttctctttctcttcccatggttcatttctctacagaaattaaaaaaattttgattttctttttttaaactcatgagtttcctatcaaaaaaaatgaattcctccttaatttttttttttaattaacattttttttatttttttttgaaaa

SEQ ID NO: 22773 - DNA, 1606 bp, Heterodera glycines
ttaccagccaaaacttccttaaaaatttttttcgaaacgggcttttttgctacccggttgagggacgaagcactgtttcttttcgtgaaaggccgtagggattaaacaaaatatttgcccatgtgaatgggttttgccaaaaggggcatcgtcctttcgttacacataaggaaagcatattgctgagtttgaaaccatgttaagtctactgtatttgatgcgcaagcgttggcattgtgccaatgccaaaaagcggttcgccaaaatcggcattgaatgcgccaaattgcgccaatcgtgggacattatgtatgaatatttgttctgactgcactacgacaaagccgacagtgatgccgatgttccaaatgcgcggacctcgattgtaactattttctaattaaacattaattcatgcaaatactagacatcgctacttagtagtgacattttaactacatctaattagctcttcacagattttctttggctcagacgcatcggataggattattcaattgatcccgtccatgatcctcgcaatttttgacagagctaaagaatgtggcgtaaggcgtcgcgccaaggccaggtaccgagaaatcggtcctgcgctgagggcacgcaatcgcgcgcacaggagaaagttagctaaggagaatgaggaatggactcggcgcatcctcttctgaggaggcgccccccgaggatgcaccccatggggtgcagagtgacgtcgtcgctccatggactgcggaggggaagactgcccagtggcaaccaatttttggcgcattctttggcggtaagctcttcccaacatggataaaatcattcaattgattccgtccatgctactggcaatttttgaaagagcaaagaatgtcgcacgaggcgacgtgccaaggccaggtaccgagcaatcggtcctgcgctgagggcacgaaaccgtgcgcacaagcggctgctggcggaggaaaatgacaagtgggttcggctcatcctgtttattttaaattaaaaaaagacattttgagttttgcacagatttgaagttcccaaatggaagagactgtaagttagtgataaaagggcggcatacaggtgaaagattactgagactggtcaaagagtgggaattgagcaatatttatacagtactctgaccccccccccccaccactattgcatagcgtagaaaaattgtaaatcacaccgcatatgaaaccccgtttttaccacagttctttggctcagacgcatcggataggattattcaattgatcccgtccatgatcctcgcaatttttgacagagctaaagaatgtggcacgaggcgtcgcgccaagtccaggtaacgagcaatcggtcctgcgctgagggcacgcaatcgcgctcacaggcgacggttggctgaggagaaagcgaattgggcccggcgcacccttttcggctaaggaggctccgcgctttttctccgcttttttttaaaatgccgcatttagagactggctgctgctgcttatggtttcttttttccactatttgcattttcctaatggtttattttatccgtgccattcataagcacgagaaaggatttaag

SEQ ID NO: 22774 - DNA, 1261 bp, Heterodera glycines
gcgagacaaggagcgcgacgtcagcgagaaaatgccacttggactgcccgactcacgcgcacgcgaaagtggcgaaacacaattcgactcacgccttttcaaccaaaccggggtgggtggactcgagaaatgatttggtgcaccgtttgcctttaaaattgcttttcacagggtctcgacagcggcggcatcgatgacgaaacgtacgccgcctacgataagccatggcgtccccaggatggcattcagcagcacatctaccgaccccgtaaatccatttttgttcacgatgggaatcatccgttctctctcgaattcaggaaaggacattgacagcagcatttatggcgccgatttggatcgaattatcagcaccaatcggtttgtgcctgacaaaggcttttccggagcggatggagccggcaaggagggtggacaacgaagcggaccggttcaggtggattttacggatgattaacagtaatccacttttaattgaatcctgttgttctccctttagtttgaacagcgtgaggaggaggacattttcggcctgggcgaactgctccaaaccacgtcatcctcagccaagcgaaaagcgacggaatcggaggaattgccaagcggcatcaaaaagagtcggagatgaactgagaacggagagcattgtttcggcttcatttctccaaataacgaacacttttttatgtatttgttcaaattggtgatgtcgataaatttggcaccatcaccatttgctcgcacattttgttctgctgacaaattgtttgtacgtcttccgctgcgtgtcgtcgctgcaggcgaactttccattgtccttcctttccaaacgcaaatggcctttggcttcccctccctttggtgagctttcgtccacccttcccccccacctcgccatgtccctcacctcaatttacgcacccctcccctcccgccgccgtgggagtgaaagttgctctgactgtatgccctcgggggagagggccccgccgcgacctttccctttctccccgcctcgccattccctcactcactcgtacagaaagcgcaaaaatagagtggattcggtggcttgggcgagggagggccttggtccctccccctaaccttttcactgcacacaccctcaggtgacggtccgtacttgcctacctttcagtcgccggaggggttttcctccgccccattgctctggaggggatggaatggtcggcaaacacagcccccgggggatgggggg

SEQ ID NO: 22775 - DNA, 1549 bp, Heterodera glycines
tgcgccaacacatcaccgcaaaatatcccaatggcctcatagacgacaactattcctgcccccacttcaaccccaacgaccgcgccttcgtgtcaacctgtacccatcttgaattaaacgcagcattggaggccggctacacagtccgcaaagtcttccacgtcctgcaatacgaccaatggagcgacaatgtcttcaagtcttacgtgagtgaaatgatggccctgaagatccacgcaaccgggttcccgtcgtggtgcgagagcgaagagcagaagagtgaatacattgaggagtgctggatgaaatttgcaattaaactcgacaaagaaaagatgaaagctgaaccggggaagcggtacatcgccaagctctgcctcaactcactttggggccgcttctccatgaggaatctactttcgaaggcggtaatcaacaatgacccttgtgttctccgccaatacaccgacgacaagaaaattgatattatggacattgagctgatggatgaggacaacgacgtattcatgctcacctacaagccgaaagaggagtttgtcgacgaaaataaatactccaatgtcgtcatctcactctacacaacatcaatggcgcgtctatacctttacgaagtgttaaaaaaagtggccgacactcccggatgtgaaattctctactttgacacggacagcatcatctacgttcaccccgaggaaaacgacccactcccgacaggaaagggacatctcggtgagctgactgacgaaaagccggaccacaacattttggagttcatcagcgctggctgcaaaaactacgggctgaagttggaacgtaaggacaatggggaaattgagtacgacttgaaaataagagggataacactggatgaacaaactgtgcaaactatccattatgacagtgtgaaagatcaaattatgcgttatggttccgatgaccccgcggaccctattattgtaacatatccccattttattcgtcccaaccttatccaaggcaaagtgtacactcaatctctaactaagcattatcaacctgtcttcacaaaaggtattattaatgattcattccaagtcctcgaatttggttatcgcaaatgataagtatgcattctcaattaaattttctaaatattagttttcttatggttcccttcttttctttctctctgtttatatcactcatgtgggacggaatgacccctggttgatcctctccaacactccaggccatccatctgagatgaaggtggacgagctgttcattattgtaatgcacagcctggtgcgtgagtgtttggattggggaccgaagggtgaagccgttccctgggtgtgtttgctcacttttttcaaagggaactctaagaattctgatatgtcttcaaatctatcaaaagagttgcatactttctttttataatttcctttattctctattttacacttgtatttttcatttgaatgtttattcagaaataaaattgaaaaaatgtgtcattactaatattaaaaggtataaattaaaa

SEQ ID NO: 22776 - DNA, 1363 bp, Heterodera glycines
aattgggacgaaaagatgcgcttgcaaaaggtcttcctttttgaaggagaaatttcggcaaactttgtacctggaatttaaggaaacccattattcaattatatattcattctcaaaacaacttgtgaaaggtaaatggaaaatccaaaatggattgtatgatgatcagttgggctctggcatcccgacgcacgcaatggcgaattcgaaatccagccgaatttggctcattgccgaggtgtcttttgcagatttgtgaaatcgctttgttgagtaccaatgggggccgtttgcttttgaaacaggcaaccaattcatacgaactgatgtgaaaaaaatgcaattaaaacacattaacattaatgggaaaaaatttttatgaaaatttaaaatatgttcaaccaaaattggaatttttttaataaatgaaattggtaggcttggggcctaaaatgacaaattttttaaaaaattgtaacaacattaggccaaaccaatattaaaatcaaaaattcttcaatgacgaaaataaataaatttgagacaatttatcggaaaattttttcattttaggggtgtatttttgaaaatataaactcataaaacaggcactaggcagctgagaagagctcagaaaataggtaaaaccctaaattgtatccccaagcaaaaactaataaaaccgcaaaataatttaaaagtcaaaatatttttaacgttttaattaaaattttttacttccgacacgtctccgatgttggcaccttttggaatgcatcgaactcatttctcttttgcgaataatttgttggtaaagccgaggtgttcgctggtggtggcatgtggagagaaacgtgacggctgaaaatgaaaaaaaaataacaaaataatttgataatcatgagacaattagtcgttgccgaggattgtggcacggttgtaagcctggagggtcaatgaaaagcattaagacaaaaaatttgacaaagtgtctcattttccgctgaaagaatttttgatttattattggtacttgtaggtcttgctacggacgaccttcaactcgtttttggccaactcgtttttgtatcgactcgtttttgactcaactcgtttttattgttccaactcgtttttattacttcaactcgttttttgggtcaaaactcgagtattttgtttctcaatttgaaatttcaaaaaaaaaattttctagctttttttaaaaaaatttaaattttgttttcggtaaaaatggatgtcatattcgtgatcagcgaccattaaaaccccccggaaatataaaatttcgtcaaaaaaactaagttcaaaagaaagttagaaaattcggattttcaaattt

SEQ ID NO: 22777 - DNA, 2021 bp, Heterodera glycines
tttcttttttgtgtttgcgtacaaaagttggaacttttatttacatattttggaatttttctacatattacatatgtacatatttttatacatattatggaatttttagtacatgtttcgcaattttttcgtacatatttatttttacatattttgggaatttttgagaatttataaaaaatttcttaagaaaaatttaaaaaatttttttttgaaaatgtacccctaaaaatgggctttttccaaaaatcagattcaaaaattaatttttaaaatactaaaaagtgattctaagcctattttagtcctttttatggcattttctgattagttcactttttacgaagaattttttctagaaaaatgaccatttaaaaattatttacatattttagtacaatatgagggtttttgtacatatttccatggtgcgacttttgggatttgcaacttggggacccgacatttggggatccgacacttatggaatccgacatttggagacttcatttacgacatgtgtgtggagttttaatttcttcggatttatgttatttaatatttaaatgtagactgaattatatatacatcattatcatcttctgtatataaagtttttttaatagataaatttagttaaattttaaaaatttaacacattttttaattatttatctaattattccatttatcatggaaaattgctatatattaaatatttaaacacaaaatgacctcaaatattttaacgcacttgctttgttagttatcggaaaaataataccaaatgaaaattattttcatgtacacactttttttagttgtttttattaaacatttaattcaagtattttatattattgtcatatgcgtaaattacaagtattttacatttaagcgattttttcctcacttgggttttcatatttttactaaattcaaattaatttaaattttacattatatatttagaattttgttatgcatagctcaaatttttacatatcatattaattatgattgtttgttgatgttcataggatgcgaaaacaaatgatattctcatttttttaaatagtaaatttttatatttttctcaaaatgacagaatgttgttcttatatttcattcattaaaatttattttttagatgaattttttcatttatttgttaataattttttttaattttgcttaaattttttaattctttgccttatatattatttatatacaatgtgaatgtttcaattaaattgactcgacgcctttcaattcttctatttttagtgagaaaatattttaaaaagctcatttaatttagggcatttgtaattttcttgtaaaattttcttttggctaattttctaaattttcaagaaaactattaaacttgcattttggctattgagtgcattaatttggtcttggagaggtcatagaaaagattttttcgtttaaattgtcttttttattgtataaatattacagattattgttttatttacatattcttataaaaaagttagttgcttttaaacttttacattgcaaatattttgtattgaatatatttaaattgttataatgtcttctttaataataataatccagaaaatagcagactatatgtgatttcatttaattatgtcatgtttttattacgacattgagactttgtccctttaatttgacatttcattaataattctttttagcatattttttcaaactttaatcgtttaaatactttatttatctttttggctatgtaatagctatattcaaaaaatcaataaacattcgaattaataaatctcatttattaaataacatttttatttttttagatacaaatatatttattttacattttaaaattatttttttaaatatatttattattttgttgtatatgtatattttttctcttttgaatgttatttttcacattttctcgtggtaccgaagtcttgtatcttcccagattattaagaacgctgattttgttatatgaaatg

SEQ ID NO: 22778 - DNA, 753 bp, Heterodera glycines
ttactttgatgttcaaaatgtacatcatatattctttttttttatattctccgaaacaatttattttgttttataaaaaaagaattcactgagagaaaaattaaaaaaacaaataaaaaaacaaataattaactgacaaatataagtattcatatgagtaaaaattcttcgttttaacgcccctttccatccttagaaatccctttttgaatttttacccttaaaataataattttccctattattggacaacaaacaattaaaaatctctttaaatattgacctaaaaatgaaaaaaaagccgaaaatagaattttcttaagaaaacctcttttttttttgctttttattcaaaaaaaagatgaaatttaattcttttttaattaaaatggctaaatatgttaattacatcgactttaatttattaaattgaaaaagcacacatttttcaaaattttcgcctttattttaccatttttcgctactatttaggtacctattttgggtttttcgtccctcaaatccatgccctaaatatgagtttttaatggattgtcattaaaaaatgagggggtccgaaaatgcacggattaaatccgcagggaaattttaaaaaatttaataaacttgcacaattaaaaacataaaataaatctttgagacagtgtcaattgttctcattgtggaggagtgctaggcccagcctttggccaaataaagaaaagaattatgatcccaaaatttgaaaattgg

SEQ ID NO: 22779 - DNA, 1747 bp, Heterodera glycines
tttttcttttgtcagtttgtgtaaaaaacagtcttaaaaatgtttcttttaaataaaacaaacgaaaagcccatttttggcattattaatttaaaaaaaaaaatcgccagttgtaattcagttttgtactaaaaaaaaaatcaaatttccagtcccattttttaatgtctccggcggtttcatttcctccatttttgatggtctgattatgtctgttacaaaaccttactgaaaaacctgttcttttatttattttttttaatttaaagaataaaatacaggtgattgtttaggaatgcggtgactcattcatttagacaaaacgaaaactaattgatgaatcagtttgattcttgctgctattgcaattgatgccctttcactgatgattggaaattgttttttattcgtaaacagcaaaagtcgagaccgtttttcatttaaaaacatgaatgaaacatttgtattaatttcgatcattgagaaatttaatttccttcaaatttcgcattttttttatttttagttcttttcccactcccttatttagactttagcctttttgttttcaatcgtattttgttatattaaaaccggcttattatggagaatggcactcttaggtcaatgtatagtgcaacctccgttgatgaccggagccaattttttgaccgaactgccaacataatgcccacaaatgagcaggaaattcttgatgcttttgaagcagttttggtaaatcccatgaaattattttaattttcctaaattttattgttgcaggcgaaaaaggatttgccgcctgacaaaatgcgaattttgagggactgtgatctgaagaaaaaatgggatttggtgtgtgatgagcaccaatttacacacaatcagtgcatcacagaaccccacgtttacctcaaccaattgatggccataatggacaagaaaaagtcgacgaaaaaggtgcgttttaataggaaaacaatactttcattaatttatcactattaggagcacttgtatacttttattggcgtgactttttcttaaaatgaattttttttttaaattttctatgttacacttattttatgctaacatccatttacatgaaattttgccattagcgattaacggaagaagggactcaaaataaaatgataaaacatgccattgtttatagaccagtgatagattataaagtccatttgaaactgcgcagtcacagattacacggcaatctttttgattttcacctaaaattcattaactcacgttaaaggatgctagcttaaaataaaagtcagattccttttcagcgcttaaaatatcacaaaaaaaaattcttgaggtgtgcacaaaaggacaattaccgacttttttaatggatcatttggtttaaaaaattttcattaattttttcacaaattttttttttccatctgaccccatgtacaaatatatataatttatttatatattctaactgtttttatttagaaaaagaagattttggccggtgattcgcccacccaaattctaaaacatttggaaatttcgttgaggaccaattccattgaatgggttcgatcatttttgtcgccacaaaacaatggtcagtctcacaatcagtcattgttgttgtgccaacaaatttttccttttaggactccaagttgtggtggaatatctcagccttctgcagcaatcattgagtaaattgtgccccccagatccgttcccccccccc

SEQ ID NO: 22780 - DNA, 2266 bp, Heterodera glycines
cagtcattttggaattaaaaaaatctaaagctatgcaattaataataattatggcagtcaagagtaaatgataattcaataaatttccatattttttgataaataaaaaattaaaaaaacatattttattatttattttatttgcctgatggctccgatggaaattgccaacgccaaaatggacaatgccggccgaaagagtggcacgcgaatattttggcacttcaacttttgggtatgccattgcgatggtgttcaagtttggcgctgacagcttcaccgaaatttgctccacaacagaagccggatattcgagaagggtggccatgggaggagttcaaaaaattattagtgaatttattatagctaaaattaattaattaatcaattaatcatctctattcaattaggacactgagaaaaacttttttttttctttatccaacgaaaatcttttttttttataatattaaacttaaaataaatggtttttcttattttctttttggaaattgtgataaattataaatttaaaaatctttgcagggattttaaataaatccgtttaaaaagattttttcttaaatataataaatttttaaatttaaaattattactttaagcactaaaatttgcgctattgcttctttgagtgctgtgaaaaatgtttgttcagtaaatatacaactaagcaagcgcacagttatttttagtaaaaaatttaaaagaaataatctttgatcatgccattttaaaaaaatggaaatttaaaagaatatcgaataaaagatgatatttaaaaaataaaataaatttttaatagttaaaaaagctttgcaaataattaaatttagaaatttagcaatcaaatattgtcaaaatttgatgaattatgttaggaaaacaaaaaaaaacttaaattaaaaattttcttcgaaaataaaatgctatttgtccatttgcactgcaattaaataaacgttaatatatataaatttttctcctgttgatcattaattcattatcttattatcaacgccattttatcatcgagtgtcatctgacggacaaagaatggtcagacgaaaattattatttttacagaaaagaggatcataaaatgatttttaaagattgttacccaccattttgtaaataatcatcatttgtatggaaagcgattacttttacaatttttgttcaaaatcgtgaaaaattttaatttaaaaacaaatcatagttaatgttgatttgaaaatacaaattttattggggcgaggagaatgtaaaagattcgttagttcatttaaaaattatggttgaaaaatccaatccacactgatgaagaagtcatatagatcttacaatttgaaaagcccgaatcaggatcaaaaatttggaaatcggtaagtcaaatttcccagcactaattattcattcgataaatgcttatgaacattatatcttttccgaaaaaatattagaattttcataaaaaaaattctgacagcattcttatggttatctatgttttaaaagagagagaatacagaaaaataatagatatttatttgttttcagaaagcttttaactctccaaaaatccgccacaaatcaatgggtaaccgaaaaaatgaaaattactttaaaagctttaaaaatttttattttgacattcttaccatttctaattttgtaatggtgccttaaattgggccagaacccaactgaacttttaccatgaaatgcgtgggccaaaaaagcattgttaaaatgatagacttatttaaatttgcggagtaagtttcggaaacatttttaaaaaattaataaaacatttattgccaattttaggggtgatatttttacagtcaaattttcttttaaacaaatattacaagtgacaaagccaaacgcaaatttgcgtacggaaggaagctatgggccggaaagaaggattaacaaaagccaaagatatttggactctttagaaaactcatttaggaaaatgaaagcaatcgcattattataaacactcaaaaaatgtattaaaaaattgttccgaaaaagtaaataaattaaattaatagaaatgaaaagaagtatattaattttttttaattgctgaaaaactaaacaaaatcaattttttttttaaattactaaataataggaaaggtgtgaatatttgaatttttagaatttgtcggaacactaaataaaattcacttaaaaataagtaccggaattaataggaaagttttgc

SEQ ID NO: 22781 - DNA, 1877 bp, Heterodera glycines
tttttgctccccataattgtttgagtaccccaaacgtacacttgaaaaaatcgatttttttgttttcggggcagtccccccgaaccgatgcgcccagatttatggggagaccgaatccttcgggaatagcttccctatagcctgtactttaattctgcgttggatttttgctccccataaatgtttgagtaccccaaacggacacttgaaaaaatcgatttttttgtttcataaatatttttttcagaaagtcatgcgcacccgtccgatctggcaagttaagcaacgattgctgactagccaaaaggttcggtgccgtgatgaaacgaaccagcactgcttaccccgcggcacccggcacggtcccccgaaggaatggatttaattaaattctctccttcggggatttttttccattaggtcgtccgttagcgttcgattgctctagtcaatttttcaaaatttttgttgaaatatttgtcgtgctctgaagggcgtgggaggggggggggggcgaaggcccaccacgaggccgcgaagaggccgagtgagtaccttcggtgcaggaaaattattaaattttaaaattttttaattgctttttaaatatgccaaaaaatgtaggcttaacttttttagtgaaaattcgatcactcatattttttgctaattgagcagaagcgtaccaaactttgcagggatactccccggtaaaggactaacttacactgaaatgagcgccgagctagctggctcaaaaaaatttttcgaaaatctgagtctttcgtttttatttatttgcaaaattaattcataaatattttttcagaaagggttctgaaacgcaccaaattttatttacatgttagtttaggcactctgatgctttttctatcaataatggaggtgaataaaattttaattgcttttaacttggggaaaagtttaggcttaactttttagtgaaagtttgatcactcatatttttttagtctaatctactcaaaacggttcagaattcaataaaaataacattcacggtgcgaaaaatggggtttgacaagtttattggggaaaaaaagactttacaaaataatacccctgggagaagggagtgggaaacatgatttcaaaattttcaattttttctagtctaatctactcaaaccggttcagaattcaataaaaataacattcacggtgcgaaaaatggggtttgaaaagtttattttgaaaaaaagactttacaaaataatacccctgggagaagggagtgggaaacatgatttcaaaattttcaattttttctagtctaatctactcaaaacggttcagaattcaataaaaataacattcacggtgcgaaaaatggggtttgaaaagtttattggggaaaaaaagactttacaaaataatacccctgggagaagggagtgggaaacatgatttcaaaattttcaattttttctagtctaatctactcaaaacggttcagaattcaataaaaataacattcacggtgcgaaaaatggggtatgaaaagtttattggggaaaaaaagactttacaaaataatacccctgggagaagggagtgggaaacatgatttcaaaattttcaattttttctagtctaatctactcaaaacggctcagaattcaataaaaataacattcacggtgcgaaaaatggggtttgacaagtttattggggaaaaaagactttacaaaataatacccctgggagaagggagtgggaaacatgatttcaaaattttcaattttttctagtctaatctactcaaaacggttcagaattcaataaaaataacattcacggtgcgaaaaatggggtatgaaaagtttattggggaaaaa

SEQ ID NO: 22782 - DNA, 1930 bp, Heterodera glycines
  unsure (1)..(1930): unsure at all n locations
caaatatttcaaaattcgatacaaaaataaatatctttttgctcacncaatgcactttctgcgggcatcgttaagccaattcgtcaatgttcaaatcgtcccgatttttgtctccncagtgaaccgtcgccgtctccccaattggacaccgtttcatcatcaattggaaaattattacatcttcgcttttcatagtcagcttttcttgcgttcgatcattcaccaattcaaatggcacaattgacggtggcgcctcatgaacaggaaaaagaatttcataactgacagaattggtggcatggagaaatttcgaaacaattggaagcgaagagaaaatggcaatcaaaatcagtctcagtcatttgggaaaatgtggcaactgaccaccttgaaagtgttgacccactcgaagtctcgttgtttgttctccataaaaaacaaccgcttcgactgtccggtgctgtgtcgaagtgacaaaaaggcaaatgtgggcgaagtgacaaaaaggcaaatgtgggcgaagtgacaaaaaggcaaatgtgggcgaagtgacaaaaaggcaaatgtgggcgaagtgacaaaaaggcaaatgtgggcgaagtgacaaaaaggcaaatgtgggcgaagtgacaaaaaggcaaatgtgggcgaagtgacaaaaaggcaaatgtgggcgaagtgacaaaaaggcaaatgagggcgaagtgacaaaaaggcaaatgtgggcgaagtgacaaaaaggcaaatgtgggcgaagtgacaaaaaggcaaatgtgggcgaagtgacaaaaaggcaaatgtgggcgaagtgacaaaaaggcaaatgtgggcgaagtgacaaaaaggcaaatgtgggcgaacgccgtactagaacggaacggctcgcttcgccttttcatatgtgccgccagctcttaataagctatcaattcaaaaacaaatacctatgtcagtttttggcatttcagcaactcgggacctatttgttcacttatctcgccgagacaaaacgattgatacatccatttaacccttttctaagcggagcgttcacaatagtttttccaaaaaatatatagtttttaaaaattatgtataaattgtttttaatttagatggatttcgcaatatcttcgctatccatccaattttgctcgacgaggatttcttcagctttttttactttgagatttcagtcaaaaatatgcaacagtaaataaacagcatttcttatcctaaatagcaaatttattagattattaatacgataataataaaatatgtttatttattattctttttaaatttgttttagttaccctttcggtcgactcaccttcggattcactgccaaaaagtggacaaaattggaaggaacaattgttcctaactttggcacttatgcatactcaaactgtggctattttaccattgatggcaaaaagatagagccaaaagaagattctttcacacataatgatattgtcggatgtggcattaatccggccacccgacagattttcttcaccaaaaacggacggcgtcggggtttgtaaaaacaataataattataattttattacaaaaatactatatttatttatttatttttatttattcgtgaataaaaagtcatcagaagggcaaaaaaccacttactctgacgactgaaaaccatgttctgttcctgatgaattgttcccattcgtttctttgctgagatttggtgacaaaatcgaggcgaactttgggccatatttcacatttaatttggccactctttgaagagagcagaaacattggagcaaggcgataataatttcattaattaatttttttttttttttttttgttaatttcaattccaattttttcaattaactctaattactanttttattcgtgttaatttaacttaataaaaaatgtt

SEQ ID NO: 22783 - DNA, 2078 bp, Heterodera glycines
  unsure (1)..(2078): unsure at all n locations
tttgtggttttaaagcgggctttntcgtaaacaaacaaacatagttcgtttcattttcataggaaatcaaaaatttgcgaaccagaaaaatatattagattaatccgcgccttcttaacgctttacaattaatagagatccgatgattggaagcatttatgttcaaagtttgctcattcatttattgtaacaaatacctatttaatgacgacaaaaaaccaaaaaacaatacacaaaaaatctaatgaaagatctctttcttagtcaacaaaaaatgaattaaggcggcgcccaatgggcgaacagtgaccaagtgattaacgtacaggcgaggacagtgccaaccgaaaaacgcacttttcgcataacggacctcttcacagtgtgcattctgaaattacaataccattggcaccacaaaacaaaaactttatttttttgcaattttttgaaataggtatgataaaattttaaattaaaaagacgacaattaaagagatattttaaactaaaaaaacatacgacacatgtgccgggacttgttctaccgcttcgtaaactcccgtccagacaagcgccttacgctgcaacggcgtagggcaaaaaattttgggccgcttttcaattttttttcctgcaatttaatttttaggttaaatataagccatttatttcatcctacagttcaacattgaataccatttaaacatggacaaaatgtttttttggtacttttctagttttacaacaggcccaattttatacattttaaaatgccaaaaaaggtacttacatgaataaaaatatttcggatgtttcgggattattgattaaacatccatttcgaacctcgtataccgaattcgaaacgttaattcaaaccttcaaattttacattttttgagtccgactttttgttcgaattcagatccgggttcgaagtttgtcgaaatggatgtcataaaaacgattccactcccgagttagaattctgttgcgctttccaaaaaatgaaactgtttcttactccaatgtgtgttgtcgttgcgccaccgttcccacgttcgttcccactcgcccaaattgttgggtttcgttgtcagctgaaagccacgcgcccgcgccttcatttttccgtacaaaatcttaaaaataaaacactaaattttgtgacaaaataaataaacacctggtctggagtcggcggctcacacaacgcttcgaatttcgaggaggacaactcattcttctcactgtgaggctgaaaattgaaaaaacggattaaaatgcgttttggcggttttctaaaatttttaccaaacctcggcctttggaactttctccggaatatttgattcattggcgctgggctcagtcaatgctttttgaggttgggtcatttgtttttgtgggatgaatgttgaaggacaatggaaaatggaatagaataaagcactttatttggatgaaaaaaaattgattaaggattataaagatagtcgaaaaaagggattaaattacatcatattttacaatttgccagatactgaatgtgaacatatgctagtaattgtactacagaatggaagcgtaaagaccattacgctatcatggaaaattgatataaataatatgaccacatttattaaatttcataaaaattgaaaaacaaatcatttgtttttagaaggaaagtgatgctcatgagactaggccaagttgtgaaggcattttgatcagctttgaggccggcaatcggaattcaacttgccacgacgcggcactggaattgccctcctcgtcacagtccaaccccaagaacaacgactcgagatcgtacctgaaaagtgaacaaaacagaattgggaaagtcgttaaatatttttgaatgttcagtcggaatgaaaaatgtgacccggaaattgaggagcaaataatttccggatggcgcccatccaggggcgtatctagaaacatttttcggggggggggggggggaccgacctgaagacctttttttttttttggtatttaaccaatactttttttccactgctggggaacacctgccctttttc

SEQ ID NO: 22784 - DNA, 1614 bp, Heterodera glycines
  unsure (1)..(1614): unsure at all n locations
ggactnttttcttatcaaaaatgaaaaagagaagagagagcatcagactccgatcgacgacgacccgttgctgtgatttcctttcccatttattgagcagttcgggcaaaacggcggcgcctcgccccaacaaaacattttccgatgggtcatttaagaattaattaagcactgataacaaaaaggaaatgtgtgatatgtcagaagcgaaaagaagcccaagcaacaaaaaaaagtgagaattcatcctgattaaaatgagaagcgaaatccgacttgggatttggaaccttgttttggattttatgataactcgtacaaaatgcaattcgtacaattaattaggttaggcttaggcttagacctaagcttcaggctaggcctaggctcaggttttaacgagttttgtttgttttgaatgattggcatgcattttttaattaaagaatctgccatttgcaattttcgcttctttttttttttgctgtttgccacggcttcctcaaatttgatggcacatttccgctggtgctcccggcgggcacaggtcatatcgatttgattagttgggttgcttcccatcagagatttaagcgccgatttcgagttctgattcccgactttcttttgtgggctcggcacgcgccgaatccttgaatttcgaaagcattggcatttccattcccaaattcagaagacgtaaaaaaagtttggtgtgcctttttggcatataaattggttttcctctcatttgtttgtcctctctcattctgtttctccatcctttggcattccgtccaatcaatgcaaattcgtttcctccgctcccgcccgtttccccccccccccctttttgcataatctcaaaattccgcgccacggactttccccccaatggcactggttcttggcgccactgatgaggattttctttgcgttttgctggaaatttctaaattccgccccatcggattaaaaaatgccaccaatgaaaaataccattcattggcttactttgaattccaacaatttgccaatgccattattaacatgccatcatcattttcctcttgtcggcgaaggcgttttttaatgcctccgccggtgtcgtaaatctttgaaaattcgtccgatgaatgcagaagcaaaagcattcaaaaaacaaattcattcattctcccattccatctcaactgctgccaaatggtgaaaggaattggccatttttcgtgtgaaaaatgatattcaaaatttaaacagaaaaacaaaaagggggggggggaggaaatagaaaatggcactgtaaaagaccctttttggaatggcatcgctggcatttttacataataaataaaaggattggcccaatttacgtgacttccttttttaatgccaaattctttcatagaaattgggccagccgaatttcaatggcattttaatgccatttgttccttcaaaatgcattcactcatttttctttgcctgtgattattttacaagtgtttgtttgttggtttgtccccatgtttttcgttggtggttttttgtgattgacgtcttttggcggcaaactttcaaaaataacacccaaaaatttgttggctttttgcc

SEQ ID NO: 22785 - DNA, 1861 bp, Heterodera glycines
atgcttttataccaagtttttcaatgcaaaataatcgataaattaaccagaaagtacatagtttttcatgaaaggacctggttttttgtaaaaacctaggctcaggtttaaaatatataaaaaattcagtggccttcaagaacaacaattactacaaaatgttgacaaaactgaggaagttgtaccaaaagcagccgtggaaattgatcaaaattcgcagcaaaatgtggtaatattttatatgagaatttttatgaatttctctcgttacatgactggactgcaaatatttgaacacgatacaaatccttttttgggtggttttttggaataaatccatttctgtaaatttgaggttttagtctatatttggaatttttgcaaaattttataaaatagaaaaaagcgaaaagatttttagtgtaaaaaagattacaaatttatttaaaattatggtaataaaataaattttcattaaataaagccacaacggcccaactattcgcgtgatcaactgaagaaattggaatgtgtgtttgaagggaaaaattacatttcatcaaacgaaagtgaacaattggccaaggaaattggccttacgaaagagcaaatcgaagtaattgggggcaattaaatgtttataatatttaaaattttctattttattttaatataaatttaattatttagaaatggtttaaaaatcgtcgagcaaaacaaagagcacaaaaacgtgtggaagaagtaatatccgaaacaattaaatcttaaaatatttcctaaataattttgaatttcaaaaagtttgctgctgttgctggtgccaaagtttgtgctcaaattggccttacgcaaatacaagtcaaagtgagaatttgccaattaatatcgataatttcaagaggataaataataaagaatttaactaattagttaattaatcgattataaaaaattgtacaataaattaatagtttaactaaatttaaagcaaaaacaaaatgttgctgttgcgtctcagccgaatgcaaatgccattggcgttgcttctgtcggtagcacttcggtcagtgccgttcgtggccgtgccaagtgccgtcgtttgttttggcgtgccctcacttttccggtcagttatttttttgataaattatagattgttgccatcttgactattttgcctctaacaaaattattttcactagaatctaatcaattctttgaacatgtaaatatcctatgaagaactatttcactagatctgagccccaattcgtgatcggcgacctccagaatccctaacacttatattcattaatttttgatacatttatatgcattaaaaatgcatgtcaaaagtaccttactaactgtataagaacgaaaacggataactcatatttataaaatacgttattaaactatacaatttatgcccacccaatatgccattttattaatatatcagatattgatataaatacaatgacgatgaatatgaatgatatttcacaaatatttaaaaattgaatcacaatatattaatagaaatacaatatatacatattcaagccacatatagaattatcactgttcacaaagagaacatttaataagcataggaacatacaaaacacagcaatcttatggaaaggtaatgttcgaaagcaagagatcagagtagttggagtcacgagacatcctcatcgaacactgttatttgcacgcaacagggcctgactattcctctgcttggctcgactcggctgcactctaatctcccagcgcttcgttcactgtggatgaatgcagaggtgtccttcttcttgccctttcttgtccttcttcccgtgcttgtcct

SEQ ID NO: 22786 - DNA, 1261 bp, Heterodera glycines
aaaaaaaaatcatcttttattccatttttgttaaaggctttctgaattttaattgaaaaattcaaaaagtgccaaattatttacaaaaagtattgacaaaacccaaaaaattgaaataattatcttttccaaaaccccaaaaaatatttaattattttattttggttaaattagaggaacatattttctaatatattttaaaattaaaagctttttaaaaagccacattaatgaaaaaaacatccataacacactatatacagtatctaaaattgccaatctttcttcaaatcttcatatatattttttaaatttttgcgcaaaatcagcccacaattcattaccattatttctatatttgcactttccccctcctgcgtaggtcccccccccccccacactttccattgttgtatgcaaaattccagtttttaaaccaaatcgacccactcactcacaactgaactgactgactaagcgccgcttgtttctgcattcaaaaacgggtttgtttgtggcgttttgtcgttgtcgtctgtccccccccccctcacttttcttggtggttgtggtggtggtggccgctttttggtggcttataggaaacaaatgaaacaaaacgcccgacggggaagcgggggggggggggggggggaagaatcattgcgcacgccgatcggagatttgtctctctctccccttgacgccccgtcccaaggtcatccccccccctgacgcatgccgatttccattccataaatcagatggctttttttccccaatacttcgctttcatcgaaagaagaaacgattgatgtggggtgactacaaaaaaagtgaatggaggggggggggggggaagatctgatcagaaacttatctgctttgattaatttggcgatacatctccccctgccccccttcccaacaaaaaatggaattggggtggaatgaaaagagggtgaaagcaattaacagtaatgaataatgtgctgcacatgaatgacatacacataaaatcactttcactgttgtgatcagattttgacgctgctgcagcaactaaactgtttttttctctactattattggaattttggttcaaggattctttattttttgtgccgttactcaatgagtcgtgaatattaatgcggattttcgatttcatgctttaataggtggaaaacatggggggggggggatatcgctcccctatggggaggtgactcatgcgaaatgcgcaatggaatgcaatttt

SEQ ID NO: 22787 - DNA, 791 bp, Heterodera glycines
cagcagaaccaacaaaacatggcaacaccaacaccactcgctaatcaccaacaatcgtttatcgtttcgttaatcacccttccttctccttcttctcccctttcgttccttcttcattcttacggtggttgttggctgtgcaccgacggaggcggggcgggggaaaaggaggcgaaaaaacgggggacaatgggcgtgccttttgtctctctcacgggaagaaagcactttcttacccaccctcttttccttccttctcttttttactcctctttttcttcttccttctcttccgtttcttctttttccaatcattctgcctcatttccttttctctctctctgtctctcttttttcgtttctctctatcactctctcgcttctgcctccgctttctcgcctctctctgtccattccacgcattaactttttgctcttttcattctgtccaatcttttcttctctcctctcctctcctctccctctttctttcgctttatctctctttgatcatttcctcaccaccgctctaattttttctgattttcgttccgtttagatttgatagtgccgaatgattttatcgtgattttgttctacaaagaaatcttatcgaaatgggtaatcggaaacggaaaacacagcgatcgatggaaagagaaaaagaagggatttttttatttgaattgccaaaattgaaatcggaaatttaaatataccaccaatacaattagcatttaattaaattaattttacgggcgaagggcgcggggaaaggcgggggggggggg

SEQ ID NO: 22788 - DNA, 2171 bp, Heterodera glycines
ccttcaattcactcatattttgtcgtgatttgtgtgctatctgtattatatatatattatatatatataaataaatgcattataattaaacatttttcacctttcggtaaattttcgtttacaaattttttaagttccatttagaagaaacgactaaaagtgatagagtacttttgatcgcgtccagacatttgcggacaatttcgggaaaaataaaaaaaatttataaaaaaaattttttttaaatgcaatgcaaaatttggactcatcacagaacgtttcttctaattttagatataaaaaaatattttgaagatatgcttaatcatgagcaaaatttactttcactatttcaaattaacaattcgtaaattagtccgttcggtttggtgctgtaacatttcgacagtggctgatttcgacagagaataaaattattgtttttttattattaggcattcacacgaacaagccggaacccacagttttgccgaagcaaactgcctcagggtcaaactgacccgaaaagtcatttttatttaaaaaattcactatgtttaatgaaaattgatatatgtgtgtagtaaaaataaagcttttttttaacctttgttatctaatttgatgtcttcaaatgttccaaatggcaaagttaactaaaccagatacaataatattctaatgcccaattaaaattcaaatttaatttcattagtacagtaaacagtaatttttttaaaaataacatttcctttttatgcgaataataataataaaacaataattttattctctgtcgaaatcggtcactgtcgaaatcagccactgtcgaaaattcctggcacgttcggttttacacattttaaacttgaagtgccaattttgaccaattgtaacatgggggtcaaaaaatgagcttttccccactttggcacctatatttaacacaatgtctttgttaaaaaaagacaaatattttttctgaaacaaaatgcattcgatagaagaaagaaagggctaaaaattgatataaataaaatacccaataattgtcgtattttagagaaataatcccggagtactcatttttatcaatttggaggtccatattcaaaaatcaatagctgcacgaaatcccgatttccaacgtcagattcccgtaatttttgtgccatggaatttcggttttcctttccaaaaatttttggggtctcgaaatgctatccaattgaacacgagagcaagagttatatatggttcttcccctactatctgggaaaaaagtcggggaactggtatcaaattccccgaggattatctataaggctaaaaaaaaattttaaatgttgggggggtcaaaaacttggtcgtcaaatagaaaaaaatatttttctaaaaataaaaaaagcactctcacccgacagagtgaaacagacgacgttcgaattccccgaacagtgttggggatcaactcttctttaatcacttaaggaacagcatctcactttgccagtgaaattaattctttgaagtgtaaaaataaaatatgatacctttaaaagccaaaaataaatttttatttagttttgcagtctccattccatgttttgagatttttttttaattttttaagaatattttttatttttttcccgaaattgtccgcaaatgtctggtagccatcaaattgtgtattgctgagttgcctttgtacaagtgtttgtaccagggatgtgcctaggtttcgcttttcgcatttgcctttcgcattattcgcattttttggcgtttcgcatttcgctttttggcgcgaaaagcgacttttacacccttaagaattggattaaattcccataaaatttttcaaaattttacctataaattggctaattttcagtgaaaaactgtttataaatgatcaaaatttccaatttttttccccggcggcgcctatcggcaccgccgcgcccccaaaactgctattttttcttagaaaatggcccaaaatcgcaaaatttggtaatttgatgaaaaactgttctcagcggcgcgccaaaactcttatttctcattagaaaaatgatacaaaaatcacaaaatttgatgattttttggtgaaatctgtcaacaaattttaatcaaattctcaaaaattttcccggcggcgcctg

SEQ ID NO: 22789 - DNA, 1472 bp, Heterodera glycines
cgcgcatgcactagcaacgaagtcctttgcgcgaagcgctcatgtcagcgcccgcccatatataccaaaagtatactgtctacaccgagcaattactgtgcaaagccaactgcctacaccgagcaattgctgcgccacacgctagtttatattaccatagagaaaagtcgggtttcgtcttaaaaactaatttgagtcgaacggctgtcgggaggggtctgaaagtggtggaagggtcttacaactttttgaggcgcattcaggaaaactataggttttccgctccggtggccagttgagcgccggcggcgctgaaacggcgtgaaattttttttgtccgtctttggtggcctgtaactttgcgggaagaagcgggagcggaaaatgcttgctggtaggattttaagttggaatgtttgggaaaacttggcgcttatttggcggggctatctgtaaatgccaatgctgcagaaaatggcaaaatttggcacccaatttcggcattttccgtttttcgggaataactcgctgggggttaagcggagcgggttggcgccgcttgagcatttgtgcagtttttaaagctgcatccgatggcgttttcagattttgaaaattttcaaaatttttcgagctaggccccctcgaaaatttttcgtttttgaattttattattttttgccgatttttcccaggaaaacggagaccactttcaagcaaccgtttttcgagctctatcgattggtggcatttttgaaaaaatttcaaaattttccggaaatagaaaaattttttggcctgaccgggacatttcagtcccgggctcataactcgtcaggggttgattttaacgaaaaatcgtccaagagcttttttgtagagaatttcgagctctatttaatgtgctttatccggtatttttatctttaatataaaaaaagatataaaataaaaataaattttgaaacgcaaaaccaaaggggggaccccatggttttgcattttatgaaaaataattttgcttctaaaattgccaaaaaatacttttctggggtagtttgaggtgctgaacacgaatatgcactttatattgcgttttggattttttggagggaggtaaaaaaattttgaaaaatcgtcaattttttggatttgggaagttaagtgattctttgaaaaatcataactcgcctcaaaatggtccaattcagctcatttaaagcataaaaaatagcaaaaattcgggagaattttattagatttatttgaaatttataccacaaaaaataaaaaagttattccagaatttctggaaattttcgatttttcagaaaaaaatttatatctcggttctgaaaagtcattagagaagagtaaaatactacaaaaatcagcaatttttttctatataatataaattttattttacattaagatcacattttaaaaaaaagatacaaaaataaaagtga

SEQ ID NO: 22790 - DNA, 1399 bp, Heterodera glycines
  unsure (1)..(1399): unsure at all n locations
tcccttcccttgtccatttcggcatttcccttgtccccttctaagtttcccttgtccatttcggnatttcccttgtccctttcggcattttgctgctgtttctaattatcctttttgcttttcctttcccctccgttttttcactttttgctgttccgtaaatgccaatttgagcatcgaatcggccgcgtccattgcgtccggtgacatcgtccgcttcttcgcccctccccccgcgtttctcttcgtctttggcttttccctccgttccgtctcttccacttcgattcgtccgtctttcattatcgtcacaattggctccgcctcattgtctgaatttgtttttgccatttcaatttcactttttggcttttccatttgaccttcgctttccccgtgcctattctccccataattggcaaattctttggccatttcttttgcgtctaaaagcgattgaattagcgccggcgacggtttcggcacgcgcgcggagcgactgaaaacaaaaggcgaaaattaaatggaaagagaataaaatgcaaaaattaccgaagcgttttggtgctttcatcggtcgaacggtcgtcgtcttttttgttcgagggcgaaaaagcgaagggaacggtcgaacgacagcgacgaatttttggggtcgaacgacggggcgaagaggggaaaagggaggaggaacagaggggggcattttgggggggagggggctaaaaagggggaaaattagggaaaatgggggaaataattggacaatatgaaaaatgggaaaataattggaaaatggagtaaaatgggggaatacttgaaaaaaaacggaattcggaagggattcgaacttgcgagctgtggccgtcagtctcacaaaggcgccacttggacaaaaaaaagcggcccaattattccctttttgcggttaaattaaccgcagtttattttaaataaaattgtattttcgttttaattgtggttaaataaaccacaattttgttaaatattatatctttttttaaaatattatgagttttttaggtaggaaaaaccgaaagaaatatgtatcatattgaattatgagtaagaaattgcaaaaagtatgaaaaggtataaaacccccataaaaatgggttaaaaaaatattttttctttttttttgtttcaataaacgatttgatttgactacaaaaaaaaattctctaaaaatttaaaaacaaaaacaagtattgttcaagaaagactaaaataaatattagtgggcaaatttttgaaaaattttcaaattaggaaggggtgtttttttgagttttccattttatgggtgtatttttttgaaagttttccattttatgggtggatttttttgaagtttttaagtcgattgtgtgtaaat

SEQ ID NO: 22791 - DNA, 1579 bp, Heterodera glycines
gcaaatcctaaaaaggcaaaagtcagcgaatgcctttgattttcattttaaaggttttaatgtttttctaatttattttctttacctccaacaattcgtagtccaattcgcctccaaaacattcgtcgcaactgaaaaagaaaaatggcaaaatgttttttttttttttgtttttttcgacaaattcaccggtaaatgattttcttctcgcgtttcggcccaaatgactccaaaagttcgtaaagcgccttcgaatcgcccacaaaaatgttgtgaatctgagcaaaagaaaaggatcccaaatccgttttcccaaatgctttatcccccttaaattaaatttcggattttctttttttccatttttttcccttttcctcgccacctttagcatatgcaattcgtagtaatgtctgctgctcaattccctgttgcatggtacgcaatatttgtcacaatcttttttgtacggttttgcccctttttcgcctccgtcgtccgccgccctttctttttccttttcgttttcctccaaattttggtcgttcgcctcgcgctccccccaaaataaaaattattaaatcatttaaaatcgaattgtgaaaacaaaaaaagaatcaaaaaatatttaactgataatatttttaaaaaaagaagcaaagaatgattcggtgaatgcttaacatttgccaattcccttctctctttttccattttaccaaatgttaagcatttctctttttctttttaaatcaaaaatcgtaattttattttttgttttttaccattcctccgcggtgttcccttcgccatttgtaaatctaaaattattaatcaaataaataagaaatataaaaatatatatttccattttcattgttttaaccgtgcaaagagtcggagaattttcggtgccaaattttccctggaaaatggcatttgtttccacggcactgacgccttttgagaggaaattgcgcgtcatttctcgcaattggtcataagcaatgggagaagtcattttgagcaatgaaaaagagaaaggggaggtgaaaagaagcttaaagaaattaatggaataattttaatatttattaaaataaatatttttaattttaaaagttaaaatgataattaatgggaaatattcgacaaaatcacaaaatgccgaaagaatgttcaattctaaaaatgttttcgttgattctttgaatgaataaatatggaaatgtattaaccaaaaaccatcatcatcaaattattattaataaaatataattgtaactgatcaaactcagaaaatatttctgaattaaagcttaacagaaatttataattcgaaagaaaaacatttaaatgtcatctgaaaatttgtataaaattgacaacaaacaaaaaatggaattctaccgctataaaactttgttttaatgaaaaaattaatatttataatgaaaatagttttgaacataactcaaaaaagaaatcaaaactcaaggcaaaagccaatagacaaattccattaaaatttcatttttagtgatatttttgattttaataaattgcaaaatttacatta

SEQ ID NO: 22792 - DNA, 1691 bp, Heterodera glycines
attatagcgggggggggggggacgtcgcctcccgaaatgtcgtcgggatttaatatcgccgcaaaaaaaaaacttgaaaattcgtgaaaaaatcaaaaaaaaatttttttttgaaaattcattgaaaaattgctatttttttgtctctgtaaatctaacaatttttttcagtatcaccgagtgagggggacgaattcatattgacaaactcaattttttcaaaaaatttcaattcgcaggtactgttgacccatctgacgccggtgctgtgcatgtgccagcagttgccgatccgtcagtgcagcttggtcccgatggtggatttgtcccgcctgttgcagtcgttccgggtaagtttttcaaactcatccttttgaattatgattgctgcactactttcccactgtaccatcccgccgcattccctctactcaatcgtttatccattatttttctctttggaataatttttataaacaaaatttttttctaatttatttggttggtgcctcacccccatttttgtataaaaaatgctaaaaacgtaatgcattcgcattcctgaccctaatttgaaagaaaatccattatattgagatttatccgaatgggctggacattttattctaaaaaattaattttcccaccctctggttacgatttgagtcatcatatttcaacattctcccctcctttcagaagccgaacaggagcagatgacgaatcagggtaaatctgaatgtttttttaaagaaaatctcaatttcttaattacgataatttacgaattttcctaaagtgtaaggccaaatccaattgttgattttgagtttatttacccttttcgtccttaataaaggaaaaacactgatacaaggctaaattcgggggctgcgggagcttgttcccctctttctgtgataataataataatgatctcaaacaaaaatctactattcttaatttaattaattgttcttttacccagaaattttggccattctccaacgtattgaggctgaaattgtgctcgttcgttcgggaatttctgctagaacggggaatcgtaagttgtttgacaataaatgaaatgtttttattttaatttgcatagctcctaactgaaaaaaattgctgaggcttttgcatccgacaaatttttgtttccattttagttctttcaaaattagacactaaaatttttgtcttataattttttaccttttttcaaagtcacacttttggccgccctcgacgagtgtatttctttcctcacaacgttggaggaaagcggagcccagctgctcctcaacggcatggaggccgcgagactgttgccccgcgccgaagtggcccgtcttcttccattggtcaccggtgttttggcaacaccaatttcggttcttcgtggaattaaaatttttgtccaagtcctccgtattttgattttgttgacgctgtcacctggggcatttttttttctggctccttccgttatttatgtttcttttgctattctcggcttccaccacttcaccatttatttgatcgtcatgtcttttttcttcgctatttaccatatttacaatttcttccactgaataaatggtctcgttttatttgttatttaaactgttatcgaatttggtttgaaaaaaaataaaatccaagagaaaaagtttaattttcac

SEQ ID NO: 22793 - DNA, 1109 bp, Heterodera glycines
  unsure (1)..(1109): unsure at all n locations
cattttgagcacctccaaagcatttcgtggtagctgatgcgggtggtgacagtgaccacatttgtccgattccgcacatccgctgactgattccatttcatcatcatcatcatcatcgtcattgtcatcatcatcgtcgtcgtcttcgtagtcaaatgatgagtccatgccttgccttcgatgcgttgttgaaatgtcctcatcttcctcactctcctcctcctcattctcctgttcatcaatgaacaaaaggggcccttttgcacaatttgaatgatgtgcatccatgccgttcctgtccgcctcctgtttgacctgttgtccagcctcatcatcatcatcatcatcaccattgtcctcgacggacagctccactttcggtgcgatgatttccgctgtacgcccctgaatcttcttgataaaaaattaaataaccgacaccaatttagagcaaacctgttgttttttctgctgctgctgctgctgcgtcggttcaatctcactaaatagaggcggcggcgctgccgccactgtttgttcatcagtcataaaatcaattttcgtgtcagtgatggcgggagtgtcatttggcgctgccgacatcttttggtcaacagcactcgctgcctcggcagcagcctcagctgctgctgacacatgagcttgctcttcaaccaacaacgacaacggcattgtgcgaggagacgcaacctcgcgctgttggcgttgttgacattgatcgtgtgcagcagagtcggcggcggcgtcgtcggtgtctttgacagcgttatgaacgttgaaccggaacatgtccattgaatgattattcaaaaattcggaagctaaaaactttatatatgtcaatatgcgaaatgtgcgggaggggggagggggaaggataagttgctttttaatatatatatatatatatatatatataatgagtacaaatgtctttttagtttatattttgggacaagagctaaacggcataatgaagcagcagcagcagcagacaaaagagcaaccaagccgccatcaacaagcgccccctgtttcaagcatccagagacaatgtgtgtgtccgggtgntacgggcagtggcaaaa

SEQ ID NO: 22794 - DNA, 2079 bp, Heterodera glycines
ttaaaaatttattgtatttaatagatttttgcacaacccttgaaggaatatagattgaactttcgaaaaaatcgtaatcctttttatttttgttaatataaaaattcggctattttttaaaatatattttaggaaaattgatttcattgattcttcatctttattcgattagcattataaaattacatttgcgaaaaggctttcattttacaatagatttaatttttaatatttcctactcattcaattgtaaaattatatattttttcatttgatcatttatagaaattgaaatagatataaaattttaattcgtaatttatataaatcataaattggaaaattattatttgctatctattgaagccatcggaaatgtcttattttaatacttctaaattagaagcatgaaatatttttaaaaaaattatatataattttttaagaactatgtaggcttcagggattgaaaaacttaagttagaacccgattttcgacataggctcaaatgtaagggaaaccatctattcataaattataagaactgtcctacaaaaaggttccctttcaaagaaaagatgcttaaattatcctttccatttttgcctataattatgatggattttgcgatcggacgcatagcattaaacgacaagtgccaaaaaggtgtggacacatttttaaaaattttcatcatctatcaaaaggtttttaagacttttttgcaacggctgatcaattgcaagaaatggcatcggaaatttttgcagcggcggacaaacaaacggaaaatggaaaattttttgaaaagggatttgacattttctgttgtattgcatttgaaattgaaaaagatgctttaaacaaagatgagttggcaatgattgaagattttgaagcaaagcaacgcaatttttgccaccaaatgaaaaagggccaaaatatttgggaagcgatggaaagtccggcagggaatgccattgtaacagcggcgaagaatttgaaagtgaaccctcaaacatacgaagaaggactccgtaaattgaagaaaatgcaaatttgagccctgaaaatcaaaaagaaattgaaacatttgccaaacattgctttgccgcgttgaaattgtttcaacaattcatcaccggtatttgtttatataaaataattaaatttcagttaggagcaaaatattcatcaaaattgcaaaaaacgcttattctgggctctattgcactttatgaatataaagttacaaaagaaattactcaacaattacttaattaatctaatcttttttggcaattgcctaacgctgatattttatatatttttgcttcttaagacttttactttcgaatgatactaaaaagataggggtttgttcgaataggacattacggtggataatcgatcatatgatgttagaccgcggcaaaagtatgcattcaaaactgctaaaaagtagaatcagaatcccgcggcgttaaaaccgttttcccaaaacctagggattgaccgggatcggtaatccggttgagattgagtgttttatacaacaacaaattaagatgagcgattggctcagactttgctcgctggtggaggacagactgtgtctgatcaaagttcagccttatcagctcaaccggcgcccactcgatctgatcagctgccgaaggggaaatctcacggcgaaggaaaaggtcgagtaaatggccaaaatgccttggtgcttttgcattggccggcttttccggctatgtgtgcagtatatttgtgaggctcttgaaaatgaatcatgttccgatattgacttactttactgctgactattcttctactcttcctttactcattcgtcgtttgcaacggagctgatagttgtgttgtacattttctttgctgtttctttgggcagcatatttttgggcatttatcattgctttgtcaagcgttcttattaatggaaggatttgctttatcggacaattagccggggccataaaattggacaagttcatattttacatgactttatttttattccataaatgaagagagtcatttttgacactttt

SEQ ID NO: 22795 - DNA, 1503 bp, Heterodera glycines
  unsure (1)..(1503): unsure at all n locations
gtaattaccagggctgtcaaaaaaaatgcacgaaaaatggccaaaatatgcgcataaatatgcaaataaagtcgtgaaatatgcaccaaatatgcataaaaatcgcaaaatatgcacaaaaaaccttgaaaataaggggtgtaaattaattaaaaaaattttattcctcataaattttatcggttgtttttgcaattgaaacccaaaaatttctcaaggttttcggcagtgaagctcattgttgacccactcgcgcatccttcagatttggattaggtaattttggcataatcaacttttttttccaagggatattcaaatcggaaaatattgaacgaagaatggtaaaatatgcaaaaaaaacctgaaaatatgtacaaaaaatggcaaaatatgcatgaaatatgcagaaaaaccctaaaatatgcaaataaaagtcccgacacttttatatgtaaataccaaaaagaagatgtttttcgtactaattagactacgtagaacccaggaaaacccaaaaaatgcatttgcacatttttgacagccctggtaattactgtttcttcggcatgtggtccaaacagtatattgcaatcccaattcccactgttaccgtacctttctgtacagacggtcccagtcaattggccggaagaattcggtggcttgaatctcgcgatagtcgtccggaccgccgcccagccgcttgtttggatccttgacaaggaggccggacaagagaatcttcgcctcgggcgacagtcgtgagggaaaacggagcgcacattggaggatcagctcgaacagcttctcgtgctctctgaacaaatgggcacacaaattaaattttaaaaagtataaatttcgaaatttcggcgccgttaaaggggaaatgaaatgcaccgtttcaccgaatctcgaagttccctcggaaaatccgtgaaaacttcaactccatggggaaaagggtggatttgaataacattcattaatctgattgcgatctttgatggtatcccattacatgacttggccagaatagtgtattttttaaatttaatcagttttttttctcgaaaatttggttagaaaattgagcgggcaaatatcggccacttttaagcaaaaaaataaaaacaaaaaataaaagtcgtcgccagggggcggcacggcacgcctttccatggccaaacattgggaccgaataggaatagctcgtcaatgcttttgctatcaaatttatttttcatatgtagtagcattaattgcccatttaatcactttgaatagaagggcagccgaccgcacatcatctcgtacatcacaacaccaacgccccaccaatcaacggaacggccataatctgacaatgagcagaaattttgtattaaatgggtggacatgaaagtgtcaaattgggtggtacgccgagatttcttgaaaccaagactctcgagcttcggtgtngaaatttagaaaacaatagcaaaactaatacatata

SEQ ID NO: 22796 - DNA, 1800 bp, Heterodera glycines
acattttgtggcacaataattaattattttatcactttccccctcctttttgctggtaatcatatccccccgcttccgatcaaaccgcagcctctgattcatgatttaagaccgctttggcctttaagctgaatcacttttcaaaacatttcagcaacttaatcttatggcattagtccttggattttactgatcacattcctatatcaattcatggcttagctctctaatccatgctttatccaacattctattgaaatcacccgcttacgccttttgccgctgctctataattggcttcatttttcgtgtttcagttgttatattgttgctgtgtgttgttttcgtcgcgtgttgtctcctcccccttgacaaccccaccaccaaatccacttgatcagaagagagtgaaagtggaaataaaaaaattgtttagcttctgatcagtcgctacataaatcaacaaacgacaacataaaacagtcgactccaattccgctgatccattcaaaatcttttgctgaacaccaaaagcacaccacttggccacacttctgcgccacttcaattctttggccatttgttaaggccgagcacaatacggtgggtgggtgggtgtacatgttggacatgcttttgtagcgcaaattgttggctttttataatagtacagacatatgaattttttatattttagtcaatgctgatcaaaaaaatacacatgaaattttaattgctttttgacactgatcactttggtcaaaagtcaagcttcgataaaacagatttgatttaatcaaagtgttatttcgaattcactgttttttttgtttcggacacttctaataacttagtcatttcgatcagatttggctatcctaattctaccccctgaccagttcatttgattatttatatagactttccgatcagttgtccgggttccaatcacttattcaattctatcagaccattaaggggttttgctcgcttttacccatgattacatgtgctggcctagtcagtctaattaggccagttaggcactttgatctgatcatttttttacccaattatccctaagcctattaagcctttgttaatttttagcaatcctgacacgatgaagcaccaatatcagaatgagctgaatacacagtccagcagagctgtgacatcaccactcgcagatgatgacgaaacgctggacgagtcgcgcgagcgtgcctacaaattggtggcgtacacggcggtcggcttctcgctggtcgccatcctggcggtggccatctgcttgccggtggtgttcaactttgtggaccacatccaacgccagaccaaacgggagctcgacttttgcaaggtgggataacaacggtgatcggacaatgacaaatcagttcaaaggcagctaaggattaattaaaaaataattataataattagagaatcccgctgtgaggtcagggaaaatggctttgagaatcctgaaagcgatgcatttgctctaggattcctgatcaaacattacaaatcagtatataagtgatgaaaaatgacaattctaaaaaatagagaatcccactttgggtcaggaaaatggcaagtgatttgagaatcaagaaatcggtgcatttatcctaggaatcctgatcaaaattcggtggcaaatttcggccgtttggctctgctctctttagcacttggattttaactgatcagaaactaataaataaggataatctggaatgaaaattcgataatatcaaggtgtataaatttaatgaggatttatgttaa

SEQ ID NO: 22797 - DNA, 1404 bp, Heterodera glycines
accccttttaagagagtctggggagggggtgtaaagaatttgaattggatttgcttatcttccgtttttttaaatattattttattttagcaaataaaaaaatagctgagaaaaatgtgcaagtgacagaattatccgtgtagcctttttgccaagtttgaaccgttaattttcttcaaagttttggcttagcatttttgttcaaataaaaattgtggataaagataatccaccaattcaattgaaatttaatcctttggcccattattttgccgttttgtttttttatccccccccccccaccaacgtaaaaataaatcttcaccaataatggaatgttcattttttatatcttgattctccaattttctattaaatcattttttggttagcattaaaaaaatgttgtgttgtgacggccgggcttgagtaaatgagccagggataaatttattgaatctcaaataaaataagccatcaaaatgtgagaacatttactctaatgactttcggaattaaaatatgtcgtcaagtaaatttcaaaccgaaacatttactttacaaaattatgttggtatttatgctctttttttgcttctttcactgtcacatcgatggccaatgtcactttgtcctcgcttttgtcgtaaaagcctttgctcgggtccacagttccttaattagccataattgggtcaattaagggaaattttaattgtgactcactggaaatgaaatgaaataagaacccaagattttctttttgttgtcaaaaaagtagtcattaaattcattcttcaaacgcgacccatcgttcttttgagagacaattcgaaaagttgcaggacatttgcaactccaattttcgtctaaatggaaattaatcatcgttgtaattagcattaattaacagttaattcgcaccttcttttggagcatcgaaaaaggttaaagcccaaacaattctgatcagtgcttccccatttccttttaatttgtgccaatattctccatggataaaaaatggaataaaattttaaaaaaattatattttataagaaaaagcatattaaatttttattttatttatttaaattaattattttaaaaagttgacactcgttgttgaatgagtttaaacttggttttaatctctttttttatcaatatccttcgcaaattccacgtttgacaaaagcggaaaacgtatgttgaaaagtgccggaccaagcatagaacgacaattctctgccgtgcattcaatgccattttcacggcacttcgaatcggcccaaccgagtgccgaaaaacaattaaaatttaatggcgactaattaaatgaattaatttcttactttggttctactagactaatccagcagcaggttaatcatcatacatatc

SEQ ID NO: 22798 - DNA, 1761 bp, Heterodera glycines
gaataattgctcaaaatttcttcaaattcacttttttgacatattttttgcataaattttcaattttatataaccagtgccctacgggcattgattgattggcttgttttaaatgaaaactctcaacccggcaataaattaacagaagaagtgtttttcagttattttcttgaaaattttatattgcttctttgggcattttcagcctgaattaaaaaataactttatttattttaattcagcaatttataaaacgatttgtggcccaggtaattatggaatttatatcacgattaaaatggcattttcaaaagtagaggattgaaccacacaaatttcaaatttaatgaattccaccacaaccttcttaagtttctcgtttttgcataacatatatcctaataatattataattacgataatttatgcagaacgttgaaaagaaaacaatattttaaagacataaaaattaatttgtgttttttaatttattttccattgagcaaaatatcgcaccataaattaaatataattaatttaatgaattccaaatttcttcaaacgcggaaacctctgagcacttcgtaaaatatcctattaacaaaataattactggtcaaaatatttatacattaatccaatattattacgattttaattagccgatgcggcagtcgtccccaacgttttggcgcccatggcattcgttttgccgttgatttttgctggtaattcgttacatttcctatggtttcttttaattttgaatctttagcctatttttgtgttctgccgattttctaggcaatttccatggcatcgtttggccaaaatttgaaagtaaaagaaagaagcccaggacaaactaaattgataatttttgtaattttctatgcctttttaataatttgaatttaatgcattaaaaaaccataaagatttatttattatttgttttttgtagaatattatgtcaaaagcctaaattcaaatttacatcaatccatgaaaatgataacctaatccgccggaaaaatatttaaattttgctgaaatttgcagtgaaaaatggatttgaatttaagaaatttattgtatataattcagaatatttaaaaatggtaatagtgagaatcacaaaaaattcctaatcaccacaaaaatgagcttattaagtcgcacagtttagccttggctggttatgccattcgataaatggagaatttcacgagaccctgacattatcccgagtcttatctcgttgagactctcgacagcagcactaacgtccgctaatataatcccacaaaggattattatgtcaacatctttcggttgagctaaaaagcgaaaaaaaagtacacccctaaagattgggtttttaaaataaaacaatggcattttcgtgtgagaaaaaagcaaaaaatttacacaaaattttgaattttttaaccattttaccaaattttattaaataaagtataatttagtctgctgtttattgatgtgtagtgtggtgtagagttagtgcatcaacccacacttactttctgtcattgtcatgagttctctgccggttgacggcttcatttttaatttatttatttaattgttttaaaaaacaaaaaagtaataagaaattttttgatcatttttttaataaaaaccactatttctatttaatataatctattttttgaattgtaatttctcgaaattgcctttttttgtcgcaaaatattttattataataatttttta

SEQ ID NO: 22799 - DNA, 2090 bp, Heterodera glycines
ttaaatgtcatccaattgcttcaaaaattgtcaaaatataaagattttcgtggagaaaagcaggttactttgatcacgactagcaatctgagttttgtcatctggtcaaattttgtttgaagtgccaaaagataaagatactttccaaaaaataaattgtgaaactgttttactcattgcggttattgtgagattttcgtatgttttgctcattttttcacgattaccacatgtgtgaaaatgcataaattttaattttaatattctgtaataaaaaaaatgaaataattgcatttcaaaaagggtattcaatggcaaaattaaaaaaaaataaatttacgtaagagggattcgaacttgtgggggcaaaaaggaaaagcgagcgcacaacctttgcgccaccgaacagcacaaagtggtgcaattgattattcaatttattgggataaaaaaagtttggcacgtcataactcggcacccgtacttatttggcagaaattgaaaccatctttcttaagaacccataggtgctctattcacccacaaagtttcattcggaaatcccacggacacctggggaccttcctttgtcaggaaaaaaataggccaaaacaaaaaaaattgtagccctatttatcatcatcattttgaagatttcaccgagtcaatgatggttttttttgaaatgatgattttcaaagcgcaaatatgacctaaaaatggctaattttcagtgaaaatcggttaacaaagtgcattcaaattttcaaaaaataggcaccgccggccaactattccttaagtttttctgaaaaaatcgcgccgcaaaaaaaaattttattgatttttttcattttgaattaatattttccaatggggtcttctgaatcggctctactgcagttcacaggaccataaaatattatggcaagtttaatgcaccataactttttcaaaaagcatccaaattaaatcttcttggtacctttctatagctctaagagagtactctattaatctacaaaatttcaaaaaatttcattgtgtttcaaaacagttattgtcaaaaatatttagaaaatcagttttttgaaagaataccaagaatgtttaatttggatgcttttagaaaacgttatggtgcatttaacttgtaaagtaaaaagtgaaaaaccaaagttcgacctccctgactccaatcctgaaaccgtaactcacccagtgaaaactaacctattttgtgcgctgcctttagatgttccttcctattttaagattcttcaaaaaacatttttatttaaattcgaggataataaaaataattaaaaattgtttgcgcgaatttccggctaaacaattagaggagatcatagaaaatgtcttccaagttcatgttgttgatgtcggcagggaattcgaggattccgccgcgtccacgcccacgaccacggccaaagcccggcgccacaccgccccggtgaccagcaccacggccgccagcgccacgaccacgcgtgccacgacctccgctggtggcagcagcagcagcacttgtgcccttgtaggggagaggggcatttttaaacccattttatatgcaataaaccgtagaaactaaaaaaattacagatacaaaccaaattttatagaaaagttaccgacggtaattgtaccgctccttttttaagaaacactaggattatagacgcaaggaaaaaagtttgtttagtcgataaattggaaattttaagttttttttaaaaaaggcaaatttttgcgttcgaccattttttttttgcaaagtcgaacgcagaaaaattggaaaattttagcgaaatttcttaaggaaatttgtcaattttcaagtcccactttttttgcgttcgaaacgcaaatgcgagaccttttctttgatcttgccgctcccttttctcatttttctccttttctttgcctcgtcttcctttttctcgaccccctcccctcttgcacagctaatatattttaaaaggcccaaatttatttaaataattggagcaaaaaattattaatgaaaaatcattttcttcttctactatacatattaaacg

SEQ ID NO: 22800 - DNA, 1366 bp, Heterodera glycines
tttttttgcattttgtcaggacacagactttggcttcaccaccttcgttggtgggcatgacattttgggagggggcgactgcgaagtgaacaacggggacatgaagtacatgttcaagttggctgatggtgtgacgattaaaaatgccattcttaacacgccgggcatgggcattttctgcagaggcacttgcacgctggagaacatttagtattaatttttttgaaaattctttgttttctatcactggttaaggacgttgccatgcaacttgtaaacaatttgaaaaagcctattttgacctattttggcggttttcacctccctagatttgaggctttttaatgcttattttccatatttagtgcctatttttggcggtttttagaacttaaaaatcgtatccccttaatcatcagtgtcgaaaaactggcatattttttttgccttttctcatatgaaaatgccattcttaaggttatatagttttaacgatgagaaacccgaaaaaatagaaaaaaatttcgaggtcggagttcccacccctatccaaaccaatggttccacgaaagtgccatgattatttaattaaattttaattcatttgaaattaaaaaaatattttaatttttatattcattaaatgaagtagtgaggaattagaatattagaaattttggaccttgtcctaattgaacgaacttgttgccaacactcgatagccataaatgtctctattagcagcctggaatatttcaaataatttaactctcaaaaaagttacggccaaaaataaggaatcttttggccacaattttttgaaattaatgaaacttcaaaatgcaggctaacagagagcacttaggacgaccaaatgacaccaaattagtctaattaggccatcattttgggcaatatttccctggttggcacacacttttacaaaacgatgtttcagttacaaaaggttatgctaccatgctgccgggtttggttatgaggacatcaatcaagtgaacacttacaaagtgattggcggcggtggcatgggctcaccggacaaagtgataattgataattaatgaatgatatatgtttctatgggcaaaaatagttaaaaacgggttttcccgcatctacagtacttcactcagtcgggccaaggggaaacgcaaatcagcggcttttgtggagacggtcggtttagggtttattagcattatgataaaatttatcatacagacaagaaaattgaaaatacatcccctaaaatcaagtttctggtcgtttcttaaaaattttggaaatttctttatttattttaaatgctgaaagtaaccaaattgaattcttaattaattcgtca

SEQ ID NO: 22801 - DNA, 1330 bp, Heterodera glycines
  unsure (1)..(1330): unsure at all n locations
aatgtaggcgcgttcgggaagctgtactgctcatgtggcgactgtcatgaacaggtgacacgccatgtcacagtttccaacgtcaaaatgcgggggcccggactgacgattgtctgtaggtttgncagggaaagaaacctacagtatgcatttggaaatttacatttccactgatgcattttccgatagagcacgcccggcctaatgatgtggaattccgaattcagattttgtgtgtcgtttttaagattcgggcgagagaaagagaatgagagagggaaagagagagagagaaagagagagagagagagagagagggagagaaaaagagagatatagtgagagtgagagagaaaaagagagagagagttagagagagagagagagagcgtgagagatagagatagaaagagagagatagtgagagtgagagagaaacatacagttagaggacaaaatctcaattgatatttgtttagctgtcaacaaaaaatacggtgatacagcatcattgagtggcattcagttgtatcaagattcacagggcacaatggtcgattacatttgccaggtttgggcgccgccgggattatcattgtccccccgcctccggcccagatatacagcggcaagtccgacagacatccgcaagaagaatacatgccgaaccaggacgggcagggccagtgcagctacagcaccacccaagtgacactggagacggcggatggtcgaccgtaccaaaacactgtcggcggccaacccgtcaaccaataccgcccaagaacgcctttcaccgacatattcggcatcggcgccaccaacagactgccaagaccgctgttttcctcctcattgtgggattcaagcacgtaagtaaggctggtggcagtgcagaaaacccatacactgatctgtgtcatgacaactcgtacaattgcttaggttaggcctcgctctttaggcttagtcttatgcctaagctttaggctaggcctagacttgagtgaagttcaccagggctggacaaaattttttagattcaaaaatttcggattttgctttttgaggagtttcaaaattatttttcatgttttggggttgttccgtttttcggcttttgtacacaattttgactggcatttatttccatttttaatttgcctacctcaatcgtcattcacagtttctacgtttgtttgctgatcagtttgtttgtgccacaaatcccgaacactctgatgctccgaaggtcatccgaatcatttattttatataaaaaaattcctaagggaaaattgaatttatccacgctaaattcagatcacaa

SEQ ID NO: 22802 - DNA, 1189 bp, Heterodera glycines
tgctgttcggatgaaccaagggatcggaatgacagaagccgaagtagttggatggacaaaaacggcggcgacaacgccaggcaaacagtggcgaagaaagaatgcgaaacatatggcacagagtgccttccgccacagcttctgctcggggagagaccaccttcttcgcccgttcggctcagtcactcactgaactcctcgccgagtccgtgccgtgccgtgccccgtccgtcacccctcgcgctgtcccctcttctgtctacccatcccattcattgttcctcttcccaactgtccgcttcgtcctccgtttcccctttgtcccccgtgccaatgccttcccccgccactctttcggccattgtccgtgttttcgcttcttatgagtgagtgttccttttgtcctccgatggcactttctttccatttttctctcacagaacgggtcttccccagcggaatatttctgttcggctgcgcatcagtggagaaacgagtgcggccgaggtggttcagttggtcgtccgtcagttggccagggttcgtcccatccccccccccgcccaattcagtccctctttagctaagttcctccggtcatcaaaaagtctctcctcccgccccctctgcgcccaatccatgccaattttgcctcgtttccgttgttggtgcccgcgaacgccgtctccgcgatgagttccgcgtccttcggctgcctccgccatgggacaaaggcactctctgcgtccgttacgtccattcattgagtgccgccatcgatttggccaacgaatcagccgtttgagcatttttacagatctcatattttttaaaaatattttactcactaaaatttaaaaattaattttatttttatgtataaatatgatttgtttttaaatttttttttctcattgcaacaaataaaagaaatgagccgaaaaaccattaagaatgtaaggaaacagaaaaaaatacccaaaaaagccatgcccccgaggaagagctcaatttcaaccaaaaagaaagaagtgactccgttctccgcccaaaatgagaagggaaaagggggggggaagagtaagcggaaggactgacagaagagcaaagggttggccaaggacattcggtcgtattgggcgagggaaagggcacagaggcggagagacgtgtccaatggcatccgcag

SEQ ID NO: 22803 - DNA, 1375 bp, Heterodera glycines
  unsure (1)..(1375): unsure at all n locations
atttttaataaatcgccatattttnaggggaaaataaaataaataaatgatcaccggtaaagcaaaaaggagaaagaaatctgttcacaatcagcaaaagatacacaacataaaataaactgcctagaaacgttatcaaaatattatcgtatcattaattgtcactcaaattgctttgctattggccgcctcctcttcggcttttccctcctccctctgttcctcctccttctgcgattcctcaggttcagtttcagcagcaaccggcggttcgaggacgatgtcaccatcatcatcctcttcacacgacgaatcaacgtagaagtcgatatcctccgtcaacgcctgatttattgatgattaggaaaattggaaaattaacgggttggaaggggggggggatgccagcatttgtcattttccatcccctcaacaagttccttgcgttttcgggggtacagaccatgaatccggtatccatttcggccaaatccgaaccccagacccgaattcgaacaaaaactcgaaagtccaaattttcgaatttagcattttttgttcaaaacggcatacatgatctattattgaaagactgatggcttttagtttgtttccgtgtatttaaaccaattttgaagaaaaactctaatttcgaaattttgacttttcgattttttgttcgagttcgggtccggcgttcagaatgcagaacgatgttcttatagaagtttatttctatattacaatacaaatgccatacaactttatttaaagtatttttatcactgacgcattttccactgaccgattttccggtcacgcttcttcttcgtcccattccatgtcctcttcctgctcttcttcctcatcctctacttcaagaatggcctcgcttcttgcccggccaaattttctagaaaaaattttgataaaaaattgtgtttttttaatttaccgaatcaagtgccaacgcgaaatgcgtttgcgcttgaacaattcaatggccaccgcttttatgttaatttagatgacgttaaaacaaaaatttgcggcgcagcatcgagaaaaagttaaagagtttaagaaagaggtggacgaggcggcacaaggggaggatacggcgcggacagccctccatgaggccgctcatgtatcctacctgtggctgcacataaacaacggcgactggtttgacgatgtaggatcggtgtcgggtcttgtgattaagctaacaagggaacatgccgactgtatgtgcccaaatcactttttaaccacttctatcgtgtagagcatggtcgatttgctattgtaaattttcggcttttttggctacggtcgccaaactgatcagaaaaaagtcatcaaataaaaa

SEQ ID NO: 22804 - DNA, 1294 bp, Heterodera glycines
ggaattttacagtgcacagggatttgaattatccataaacacatcatagggtaatatctagcaaaaacaaattttttttacacagaatcctagtccagcagacagatgaagcgacttaataaatcgattatggatttgcaagagtaaatttctcaactcacactagctaacacggaatttgccgagtgtaggcgtaaaatgagccattatgaattacaagcgtatatcttggtccacattgagtgtgtgggcgagattaagtaattttctgaaagagctcaaaagcagctttcgaatggtgtattcaattaattgtttacttgaaaattcacagagatatgtccaaccgaatcttgaaatgaataatggcgtagtattctataaaaaaaaatttttcttaggaattttacagtgcccagggatttgaattatccataaacacatcatagggtaaatatctagcaaaaacaaattttttttacacagaatcctagtccagcagacagatgaagcgacttaataaatcgattatggatttgcaagagtaaatttctcaactcacactagctaacacggaatttgccgagtgtaggcgtaaaatgagccattatgaattacaagcgtatatcttggtccacattgagtgtgtgggcgagattaagtaattttctgaaagagctcaaaagcagctttcgaatggtgtattcaattaattgtttacttgaaaattcacagagatatgtccaaccgaatcttgaaatgaataatggcgtagtattctataaaaaaaaatttttcttaggaattttacagtgcccagggatttgaattatccataaacacatcatagggtaaatatctagcaaaaacaaattttttttacacagaatcctagtccagcagacagatgaagcgacttaataaatcgattatggatttgcaagagtaaatttctcaactcacactagctaacacggaatttgccgagtgtaggcgtaaaatgagccattatgaattacaagcgtatatcttggtccacattgagtgtgtgggcgagattaagtaattttctgaaagagctcaaaagcagctttcgaatggtgtattcaattaattgtttacttgaaaattcacagagatatgtccaaccgaatcttgaaatgaataatggcgtagtattctataaaaaaaaatttttcttaggaattttacagtgccccagggatttgaattatcccataacacatcatagggtaaatatctagcaaaaacaaatttttttacacagaatcct

SEQ ID NO: 22805 - DNA, 1182 bp, Heterodera glycines
  unsure (1)..(1182): unsure at all n locations
atcaattattcgcgatcattttcctaacattttcttcatttccttccncagccccattttttccatctttccattttttagtctcgtaacataaagcatttttacctcgaccgttttttgagtcatttttctttgttattcttaaccaaacagcagaattttcgatttttcttttttgtattaaatataaaactcaaaaaattgttatgtgcaagctttaattcaaaaacaaaatcgtccgaaattagaaaaggacgaaaaagtgttaaaataacaaaaaataataataatattgttttagacggtcaaaaaaccggttttattaatactgctgagtcgtatgtcccctcgtcccctctgcccactcttgatgccgatcgataaaggtgctcgggtagatttattaaatttaactgatttggtttaaagataatttattcaaaaaatatttttattggattttttgtcaaaatattaatttatgtgaattttgttcgccggtgcctcaataggcgcagcaggaggaatttgcaaattttggaacaatataccaatgatgaaatcttgattaaaaattcgatacgattttagcatttacggcaaaatcagtgttaattttgaaacaaaatttattatagattttttggcaattaaagtaaaatattaagtagagattttgaaatgtaaataagtaaattaatattcgctgataattaaataaattgcaaatattttttaaattaattgaaatgatttaacttttcaaattcatagcaaatcaataaattacaacaatttatatgcttttagagccaatttaaagtaaaaaaatattaaaatgtttttttaataaaaccactataataagaacagtgattagataaaaacgaataaaatataccttataaaaaataaaaataacaaacaataaaacataaaacatatataattctctaactaaaagaaacaattacatagataaatactggagggattttacaaaacaaattatcttttaaatcgggaagtgttagaaaattaacaaaattcggatgtttccgttttcagaagcccggttttaaaaaatgaaaattcaaattttttataaatactcagtgggtaaactgaacgtttaagccacaacttgcaaaagaaaattaaaatattaagaccaaaatattt

SEQ ID NO: 22806 - DNA, 2564 bp, Heterodera glycines
ggttttacttaatttaagtaaaatgcaagcactgactcattactattaatgccaaaaattattttagcagcaaagtcgtccaaattccccagcaaatggcgtatccaaattgatacttccgagaagccgagtcgcttcaatacgtcgtgagtcggattgcaattcagagaaaggatttggtgaggcggaagcggcacacgaaaaaatggtaaaatcggcacagcaagtcgcgatgggttttgaggatttttgtctcgtgagtgcaaatatattttttaaaatctatctttgtttttaaggacgacaaggctttcgaggagcgcaaaagggccaagtcgttgtctgagcctatttgcattttcaccaatgcgttccttccccaatgttcgtcaccgtcgccgagtaggggttcaatggatggacagaaagtaaggacaactgactctgattttgaccgccactccgttgtcattcgctcagcaatgctattctccgtctgcccagcaagtcgtccgcagcaatttggcgtattctccgagtccgagtccaactccgtctggcactcagtcaatgcaccgaatgaggtcttgcgagagtcaaacgcaccttcccgatgattaatttattgaattcgctgaaataagagactattaattttccagaaattgtttatgtgttcgcaattcagcgtttattttttgatctttcctctttattttattttattttatttcattagtatggaatccattttttgttttcgtcttacatttttactttttattcatgctattttggccactgacagtaaaattgagacggaaatgcagccccaaccattggacccttctttttcagcagaaaaagccccaaaaaaggatgagccggtgaatgtcaccactctattaattcacaaacctattaggtactttagattattgtcattggcggtggactcgctgggatgtcggccactttggaggcactaagtaatggtgccaaagtgattttgatcgataaggagccgactttgggcggcaacagtgccaaagcgagcagcggttttggattgtcgttgcttttctttcaatggcatgaaggcaattaagggatcaatggttgtgggacgaaagtgcaggaaaagttgggcattgacgacacagcggaacggtttcactcggacacaatggcagcgggcgacagagagaacgaccccggcctcgtcgaccttttggtcgtcctacccgctatttgttatgtcacatttcttctaggttcaccagtcagcgtcggctatcgattttctgacagaaaatggagtcgatttggccgacataaacctttgcggaggacattctgtgcccaggactcattggtcatttcgcgtttcaatggtttttgaagagacaatttgccctttctctaaaggctgctctcgccaaaagaaggaaaaccgttgccggtcggagttgcaataattcgaactttaaacgcgaaattggaagaatggaaagcaagggatcccgaaagactgaaaattattctcggcactgccgttttgggtttggtcacatggaatgattacgtaacgggcgtacggatcagagacggagacaacaaaatcagtgcattaaatgcatttgtcttaaatcgtttcttacacttttagtggagattaatggaaaggcggtgattctgaccaccggcggattttcttccggtagaatttgtcattgtgatccacttctaacttttcttgttactacaatataaagatcgggacaacgagacttccttgttggtcgaatttgcgccctccgttctccccttgccaacgaccaatggcccattcgccactggagacggcgtgaaaatggcccgagcgatgggcgctggtttagttggaatgggaaaggttcaaattcatccgactgcattcgtcggtaggcaaaacagtttttgaattaatcgcttaaactctataccaattcttccaacagatcctaaaaatccaacagcccacacaaaatttttggcagcggaggcattgcgcggaaagggcgcgattttggtaattagggaacttaattggtggcatttccagctaaaacacaaaagttttaggtcaatgaaaaggggcaacggtttggcaacgaactcggacgaagagactatctgactgagaaaatgaacaaagtgaaccactgttgttgttgactgagaaatgagcaaatggctttcctccttctgcagaattgtgctcgacaaaagtctgtggctgatttgcccattgcgtggatgctaatgaacgaccaaatggctgattcctttgggcgtcccgcgtttaatttctatgcaaaaatcaaaggatttttcactgtctttcgatgttctcgttaacaaaggaaaatgccagtttttcagcattttgcgaatgtcgacgaacttgcgactgagattggctgttctggcgaaatgttgcgcaaaacactcgccgaatgcaacgaatacgcggagatgagcacgaaaagtgacaaattcgtcgatcccttcggaaggagtaa

SEQ ID NO: 22807 - DNA, 1897 bp, Heterodera glycines
  unsure (1)..(1897): unsure at all n locations
agattataatggcaaccgatattaaaactattttacttcgactgtcttcaattgaaacgttattatcaaacaacaacaacaacactttggcaacgcaaatggcagaacaattcaacgccattgctgaacgcctcaacgaaattgagcgcaaaatcaacagcaacaataacgacaattccagtgcggaggaaaaagaacgcaaacgaagcctcgttttgattggcctgccggaggctgtggctgaaaagccgtcagaacgcgccaaagaggacgcggaaacagttgcggaagtgttggacgctttggatgtggaggtttgcccgcagatggtgtatagaatggggcggcggattgatgagaagcgaaaggggccgcgtttggtcaaagttgtcttgccagcgacgacgttccaacgttttgcattggcacaatgggggcgcaaccggacggaactgaagcagcatgttggttggcagcgacttctcgtcaggccctctctgacgaaagaagaattggcggctgagcgggagattcgtgaacagaggcggatgaattatgaagaaagcaaaaagaatgaaatggtgacgacgcggcgtggaggcaacatgggaaaaaacttttgaggtcacaaaattttctcaattgtctttattttaactcaagaagtttagtgaacaaaatgaatgagtttaagcttttacttttagaaaataggtataaaattatcgcgataaccgaaagttggttgaataataaaataaacgactcgcaaattttagaaaattttcctttctctttaataagaaaagatagaaagaataaaaaaggaggaggggtagcgtttgtcatttctaatgaaataccgtttgaaattataaaaactcaaaatatacaaaattctgatatactttgtattgatgttttttcgcccatttccgaatcaaaaatccgtcttattttggtttataggcctgtaactaccgaaacattcgaaaattttatgctctagaattaatttcctcactagcagtctcgacagaaaattttgtcattcttggagattttaattttactaatattcactggaaccaaaatggccctttctctatcctaaataatttgacaaattatgaaagtaatttccttggttttgttgaaggtttacgacttgatcaaatgattaaagaacccacaagggaatgcaattttttggatttaattttaacaaataataaatttctcataaaagacatttcaattggccccccattctcacttagtgatcacaacactataaaattcgacttaagactaaatgtttttccttgtaaaaaatttaaacactttaactttaaaaaagctagttacttggaaataaatgccatgctctcttctactgattgggttacctttttttcggactgtatagaaattgaccaaatttataacaaattcgcagcatttttgcattttttaatatcgaaatatgttccattaacagtatcaaattctaaacataatttcccagatcatattaaaaaaattatgatttatcgtcgacaactttggaaagaccttaaaaaagataaaattagagaaaaatttaaagaaacctctaaaaaacttgaatatgaaataaagaaataccttacaaatcgtgaaaataaatttttaagtggtttagaccctaaacaacgatttcgatatattggttcttttttaaaaactaaaaacacaaaaattccccctcttaaaatagcgaaaacaaattgccttttccgaaaagctnaatccatttattagccgaacaatttactcggtctcactgaccaaaaattcctgttcatgtgagtccccctaaaaaaatattgacttttcacatgacacttatgaaatt

SEQ ID NO: 22808 - DNA, 1875 bp, Heterodera glycines
tattgttcaagtaggccatgggagcggaaatcccaacgaccgggcgttgctgtgacaggagcagcagcagctgcagtatcatcatccgcatcaccgattttccggcgttgccgctttctttggcccccgctcgaagctgtgccagcctgtgtcacccctcttttggatgatgatgatgatgatgatgatggctgcatactgtcaattcaaactgttcataaatgcgcattttaataaataatgcaatgcaatattagcaataccatatcggttcaagcgtttgacaaaaaatgaaagcggaaacattattataccatttttttcaacaaatttcgcttccaattaatgaaagtgaacattttggatgtctaaaactagcaaacaacaacaacaacatcggcttgacagcaggccaatcgacgggcaattattttgttttttcactatttggtttctcctttccctcctgctcgtccacagcagaggtggatggagcagtgacggcggtcttgtgatcgacaacaacaatttcgtcttcgtcttcttctcgttcagcctcaacaattctggcttttttagcggtctgtgagctgccttcagcttcgtcatcagaggcaaacacctttgaaatcagccaatcgaattggccttcgaagtcttcggcagtggcttccttcatacaaaaaaaaacatattgcgtacatcgttgtataataataataataataataatcacacattttttgtaccttaatagtcatttttacgactagctccttttcaagttttgcttcaagcagtttctccaatttgtccgggttttggtcacgcatgtcgagcatcgatgccgctttgataccgatgtacttctcagcaacgtagctgaacatggtggcacactgcgtaacttccggattctcgatgtctttgagctccactcggcagtacatgcaaactagcggttttttggcacggtgatcacacgacggacatcgaagctcagaatccagcttacgtctgcagaacagtccgccagaaaattttaacgggcatgcctgtgaccggatggaaccatcagcaacaacaacaaatttaataaaatattgatgaaaactgacattgtaaaggctgtattggaggttgacgagtttggcgcgtacataaaacacgcctaccgagccgaaatcaacgacttcggcgagccccttcagatttgcgggcagctcttcggcggatgacccacgccgtttccccgcggcgccggtggatgacgaaatttcgaagcgagacaggcctttggcaccgcttttgctcattttgaccaagaatgttaaatattcaaaattccttaatgcgtattagagttgactatgattattatacgctaatatggcacgacgacatttcgcctactggacatttcgcctactaagccaagatcggacgtttcgcctactaagccaaaatctgacatttcgcctacgaatttttgcctactgaaaaaatgctagagaaaagaaaaaaagagagtgaaagagtagaaatgctttatttttcgatcaaataagttcgtgaaatacatacttacgagtcttaaaaagccaataaaaagccccgcattcattgaaatgaagacagtgtactgaatcttgagagtgcagccaaagaagcaaatggaaaatgtttcagacaacaacgatttgaacttagccaaaatgcggatcagggatggcacggaattccgattttcgacatttttgaccgctggaattccgattttcgaaaatttttggggcctcggaatgccatccctggtgcgggtccttgacgagaccgactttgaatcggacgaaagattagcaaacaccttgcacc

SEQ ID NO: 22809 - DNA, 1881 bp, Heterodera glycines
  unsure (1)..(1881): unsure at all n locations
ttgtatctcttctaatcactgttttacctttcttaatctcttaagtacctcttcnaancatngnngnacctcttctaatcatttttgtacctcttccaatcacagttgtacctcttctgatctctggtgtacctcttctaatcactgttgtacctcttctgatctctgttgtacctcttctaatcactgttgtacctcttctaatcactattgtacctcttctaatcacagttatacctcttctatcactgttgtacctcttctaatcactgttgtatctcttctaatcactgttttacctttcttaatctctgttgtacctcttctaatcactgttgtatctcttctaatcactgttttacctttcttaatcaagttgcacctcttctaatcactgttgtacctcttctgatcactcttctaatcactgttgcacctcttctaatcacttttgtacctcaaaatttaaataacgggcgctaagcgcccgtccaaggccgcgaagcggcctaacaagctaaaaaacgggcgcgaagcgcccgtatgagttcaacgaatttaaaaaacgggcgcgaagcgcccgtccaaggccaacaaaaattgaaaaaccggcgcgaagcgcccgtctgaggccgcgaagcggccttaatagcccaacaaatttagaaacgggcgcgaagcgcccgtctgaggccgcgaagcggccttaatagcccaacaaatttagaaacgggcgcgaagcgcccgtctgaggcctcgaagctgccttaatagctcaacaaatttagaaacgggcgcgaagcgcccgtctgaggccgcgaagcggccttaatagcccaacaaatttagaaacgggcgcgaagcgcccgtctgaggccgcgaagcggccttaatagcccaacaaatttagaaacgggcgcgaagcgcccgtccaaggccgcgaagcggcctaacaagctaaaaaacgggcgcgaagcgcccgtatgagttcaacgaatttaaaaaacgggcgcgaagcgcccgtccaaggccaacaaaaattgaaaaaccggcgcgaagcgcccgtatgaggccgcgaagcggacttaatagcccaacaaatttagaaacgggcgcgaagcgcccgtctgaggccgcgaagcggacttaatgagaccaaatgattttaaaaccgcagatatgcgaaccctggctatcataaatatttgataatatgtctattaaagtattaatgtagaccgatttgttgcacaaaaactcgttagatataataattttacatacaaaattaactaataatatataaataaataatgaaaatactaacgctttatctatttgataatgtataaatttatgtctgcattaaggtattgatactccaataggatattttagattctctttaattattaaacgataaaatatttagaaaaaggccaatatttaattaaaaatcaaaggtttaacacagatttacaatgctacacaaaatcaaattttctgaaaaatgaataaagcgaagttcgaatccgcgcggtgtatattattttctatgtatttttgggttatttttaacgttttaattcatttaaaagaatgtttttttcttaataaaaataaaattttttaatttaaattaaattgtttttttgtgaaaaatgttttaaattaaaataataatttatttacttttattaaagaactcctgtatttttaaattagaatttgtaaaattaatttcaatttaaataaatattcaatccttgtacattttcaactttctttttaaataataaaaaggaataatttattttatttttttaaaatttatttaattacattcaatatttaatcttactttttaataaacgatttcct

SEQ ID NO: 22810 - DNA, 2147 bp, Heterodera glycines
  unsure (1)..(2147): unsure at all n locations
tcaatctcatcgctcttcggtataataatctccggcaaaccaatcgggtaagctgtaccgtaattcactgacggatacagactcacaatatcataaacactaatttttttcttctcatccgatttcgcaaacaatttcatcggtcccgtcctccctcccgcataagccatccgcggatcaatcggccccttctcattccctctatcgtcgaagaagtccctcatttcctcatcctttttcaactcctcaatttgacagccctaaaaattcacaataaaaatgtaaatgtcaaataaacttacccaaacttcttcgacgtccaacgtcttccgcagctccgccaatctctcctgcgtctcatcattcaattcctgggccgtccttcctccaatcagttccgctgccgggtcataacagttcatacatccatgtatatagcatcccataacttcaatgcacttgtccctagctccgttattcgcaataaatccatccaatttgtaattcccaattttaacttctcgtccgttccccgcgtgccttatctcaatctcatcacgcttgctccgccactccaaatacttaatggccataacactcgctctatcacaccgctcatagcctttctccggcacaatcgataactgctcagtcaataaaaacattgccttaaaaatattcatcgcaacccccgcattcgtacaactcctcggtaaggggtcaaatcccttcgtaatatcgttaatcaatatcctcctaaactcaataatcgataacagcaatatctctgtgtcgtttctgcaataatttctcaattcgtcattcaaataaaaaggcgtgtccttgttttcgttgtacctgaaaaaaattatttattgttaattttgtccttcttttcttaccatttttcgaatttttcgtatttattcttgttcatagatcccggcgaatagtcctccatcggtggtagatgttgtaatcgaactccataattttctttcttattgtagtaataggggaaaaagggcttgtcctcacagcccaagttgaaggtcgccttcagcgactcgagtttcaccggcatcaataagcatgagtctctccatatcagcattgaatgtttcttcgagtttcgcactttgaattcataaattttgagtccattgataagcggtatcgggttcttcccggtacggcagaggtagttaaacacaaaatgacctaaaaattttaggatttaaaaatttagattaatttttttttcattaccatcaaaacgcccagcattgtgcgcaaatatgtacgtatcgtaatttgaaaatgccgttaaaatccactccacaaatgccttcgtcggctcatgcccctcagcctcgctccaatccttggtcctctcctccccgcatattttgcaattcgtcctatttttatcatcacagcactccgtacatgtaactctcaccaaaatataattgatcacatgctctttctggtcccccttataaatcgaatcctgtgatgtttccgtatcctgaaagttaggttttattttgtctttttctttattaaatcttacccaaacgacaattcggtagacggccttttcctctttctcctcgatcggtataatataacaaccccgcttggggtcatggctcacactacaaagttggcaataagtctcttcacattcatgtcccttcttcgggttaaatcgataagtcttgtcacagataacgcaacgcctccataatttacaagtctgatgttcctgatggtaattataacactccaaattgtaaaagtaacgacaacacttcgggcactcaatcttcactccactctccttttggcatggtactcctcctactttgttacaataataacaccttgcccggcagtcgaaagtatggtaaatatctttgtcgtaaaagcactcgcaatcaatacagaattntctcccacggttgaaaaagcagacataattcttcagaccatcccaatggccattctccaaaaatatcggcactacattttcgcgtcccatagggcccttccatannacacggatcgatttccgcggatccgcagactttttcaatggcacaacccggtatttaccgggggaaaatctcatcctaaaaatc

SEQ ID NO: 22811 - DNA, 1740 bp, Heterodera glycines
atccggcgagcactccgccaattattgagactgtctttcgtcggcgcattcgctttttctccacttcttcgttcaaaacctgaagttaggtttcggatttcgccctcattgtccttaagcaactcgcctccaattcgtcgtccgactgctcctcccctctctttttggctttccttttctcctcctccgtcaacatggtcgtcctcttccgtgcgatgaattcctcggccgcgttgtccaccggcactttcgggcactgttcgccggagggtttcccatcgtccgctgatttgctgctgtcaagagtcgcctgtgtttgtattaaaatttacaatgaaaatataaagcaattcggtcacattgataatcggttcggaccctatcgacgagacagtgcttccactttgggtgcccgactttgaccaaaccactaaaatatgaatacttatagcaccaatttggtctaaccaaattaaaaattcgcacttttgcaattaaaaaataatacagaacaatttaggaggaaataaaatgaaacttaaaaaagtgaaaatttcagggttcggagacatcagcgaccaagagaattttgacgaatttaatttcgggactcggaattgtgtcttttcttgttaaattgcaacatgtccttgcctccatgggtcgtcgttgtcttttgttcggtttcgccatggccaattgtttcccccttgtgattttcgccagcctccgatacatttccatcgtcgcttagtggcggagaagcggccacttgagcataagtctttttgaccgtcgaattattggtagacatattttgatatttgaaatgcttaatattttgattaatctgtgaattaataggctgcaggttttaggtttttagaaagggcgaaggcagagagaagcgagacccaatggctttggatggaacgtgtctcgagacgagtttattttcattttgtttgctgctttttgacaaaataaataggtatctttggttccgataagtgctaaaattgaaaagggttgctgcccatttttcatcaaaaagaaaatttttcttgagtttcagggtgggggtatagcccccaaggtacgattcgttctttattcgaacctctcgtcaaaatgttatgacaaaaatgttcgaacaaccagttatttgaattcttctggccataacaacttttttgaaccttattgaagtttttcgaaattttgcaagttaatagaggacacttagggatatcgaatgatacattgttggatttgattagcaaaatttttgcaaaaatatgttaaaatatgaaaagggcctctaaaagcgcaaaatttgaaaaaaaaaattgtaaatataggtaggaggtggctatatatatttaattggacagtcttgtggtccgatctttattttctaatattacagctctgattagatcatttttaatgttgtattttggagattcatactcattccatatataggtaacattcactaataaatttatatggccaatgttttgactgcatttttcgttatgcattgatttgattagaataatcaattattaattaattaaattgtgttaattgagggtggagcgggagagatgaaagttactaaagtaatcacagatggggaagaaagtcgatgaaaggaggcggcgggggggagacgaaagacacccaaaaaccctccccaaattcgaattgaaataaattaattgcaattgactg

SEQ ID NO: 22812 - DNA, 1817 bp, Heterodera glycines
acaaactgcataagagccgacaatttaacgaaaactattgaattataaaaaaattttatacaaattttagaactcaaaaaataaccatttttccggtaccattgaaaatattggtaccggcttattttttaaacaaatcaatcccgaaaattcaatttattaaattttaagttattttttgcacaaaataaaagcaatatttaataatttaaattgaaacaatttttaaaaatgtttaaaatataatattttcatttaaaaaatgattaaagaaaaaattttagaaaaaattaaaattttttcgtaaaaaaaattttcccgttcccggcggatttcccgtttaaaattgacgggatttttacgggaacgggaaaagggcggggaatcccgtttcgagaatccccgcccctttttcttttcgtttttcccgttcccgttcccggaaaaaattttttaccgggctctactttttggtgctttttttgcctttgcgattttggtgccaaatgccgggcacgtaatttttgcggtcggggtggggtcgttttcgcgccagcccgagtttctggttcttactttttcattgtcgatcaaatctaacaaacttggtaacagtcgaatgctttacatgtttagaagctattcctaaacaattgattggcgaaaagacaattcctaaaaaaattataagtgaaattggaaaaaagtcagaatttaaaacttttttcttaattacttttttataggccataaaatctttttattttttgtaacaccaatagagtatgtgaagggctttcgaatgataccaagattgttaggtttgaaagacaaagaaaaaagttagaacccaattggtcccggccctccgggacctggccttaggaaaagcttctcctcatcgagagctttcgcatgataccaagattatccaatttggttggcaaaaaccttcaaaaataattaccaaaattcgtcattttttaatatttggacaaaaataaataaaaatattcatgttgcacaacggactcgaaccacctccctttgtccctttactatcttacaaaaaccacttcgccacacatgcaaatcttattggaactgagaggccaaaattgaaacggtgtgtataatatttatttttatattgaactttgcgacgacgccaaaactttttgttgaataattgaaaaaaatgctagcgaaaaagttactaataaaatacctccggcaaatgaaacatttaaagaacaaattaaaaatcctactcagtctcaacataatattgcaaaaaacggacttaatttttcccaaatttaagacaacaaattcatgaaatagttaaaattatcgaaaaccactaaatctgtcattaaatcttctctccatttgtttaaccttatttaatgaaatggctaaatatggcaaattttaaatattaaatctgctttgatagatgagtttcgttcaactaggcttttttttaattccgcccttttcattacgcgattgcatcgcatcaaaatgcataatttagtaaatgccattgaaaaggttcagccaaagcaaaaaaaaaaaaacggaaaatgaactgaaaaagcaaaaatcgaaggctaacaaacgcaatgggaaggagaaagagtgacaaaacgaatgagaagagatggacagattggcacttctgttgggggaggggatggaaaatcgaatggatttttttgatttgttggtgtgttatttccaaaggattccaagatgaattttgcataatatctttggcttaaaagccacattcagagtcgaaaagcctcgtt

SEQ ID NO: 22813 - DNA, 1487 bp, Heterodera glycines
  unsure (1)..(1487): unsure at all n locations
aaaaaagaaatttactgattattggatttggataagataaaattaattacttttaaagaaaattatttaatcacatttggatactgcaaaatgaatttttatttatgggtaaggaaagtaatttcaaatgagtcaccgacctgtcacgttgtacaatgcacatttgatcactaattaatataattaaaatattaaaaaacccaaatttaaattttattttacacaatggtgacaggtccacaagttcgcgccgtccctgcaattcggccaaattttttgtcaacattcgtccatatttgttgaaggtgggcgtgtactgttccaacatggagaagtgaaagatgggcaacaacattcggcgctaaattaaatgaatgtattttgatacggtaattagaagggatacgatacggtaaatttcatttaataaacaattttttatctaaatattgaaaaaaacttgtttaaaaagagatgactgataattcgaaaaagtatatgtgaaaattcatgaaatccgggtgcaaaagacaaaaagcccgaaaattggccgaaagacagtttttcaagcgtgcccccccaccgaagccccgaaaatcctaaatcttagtaatcctcggctgatttatggatttatgggactcacttggcgaagccaatggtccccgtcgctgaccaaaacgccgttgcccaaccattggtgaaagaatttataatctggtccctttttcatttcttcagtgctctcaagaagaacctggcattgttttttgcaaattaaaaaatcaacaaaaatttttataaaactcgacatttaattccattaaatcccattgcttaattcctaattatgtgtccattttttaatttagttaatcttgtttaaattgccatatttattaaaaacaaaaatcgagcattataattcttaatccagttaaaagaatattttaaaatgataaaaaatgaccaaaatgggatacaaaattaattagtaccaaagctattttaggaaaagcaaatactgtatttaaacattaaattgttaatcacttttgcggtctctccatccaacatgataataataaatttattagcgacccacctaaaaatgaaattgaaaaatgtaaaataatggatttattttaatttaattatttattatttttttgaattgtttaaccatctcatcaaatggtgtccattacggatggcctctgaattaataaataatcaaccaattttttaaaacattataaaatttaaattttatttcttaccatttgcatgctccaacataaagttggaccattctgaaaatttaaaaaaggcaattaaaaatagaaaactaattaaaaaatatattaaatgatcaaaatgattgctaatttaaaaattatctaagcaatcttctgatcaatattaatcaacaaaaaattgaagcagtgggggattctaccccaaanagggtcaattttaggaatttt

SEQ ID NO: 22814 - DNA, 2919 bp, Heterodera glycines
  unsure (1)..(2919): unsure at all n locations
tcagatggaactcccgcgtacacatcaactcctgccttttcattacaggcaccgctgcattcattncaccaaaacagnagagcatggacacgggctttggtgtgattaattggtccgattcggtaatgaatttcagtaaaaattcagttttgcccgatgatgaaggccccgaaatgattaggccaaatggcaatttaaaacaaatatctttattggtgaatgcttgtgtgttcaacatttttgagaaaatgatgaatgttaaattattcacttaaataggcacatttgaggttgaagcattaaggctgttaaagaagtcgtcaagagttttgtcaatgtctccaatgtcttctttgttttcttcttctccctgcacattttcctcttcttccttgatgtcagcggcttcatttgcctgcgtcgggacatcagtggaattgcggttggtggagtccagtgattcagccaattggagattgccaagcacgttgatagcggttttggccttcttccaccgtgtgccgtcctgcatagcatcggccattagttcagcctccaccaggtcaagtgctacctttgccttgcgcttcagatcctgttgttgttgttgttgttgttgttgttggtggtctgtcggtttgcttttggcacacgtcccggagggcaggtctccgtaggggacattgaacaccctcgctttgttcttcacgcggaaaaagcagtgccctggcaggtcgtagacgacatcgaacggcacaaattggggtttgttgatacgagtgcaccacaatgtgaccccctctttggtcaccattatgtccacctcggcctcggttgctttgcaaacgcggcagcgtccacaatcgtcaaacggcaaaaaacggggggtcgataggcgtggaccactgacagttatgccgcttgtggttatggtgatatcggactgggcgaggatttgattgaaaagcgatttggtgtccgaaatattaatggccattttagcggaaaatttcaagaatgaaaacggaaaatgagcggaagtcaatttcagtttatttttataggcctcatccccacctcactgagtgtttagagccaatcaataaaattgcagaacatgagaacaccgccatatttaactattatttaaatcaattttaaattctgccctttcaaaatattcaccaccatttatttgacaaaattcatcaccaattttttaaatgtcccaaaaaaaaagatcatatatccacatcactatcaacaaatcggtcatcgatcgacatttcatttcttgtcacgcttttctctctcctcaagcgtcttcattattttcagaatgttctcgtgctttagtccaccttctcgcgcgaatgccaatgcctcgacgcatgcttgtttggcggtcgttggagtgaaccagttgtaccactgcagaaatgataaataagatttgaattcaaattaaagaaaaaaattcactacatctttatcattttcgaggatgtcccatgcaatgcttatttcggtttcgggcgttggactgtcggacatttttaaaacaaaaatttgaagtaaattttgtgtgcttaaatgatatgatttgggatatagcaaaatgtaaagcggataaataaatgtgaaaatattgagcaagtgatgtgaagaaataatgagagcgagacgggagggatgcatttaaatggtgcgctgttgaccttgcacaacggctttattattattctccaaatgggaggcagctttattatacaccaacgcatcccgaattcccgataatggatgtgacccatttttaaacaaattgctcatttgatgtaccgacagatttactccactatatcacacattaatcattcaaaaagattatatcgcatgtttaaaattcaaaattcattaatctcgcctaacgatctgaatacccaacagtaaaacatttgaaatttctcctatttagtggtctcctataaattgccaatttgtcattttgttacatttatttgccaaatattgtttaatgtgaaatgaaaattcccaaattttataaaaatttatgaggaattaaagctcattgttgtatcggctcatcgttcaaaaactgtcgtcgtcatcgtcgtcttccggcacaccatccgctggcacatcataaatcacctcgcgctgctgcgtttgtggctccttttttaaaaaatggtataaaaaagggaagcgaagggctttgttgtgtttgtacctggtacggcggcccgccgcccaaattcgccggcacaacagagggtggcatcgatcggcggcccccgacttgtccagtcctttgcgcgtccccagtctgaaataatttgaaaatttaaaatagtaaaattaaaaagtttttactcacctgatcaaaattcaccaccattggcatcgtttggcgacccacttggttgcgaagggttttcattccttaaaattgtttgaaatttttattggttggttaaatttttaaaaaaaactcactcttctgacgctgctgcaattttcgctggatggcacgatttttgagaatgcgccgcaaaagtgctccaacttgaacagcctaaagaggagaaggggttaggttcaaattgagggaggggggggggctacctgcgcgatgaacaccaaaaagatgaaaaatgtgaggatgaacagcaaaatggaatgtgatgattgaatgggagagggaatagggcaaattgttgcgtttgttgtcgttgtcgttgtcgtcgctgggaatggtggcgaagtcccctctctgaggtatgatgtcaaattgttgacactcgcatgcaaacataaaataggcttccaggaaaccgatgggggcctgaaaacaattncaggccctcatcgcaactgggtgcagtcaaatttaaccca

SEQ ID NO: 22815 - DNA, 924 bp, Heterodera glycines
  unsure (1)..(924): unsure at all n locations
aaattcaaaaacccgaaaaccgttttttaggcctacctttaaagaggnngaaaannnncgaaannnnaaaagnnaaaaccttgagctggcaaagctcnacaanaaggccgcgggagccccctcgcncagaacaaacgcggacgcggnanncacccgggacngaaggggacaaagnnganacngaannncnccnannnncngcagcccnnccaacaanaggnagaggccgggaannnnnnnngacngnnagacaacacnncaacnaaggnnccaaccagcggaaaganngngaancgagnnnnacagaaaaagnnaggggccgncaaacgcacgaaaaaaggagaaancagncccgggnacncagnnggcccnaggaccggaaaaccaanatnnnncccggangcnccncaaaaagnngnaagacccnnccaccactnncagggcgctcccggccttcggccgggagaaaatggttttagcaacgaaactccttgtcaatataacatatatagtaactagcgggtgtgtgcttacatgtttcttgggtgcttaaagcgcttcgcgctttgggagcttcgctacctaggccttgtattagggtctttgcgtcagccgacatgcacttggtttcactcacgtgatgagctgacacattgcatttatcagtgcaatggaaaccggaagtgccctaactcgcacgtcatccctcctccctcccttagtccaggtggcagcactttttgtatgtgtatccgtttaaagtgcagatgagaacggggcgacatcagtaaagtgccacacacgctggactataactcgtttgccttattgtaatttgagcatgtttttggccacaatgttcaacactttggtttgaccttggccatcggtctcccttctgggagcgtacactcggacgttgtt

SEQ ID NO: 22816 - DNA, 1169 bp, Heterodera glycines
cttcgcgacatcagtcggacgcttcgcaacggtttttcaatttttgttggccttggacgggcgattcgcgcccgttttttaaattttgttgaacttatacgggcgcttcgcgcccgtttctaaatttgttgggctattaaggcagcttcgaggcctcagacgggcgcttcgcgcccgtttctaaatttgttgggctattgaggccgcttcgcggcctcagacgggcgcttcgcgcccgtttctaaatttgttgggctattaaggccgcttcgcggcctcagacgggcgcttcgcgcccgttttttagcttgttaggccgcttcgcggcctcagtcgggcgcttcgcgccggtttttcaatttttgttggccttggacgggcgcttcgcgcctgttttttaaattcgttgaactcatgcgggcgcttcgcgcccgttttttagcttgttaggccgcttcgcggccttggacgggcgcttagcgcccgttatttaaattttgaggtacaaaagtgattagaagaggtgcaacagtgattagaagagtgatcagaagaggtacaactgtgattagaagaggtacaatagtgataaaaagaggtacaacagtgattagtaaattcattaaattaaaatcaaaatattttttaacaaatttaattaaaaaaatacatgaaattctatcaattaaaaaaataattcatttaaacttataaaatttattcattaaaaaaaaaattagtttaaatataattttttatttattaactcaaaaaatattttaaatgaataaacattgaaaaacacgaaaaaaatggtagaaaaataatgttacaccccccagatccgaacttgcccctcccctcctcaaaatgatgccccagaatccccaatcacacggggattctgaggtctaaacgatgtcaaaagtaaaaactgattacgtattcatgatcagcggcccaaataacccctaaagacatatttttggaagatttttgtcgaaaaaatttttccactcaaaaatcctggtcacccccctttggacccgaagcacaaaatcacttttatttttatatctttttttaaaagatgtgataaaaatgtaaaataaaatttatattatagagaaaaaaattgcagatttttgtagtattttacttttctcaaa

SEQ ID NO: 22817 - DNA, 990 bp, Heterodera glycines
tcgtgcagcaccatttggatcagttctcgtgcaaagtgtcaacggcactgtgtgagtgatttcagtccgcccccattttttcttttgaaataaatgtttgcggcgtttgttgagccgaattccgaccgcttcgagttccttctccaacagcgttttctgaaaaatgccaatgaaatgacaaggaatttgaagggcggggggaaatggcaaaaattatgaaaattcctttgaggttttattagacgctagcggaaaatttaaagaaagttgcataaatgatcagatctttgacaaataaaactcccggaaaagtgcatttttaggaaaagacaacccttgggtatttatttataagtgcatgagttacaatttattgacatatgcaaacaggtttaaaaaagtcaactgtttacttggatctcccccttggtagcgtccaacatcatcagaatgaggtcggcagtcttcgccacggcgatcacttgtcttcctcggcctgaaaaaaatgccgaaattgttttttaaaaaggttctcaactgctgacctttgccctgcgctgccccctcaatgatacccggcaaatcgagcagttggatgttcgccccttcgtactggcgaaagcgtttgtggacaaattgcagcaaaatgaacgcctacctctatcacaccaggaatgccttaaaagtaaacaggaaaaatgaaacatttcgcactgatttaagcccaaaatgaaattacatgtcaaagtggtgaattcgtacgaagcagcaacactctgaaaacaaagagaagtcaaaaactaatatttacacttttatttggcagcgaaaatgaaaatttgtgttaaaaatgcgattttttgtaaaaccaaaatatattttcccgcaaaaaaggcgttcacaaaacattgcctctgttgttgtgacggttgaaagaaacgttgactttccaaccgatgggaaaccgaccaaagcgactgaaaacaaatt

SEQ ID NO: 22818 - DNA, 1706 bp, Heterodera glycines
tttttatgaataccttttaaaaaaaattaaaagttatttatttttttgtatatttggaaaattgtaaaaaatcattcctcctttttagaatttttgatcttttaaaacaaattgttaaattatcattgtgaaatcatttattaatgcaattcaatgcatatttctttgttttggaaataattaaattaatgaaaggaattaagagtaatattagaaaaatatagaattaatccaattaattattaaaaaaatgaaacgtattataattggcaatcagttaaaaaaaaaaagaaaataaaatgtttaaaaattacacaagaaaaggtttaagtaatttttcttaaattgtaaaaaaatgtaatcaaacttaactactcctttgtttgaattgctactaaaatataatttagttaaaaaataatatttatattttcttttttacatgacaacaaatataacaaaaataatttaaagaagttatatttatttataataatataaatataaacttgattaaaatgaaattgaaatttattaagcataaatttgaatttaataaacattttttcgtataaaaacaaatcaaatgaaaattattactaataaaactataaccaaaaatattgttaaataattatttattagcacaaattcaactacatagataatattgcgagtttacgagtttgagaattaaaatagaaaaaaatgaacttgcagaattttgaatgaaaaatttacttaaataataaatatttatcaggaatatattaaagtgtataggagaaattgctaaagataaaagaatgctaataaattttaatttaatcaaaaaagtaaaaaattattaaaatattattaaataataagctgtggtataaaagaaaccgtggaaaagtaaaatgtagatataaagttaatcattaacatataatcattcatgggcatagaacaaaataaattttttcatttcttttaaaaaaatgttttaaaaaaataatgataattttacttttattttaatttttaaattaatatataagttattattgagttcactaatttatattaagttatatcattattttaataattttcgaaaaaattatccaataaatagtaaagaaattatattttgagcctatttatagtttatactaaaataattctcatataaacaaaaataaaataaactttaattaaaaaataatgtaatttcaatttagaattgattaatgaaataaaacaaataagtgaaaaatctattccttttatagacagatttgaaagtttgaaaatttatttgaaaaatagtgataatttttgctgcttcggttttttttttatatttttgttgcgatgaattttatttaacatttttgcttttattttataaattacctttttattgctttgtttttcttttttaattatttttttttaattggaatatttttttctcattaacttttcttttttcaattcacgaccaaactcccatttccgtcttcaaatgggtgaattcgaccaatttatttattcatgtatttattttatttttataattttttctttatatcttctatttaaatcctattgacttatgaaaataaattttttatttaattataatcaaatttatgataatgaagaaatttatatataagaatatgaaattagaaaatttcaaaatattctttttatga

SEQ ID NO: 22819 - DNA, 905 bp, Heterodera glycines
cggctggccccggtgttgaaagcggccccggcgctttcctgggccccttggggccctggttcactctataagggaaaaatgtaacttgaaatgactttttttgaataactctcttcaagttggtcggatcggctccgaacaaaagagtacaactattttttaaggattctctatcgaatggtgaaaaccattttttgaaattttcacgtaaaaaaaagtttcttcagaaaatttttgaaaattttcggaaattttttgaacggctctcagaaaaagggctgtatcttggcggggagtgccgaaaccggcttagcgatgttttggaggataaatgtcgacactcaggcgcttctaatgagctatcatacatctttctagcataaatttaaaatagagttttgctctggacacgaattaaaaatttttggaaaaatttttgcctcaagaattaggggggatacgcagggattctgaggggttgatgggtaattatgatgaattttttacactggaaatacttaaaatatgatgttattacgccctacatgcatttgggcattacatgtcaaattcacattaagatacttgatgcggaatcatgtccagaatccgaaaaaaattttttttagaaagaacaaaagtaatacatcagaaagtcttaaaacagtgtaaaaagatgtttgacgtttaaattttggatataacttcaagtctcaccaagatactgcatgtgcatcttggtatgtaaaatagtcaacttttgaaccactcatgaacaactaatgaacaactgatgaacaactcttgcacaaattctgcactactgctgctctaattaataaattaacaaaatatataaggggaagggttgtaaaggaggggagaggggggagagggggggagga

SEQ ID NO: 22820 - DNA, 2327 bp, Heterodera glycines
aaaaggatttttcaaggttcgtttgttgtttatgatcagtcaatttaccttccttttttaggtcgaagttgaagagttggtgactttctgaatgctagcaactttctcaatttgcaatctctcgtaagcgaacaagcggcaggatgggtctcacttttctaagaatacaataagaattccttttcgcagtcatttgcacccactaaattttgtaatttacctttcctgggattaggcgttgaatgatcccgaatcccatatccattccggttaattcataacccagacggttactctcacattacgtcccatgcggtccaagccaatcgtatatttgtggtccgacttttcgacaatttttgttgcctttgaattatttttgtttttttaagtatcgtcattcgtgtcaggctatggctgctttgctcaaggaccgttctcctgaggaaattcgtgatctgcttgggattgaggacgatctgactgaggagcaaaaggcggaaattcgtcgcaaaaatgtttggtgcaactattgagagttcagaagaagaaggaatgacgaccgattaccgattctaagggttttgccataacattttggttcttctgttattgttattatttttatgctttaaacaaacgtcgttcgattagatgctcattgtcattaaatgtttgctcggatttgatggaattattgccttatttgttatattcgtgttccttaatttgggtattcgtacattgccaatatcatttacttttgggttgaactcttctgaagtgttagtcaattttgctttttgatgtgaggctgctaattcgactatgactccaccttctgactagtggctggactaggcgctcgagaaagcactttgatgaaaaagatataaataaaattcgtcagcttaacaccgaggtcggcaaaatacgcacaaaaataaaacacatgcagcacaatttgaccatctttgaaaatgctgcgcttcagcgcgaccaccaaaaatctttgtcggaatatgaggagctcatccaccagcagaatagtgcatttgttgaggaattttttcaaaaacatcccaaaaattattggcaaattattcacaacaattataggggtcttacagaacattttcagaagatagaagaactgcaagcaaaggcagtagggttaaaggataatgcctctttcgaaaagcaaatagagcgagcaaaacagatgattgagtacagacgaaagagattcgctgcgctggaatttgagggccaaaaagcgtgatgagcaacaacagtttgttgcagcagcagcaaatacaattactgcaccgactgcgtcggcattgatcggaagagaggcgttaaaaaaacgtacaggcatctctgccagtacggatggtgaagtaggtgataaagcagatgtcggtccacaaacagctaccacaacaacacatggggaggtattaaaagagaaaatactggagcagcaaaaacacacggacaacgatgataaagcagatgtcggtccacaaacagctaccacaacaacacatggggaggtattaaaagagaaaatactggagcagcaaaaacacacggacaacgatgataaagcagatgtcggtccacaaacagctaccacaacaacacatggggaggtattaaaagagaaaatactggagcagcaaaaacacacggacaacgatgataaagcagatgccggtccacaagcagctaccacaacaacgcatggggaggcagtacgtgagaaaatattggatcaacaaaagcgcacggacgatgatgataaagcagctgtcggtcagcaaacaatcccaacagcaacaaaaacacatggtgagacgttaaaagaaaaaatatcgcaagagcagaagcacctagttgacgataagtcaaattctgccaatgcaaaacaagatgatggtagcggtactgatgagaaaatcgcgcatggtcaaacgctaattgcccgacttaaacagagcgaggagcagaaaaaagaatggggggacccatcccaagataatgatgatgatgggcgagcgccgaagcatggagaaatgctgtggaaactgttgcgatcaacggtgccgactaaccaacagcaaatgggcgatgtcatccaccaccaatttgctgatgctgaacaaacccgtggacgaggtactgatggagctgttgaaaaacattttagaagaaaaaactgacactgcggatgcacgagcgaaattatcaccatctacggaaatcggcctatctttcttcaacactgcgaagaggtgaagcgtgaaggaactgattaaaaa

SEQ ID NO: 22821 - DNA, 2167 bp, Heterodera glycines
tttttgatgagtttgtccacctccggcgcactcaccccttctatgatgcgatagtgcggcgccaactcgtccagccatcctgggcgtacaatgctcaccgtatgcagaaagcggcggtcggagtggtcgcgttggaccgcctcgttgaacagcacccaggccggcttctgattgctgtactgtttgttgcccttgaatattggggggggggggcttaattagattaattagtgcgttcaatcaaaaatataaaaatgctatttgtttaattggatacgcaatcccattcaaatttctcttttatttatttttttttacctttaaataacaaaaacaatctttggcaaaatttttgcttttttaaataaaaaaaatattttttatttaaatttcgggaaagaaaatgtggtattttccgttttgggcttacacctcaaaattaaaaaaaatgtcaacaaagggcgcttaagggacaatttgtattaaataacccaattaaaaatcccgttaaataagctaattgaagaaagcaaacaggcaatcattagccggattatttcgtatttaaaaaaaaatcattagcgtccataatttaattgcattatttttctaatggctccgaatgttcgaatttgatgagtcatccttttttgtttttgtttgtggtgccaccttatacaacacagaagagccgtgcagcatgtattcgtcagtgacagcattttgcttcccatttctattcagttggctttccaccgtcacataataacctttgcgcgcctgagacgtgtggccggtgccagaagaatagaaatatgccaacttaaaagtaacaaaatgcattttttacgaatgccatctccaaacgaattggtttttgtttcgttgatgtaaacaaaaaaatgaaaatatttttggcattttttcatttttaaaaactaatttattcaaaatttgcccataaaatttcattaacttgagaaccctgtctaagatggatttccaatttcaaaaagctttcactcactttcatgaacgaagcggcgagcaaagccttcaaaatgttgtgggggtaaagcggcgaagtcggcttcaaactttcaagctaacaaaacggcatttgaaaataaaaatataaaacatttcattcacttggatgttgagtctttggatcatcgcattggccaattggttgcgaacatcgccggcgtattgcaaagttcggaagttcagaaaattcgcataacaccattcttccttggaactatctaaaagagagcatagaaaagcaaaaagtcaaatacagtagcagaagggataaggtgctatgacgaagcgaaaaaagtatgcgtgtggggcgatcggagggggtgggtcatttcagtacggaagagttgttctaatgatcaattaattatttaaatttttaatctattaattagatttgttaccataattataattctattattctctatttcagtttacacgaccacaaaaaaagacacgaccatgttatattttgataaatttcaggcaacataactttttatagaagcacacaattaaacattcttgacatcttttgatagacctgagagcgcactaattcggtgtctgctacgattttttagagatgccgcgggattaaattcgggatcccgacctcgagatccgtcccgattacttttccaaaatcttctggatttggacgggatcccgactcggggttcctccgaccccaatcggccggtcactactttatataaagaatttgatgatttcaaaatttcgggaagcttattttgggctagtaagaatgatagccattttcagcgtgggttgaagcttatagtaagaagttttcttattttccattttagcattatttgctatataagaacccatttttataatttcgaaactgcattagcataaaatttttttgaatccaaaatttaattttaaaatttcaagtatttcgagcatttcttagaatatcgaaatttaggcctcaaatttcgaatcttatatcaatttaatttgagaaatttacgccgtattttgccatttttgttaatatttgtacataggttaacaccaattcatttttgaattttgatttatgaattattatccttatccgagctctaagaataatgaaata

SEQ ID NO: 22822 - DNA, 2805 bp, Heterodera glycines
  unsure (1)..(2805): unsure at all n locations
gcctcgcggnccaaaaagncgcgcaaagcctcgtcttttgtggcgggcaatccgtcgctgttgctgggctcgtgcaattcgtccactgagtcggttgagtaagagaaggtcactttgccggacgggtggacaattttggactaaaaagtgagaaatgtgaccacttctagagcatgcttttgttaacaataagccatctcacatttaaagccattccttgctgggagaatttcttacgtgccaactcttccaccgtaattttgtcgtcgtcatcttttcctgtaaattacagtaaaaaaatgaaggaaatagaaaccggaaattttgaaaattttcttaacaaattcattaaaaatccaaaaaatttccccggcggcgcctggcggcaccgccgaaccccaaaattcctatttttcttaaaaaattggttcaaaatcgcaaaaattggccattttttggtgaaaatctgttaacaaatcacacccaaagatcaaaaatttcccggcggcgcctagtggcaccgccggcccccctgttcccgaaaagttttttggaaaaagcgcgccgaaagaaacggtttttgaaaagcaaaataaaggtcatcggcggccgaccccccttcgcaaaaatttttaccgacccacccccctttttaatgtatggctgtcgcccaccaacattttaaatgccctgctttttgaatttgacttcttccctccccattttgctttcagcaggccttgaacatttccgagaaggaccgcgtctgcaattttctcgagaatgagctgcaaaagcggatgaaggcaaaagcacccgccgctttggacgccgccgcgctcagagatcagcagactttggacattttgaacaagcgttttgtgcgtgacgatttgccgttgtcgagttgccgggacacagccacaaccgccgaattgatcgccgcctataggaaaatgccgaaattcgacgaaccgcgcaattcgcgacccgtctcaagcgcgtcggaaatggacctggcgtaacgcattttctcattcattaataaggcattgagtcggtccaatttctgttttttggtgccgtggcaccaatcatgaataaaaaaaaagccaaacttagcccgattattcactcgctttgaatacaatcggcacacccatttaattcagttcctcctcacgcagcaaattggcatttgagcggggcaaggacaaactgaacttttattgtgtgccgttcggcgactgtttgacgctgcgactgaaagtttggaatgtggacacaatgcaaatgcgactgaaatgcgaaataacggacgaaacgggggcaacgcgacagtcaaactttaaggtctgtcacccgccgggaaatggtcgtcccccctcccacgccaactaagaaatgtcgagaaaaaaaaattttaaagaaaattttcagcgattttttggaaacatttttggaaaatatcgttatttttctaattttccgaacaggaaacgatacaggagggagacgtattcgtcataaattctttgttaatttcctccgttttatcggcggcactttctctaatatgcaaattttataaaagtagctgcttaataagtatagactgttttgagaaagtctcccaccgaacgccggtttcgtttaccatggatttttttcaaaaaatttatttaaaatttaaaaaaactgctccaagtttaccatttgttagattgtggaagtcactgcgccaataatggagcccggcggacagtgtgaaatcgctgtgcaataccaaccgaccaaagtggagaccaattttgcgcatttggtgctggagcggacaaattgtgaacacttcaagaagagtgtgcgttttttgggggaccaatacaaaaaattttggaaaacaaaatttgggagagaatttttcaaaaatgtcgcgtttttgcattgtttgtgccacctttttcagttccaactcatcggccacgggggcagcgcctgcgttggactgtccgcctcaaattacgaggatggcattgccaaaaaggcggcttcgagtcaggcaattgtgctgcggccggacgaccccaaccatttttggttggagtttgaaaatcggggccaaaggtggctttattccttggcattccccggggaaatggcttatttggtccaattttaggccgggctatgtcaaattggtggccacaaatcgtttcggaaaggcaatccccggtgatcagatcaacataaagcccaatcaattcgtgctcaatgcctccggccttggcggcgatggcaaagtacaaaaacaaaatcttcgggtcagtttttcaatttatgcattacaatgtttgaaatttgttcatttttcaaatttattgcttttttgcattatttaaatggtcccaccttccatatctcttccgttctaaaattataaaaaatcttcgaatttttttataagaaaatttaaagaaaaaatatagtaattgcaaaattttctggcgatctttccaaaatttaatgaattctaacaacacgtttttttcaaaaaaattattttgaaattttcataaatttttttttataaaacttagaaatttaaatttcgtggggaaatggcggggccgggaatggaatccacccttatttaaatgtctttttgtgctgcaaaatctgtcattttttctcgtgggtttcatatttttcggtctttatttatttttaattttctcatttttttgcacgttttgtcacctagagcgaatttcatttacctcccaattaattttaaaaatttcgagt

SEQ ID NO: 22823 - DNA, 1524 bp, Heterodera glycines
cagacaaaaaagagagagagagaagcgccaattaattggacaggtttgggagaataattagtaaaataatatcgttactttacttaatgattttatataaaattaaaaagaatacaaaaaataaaaattgttttgtatgagtgagagccgaaagaagcaacaaaaaaggaatgttttgagcaaattgcgaggaagaaagatcaatggaaaagagcgacaaagaaaagccgaagagcgaagaaaagaaaagagagggcaagccgagggaaagagagaaagagaaagagaaagaagagaaaatgagaaaaaggaaaagggagggggggggggaaggaactgctgggcccggacagttcagtatcagacagtcccaatttggcgatagtcttccttcccacaaataaatattatggatatttattttccacaattgttttccttaaatttcggaggggggaaaggggagggccaacaatttgttcaaattttcgtttggttttgccgtacctttgctccaccgattcttttcatgctaatacaaatacaattgttgttcataataattttttaataattttcattttttggctctttctctttttgtcctttagttttgtttggatttctatcaccaaaacacggcaatttttaataaatcattttttgccattttaaaattaatgaataaaaaatcgaaaaacaaattgtattaccacttttagactcttttaacatttagcaatgaaataatgtaagttgagctttggcacataaaagaaagattaaaacagaagagaaacgtggcaaatgccgcatttccacagcaaaatgggaaaaagtaaccattgttttgtttcttttttttctccgtttttccttttcttttcacttttatctgactgatagaattaagcgaattaaacaaaggaattgccgcgggcgataactgcccaaagcatttgctgaaaagcgcattaatgaaaagaaaagcaaatcgatcggagaatcgcccaaatcatttgatttttggacaagcgtaacaaaatggcaaaaattggaacccaataaaaacccaaaagtgatcaattaacaaaggaaagctttaaaatactcaccggaaaagttcagtgtcattcatcatctcaatttctgacccgtcgacttcttcaatggatgggttcatagcttcggattgtgtggttttgagcagtgtcaattattcgttgtgcttcggtggggcagagattttgttggtggggggcgaccgtttgatccgtcaaatgaatgagcaattgacaaaagggcgattaattaattaattagcagcgcgaagaataggcgagggaatgtgtgcgtggagggagtagcactcgtattcagcaattcccgaaaagagctcaacaaatcaactgaaaaagaatcaaaaagaatcatttttaaacggcaaaaataaaagggaaaacacaaataattttgtttgttaaagtgagctttttaaacattttaaagggcgaattgagacat

SEQ ID NO: 22824 - DNA, 1374 bp, Heterodera glycines
  unsure (1)..(1374): unsure at all n locations
cgaattaaantttcagnnattctgtttagggaatcaaactacttttatgctatcaaaaggaattttgcaaacttttgtcaggggtttcaagttatttgagacttttttagccattttgagaccaaatttttggccaaactataaaatttaggacctgagctaggaattttttcatttaatactttcaagttgccaattcagaccattctttttgggattcttcacttaactttggctaaaaaggctttcaattttatttagttattttttaatatcattttttatccaattgctctcattattccctttttccataaatttctatttaattaaatgctcaaaattgtttctgtttgtttccaggccaaacatttcgacccgtgcagtgcgttgcttgtccatctcgtcgccgtgctcgcccagtacaacgaacgggttcagcaactgatgttgcgcagcaccgcctttctgccccactgtttggacatcgctgtggacaatgaacgttccgtggttcgttttaaaaaaaaaaacctaacatttttttagcccgcttttcaatctgccattttaaaagtgccacaaataaaatttttttttttttgtaggaatatcggcacaaatgcgtgggcgccatctccgcaatggtcaaggcctatctgccggcactgatgtatgtcagccgccggtgtttcggtcctctcccaccccgaaaaatttttctaaaaaaattcataaaaaaaaatcgctggaaattttttttccaaattttacttcaaattttctaagtcccgacactcgttaattgcagtcgcttcgtggagcttgacgggcccgcccggctgatgcgctgttttgaggacggtgtccaaatgggcgcggcgcccgagggcagcggcgtccgcacaaagttggcccaccggtgcgctgtggcggcggtcgcgttgaagcgcagtttttccgtcgaaggtgggcggaaaagacctgctccggcctcaaacagtgaccagcggacccaaattttatagtgccaattttatagcccgtttcccaacaaagctttttctcgcgcatgcgttcgattcccacccaattcctgcatatttttttcaaacttgcaagaattttgcaaaattatttgcaattctcgaatgaacaatcagaatttgatttcagtgctgaatgccaacccgagctttcgccgtgtggcccaatgtccggccgaaatgcgtgccgtgttgtcaaatgtgaatgaagacggcaaatggaacgacacacttgaatttttggcagaataaatttgtgttttctttttcacttaggatttgttttactgttttttgccatagagttcaattgtaggttaaaattata

SEQ ID NO: 22825 - DNA, 990 bp, Heterodera glycines
tttatgaggtacaaagagacccctatcaatcatagcaaaaaggactccgcgtttgacaatgtgtggaatccatgaaagagcatggcatagcgtgtgggtgatttggagcttcaaattaatgaccgactatttttatgaggtacaaagagaaccctagcaatcaaaggcagaaggactccgcgtttgacaatgtgtggaatccattgaagagcatggcatagcgtgtgggggatttggagcttcaaatttatgaccgactatttttatgaggtacaaagagaaccctagcaatcataggcagaaggactccgcgtttgacaatgtgtggaatccattgaagagcatggcatagcgtgtgggggatttggagcttcaaatttatgaccgactatttttatcaggtacaaagagaaccctatcaatcaaaggcagaaggactccgcttttgacaatgtgtggaatccattgaagagcatggcatagcgtgtgggggatttggagcttcaaatttatgaccgactatttttatcaggtacaaagagaaccctatcaatcaaaggcagaaggactccgcttttgacaatgtgtggaatccattgaagagcatggcatagcgtgtgggggatttggagtttcaaatttatgaccgactatttttatgaggtacaaagagaaccctagcaatcaaaggcagaaggactccgcttttgacaatgtgtggaatccattgaagagcatggcatagcgtgtgggggatttggagtttcaaatttatgaccgactatttttatgaggtacaaagagaaccctagcaatcaaaggcagaaggactccgcgtttgacaatgtgtggaatccattgaagagcatggcatagcgtgtgggtgatttggagcttcaaattaatgaccgactatttttatgaggtacaaagagaaccctagcaatcaaaggcagaaggactccgcgtttgacaatgttggaatccatt

SEQ ID NO: 22826 - DNA, 2020 bp, Heterodera glycines
ggaggggaccggcggaaaggaggggacggggcagcacttggaggaagaggcacaacttcggcaaattggcccaacaaccgacacaacgccaagagatgccgaacagacggagatgagttttgttggcaaagtggacacattggactagaagattgggccggaggcgaagcggctgcaaattctgttggaactcacgcacaaccggcacaacagggcgaatctgaacgcaaaacagctgcacgtggtcaatgaaatgttcaacttgttcatgtacaatcacgcatttgttgtttgcctttcattcattcgttattattctttggcaggtcgcggtgtcttaaagttgtggccacaaacagccaattgctgaacacgctggccaacccggaaccgttgctgccaaagaggaaggccaaccaacagggcacggaaaaggggggcagcattgctagaatggcccaacaattgtccgtttggctcagagtgtctgccaaatacgtcgacgaattgccccctcaatgccgccaagaggaaaagctgaggaaaaccgcacaaattgcacggcaattcagcgaacagcaaaaccaaatgagccaaataaacgaatggtaaggcaaaaaaaaaaatgaaaagtggacaaaaggaaaaaacgaaacaatgtcaggcgaaattaactggggaagaggaatgccaattggaagcattggagggacaaatggtcgaactgttgggccgaattgacacggagagacgggaagcagagaagagtgaaaggcaaagtgccaccagcagacaggtaaaagattaaagcgatgaaaataggtgccaattgggaggaaattaaaaaaaaaattttttcgaatcatcaacaatttcttaattttttttgaaaatttcttaaattttctggggtaaaaccctgcttcctaattaagtaattatcatatggaccatatccataactagaaaacaatagaaaatttaaaaagatttgatgacataaaacaataaggttttttggggccggcggtggataaacgccgcagggcagggccaaaaaataaaaattctggcgcgagtggtggcaccagctggcgaagcgataactttttttgctcttcgacctcaacacttttctgcagttaattttccaaaatttaactgagctgcaggagaaatcgttactctttttaacaaatttttgataaaaagccattttttattaaagagatttttagataaatagggttaagcgtcgcgcggtgcagtttttcatttcgggagaggggggacccacttaaatttttctaaatttcctaagcccgaagtctcgccccaccaactggtcgccgtagtcaagtgcgctggtttttagcgcaataggcaaaaattaattttccaaataaaactttaaattcccattttcttcttttgcttttctgtaaaaagatgagtcaatttcaatttcgggatttttttaaaaatgaaataaaaagtccactaagaattaaaaattagtttttatggatttttttatataacaccctttttgatggtttttatgtaacgacataaatggttaaaaatgtgggatcacctcacaagagggggggggggggatctgccaagatgaagtggggaaaggggaaaacttgaaattcaaacaactttttttaaacaaatgcattaaaaaccagaataaattctcggcgcacgaccataaaattcgccccctaaagaaatgtatcaacaaattttcgcattgaattaatgtcgataagaaccgtccgtgccaccatttcgcaaatattttggtcgaccctcccccaccccttgctcatgtatggtgataacaaattgggagaattgtggcaaatgatagcgctgaggaaaggttaaaattgtaatttcatctcctctattcaaatttaccaaaaaagtatctacaaaattcaaattttattgccaaaaatcccttattttttgatctaagcaagaaaaatgcaaaatcaacacgatg

SEQ ID NO: 22827 - DNA, 803 bp, Heterodera glycines
ctgtgccgagaaccggcaggcaatggatggctttaaatctgcaagaaattagattggcaataagaggttgtaaaaaacttttggtaaggaattattttttgaagtgagtcaaacaccctattagtgctttgctgtgccgacaaccggcaggcaattgatggctttaaatctgcaagaaattagattggcaataagtggttgtaaaaaacttttgggtaaggaattattttttgaagtgcttcaaacaccctattagtgctttgctgtgccgagaactggcaggcaattgatggctttcaatctgcaagaaattagattggaaatatgtggttgtaaaaaacttttgggtaaggaattattttttgaagtgagtcaaacaccctataagtgctttgctgtgccgagaaccggcaggcaattgatggctttcattctgcaagaaattagattggcaataaattgttgtaaaaaacttttgggtaaggaattattttttgaagtgaatcaaacaccctattagtgctttgctgtgccgagaaccggcaggcaattgatggctttcaatctgcaagaaattagattggcaataaattgttgtaataaacttttgggtatggaattattttttgaagtgagtcaaacaccctattagtgctttgctgtgccgagaaccggcaggcaattgatggctttcaatctgcaagaaattagattggaaataaattgttgtaaaaaacttttgggtaaggaattattttttgaagtgcttcaaacaccctattagtgctttgctgtgccgagaa

SEQ ID NO: 22828 - DNA, 907 bp, Heterodera glycines
  unsure (1)..(907): unsure at all n locations
agaaaatttattaaaaatttcaataattttcctcgtttctccctttaccggcgacccactccccgaaagggtaatccttaacagtgtaaaaatttctccttttctgagactaaaaacccgagaccgggaaccgagaccgggaagcgaaaacccgagaaatttcccgaatcgggaaccgagactctcgcacatccctactgccaatggacgacgctatgtttggcatgcatttgctcgtcaattgtttaggcatttctccatgccacaacttcgaccagttatacaattaccatttttatttcactgaatgaatcaacgtcaattattgttgagccattcgaattggtgaacgaacgaaccagggaaaagctggcatttatgaagaaaaaacgcaattttaatagttggattttgaaaagatgccaaatttttgaagaggcaggcgacgacagtttgccagaaagatgaaaatttgaacaatttaaacaatgtccacttttatttgagtgcccacagatattgcattggatgagcaatggcaattcttttgttattaaattctcagtaattatgtactaaataattttgaaaatttttaattctatttggggcattaaaaaagtttccacaaaataattctcaaaaattgctaattctgtgcgaaaaattcaaaaaatatagaaaatccgaaaatatgtaaatgaaagtcccaagtttttgttcgcaaacaaaaaagtgtttttcttaactcttcagggcatttgagaatccaagaccnaaatatatatttatatgaaatttgcagctctattcataaaaatttggaaaatttctagttgagatttttaatttcaaaaccccttaatttggtaacaaacataaaaaacaacttttttgtcgcattttt

SEQ ID NO: 22829 - DNA, 1077 bp, Heterodera glycines
  unsure (1)..(1077): unsure at all n locations
aaaaaattgttaaaaatctgatttttggtcccgatgcagtttacaatttcctaattgttaaaaatgataataggaggcgaaaatgcaaaaattgacattaattgattaaattataaaaaaaaatatttaaaactatgttgttaaatgttctaatttttgaccctaaagtctgactttttaagcatgatatctataattttgcaaaacaaaattctataaaaacctgatataattaccattccctatttttcacaatagaattgatcaattataaatattagataagcattgaacaaaacttagcacaaaattaaaaaaaaaattgggttttagcaagtcccgataatcccgcgggatcccgaaaaaaaatcttcggggttgatcgggattcggtcgggatcccgattcgggatccgtcccgatcgtttttccaaaatgttcgggattgatcgggatcgggattcagtcgggatcccgactcgggatccctccgaccccagttgtccggtctctaatgcaaattcacaagcattttgcagaattaccacatcaattttgaattaaatagcgaatttaaatgagaggaaaaactattaattacttttttaacttttttttattttaaatttaaaaaaaagttaagtatctgtctcgagaagttgttatttacggattctcgactctctgcggtcaaatgaatatttttcgtcggaaagaatccttaaaattaatggacaaaaatgaatattaaaaaagaccagggtataaaactgaccattaaacaatctcaaattagccaacaatttcgcaattataatcacttcgcagaaacagccaatnntttcgcnnttntnnttcncttcgcngnntttgncggtngggncnnttgcccgtgcnnnnnttnnnttnnntgtttttnttgntnnntnnnnttnnttgngcngtcnggnnnntnttcnnntttncgcnnnnnggcnccatnncnnttctctttctctncttcctctntgttttnnnnctngngcncnnttntttttggntnnttggtaaaaggcagggatggnctttcgctttcgg

SEQ ID NO: 22830 - DNA, 1997 bp, Heterodera glycines
ccccccccccccccctcaaaggatgcttcgaaagtttcttcgtcctccgttctttgctcaccgtaacggtcgacgagttcaatttgtcgctgctgcgtcagcacggagtgcccgaggccactgttaagtcggtgtttttgtttctccttgcgatttggcatttttggaggggtgggcataaaaataggaaatttgctatgccaataaccccaattcaataacttccatttctgttttctttcacagtttttatgcccaatttccgtcggaatggcgtcagaatgaaacggagaatcttttgctggggatgcttctgctgttcgacgtggaagtggccgatctgaagtgtgccatttccatcactgtggagaatatgaaattccaatccattctgaagcggtctgtctgttcttttttaaaacaacagcaaatgctttcctttctcttctgctgttgatctttaatcattttattgtttttatcatttttccctcattcctctgatcacttttcctctcttttcgctcatctgatcagtttctctcctcttctcttcaggttgctgtttgtcctctgtgagcgcgactcgggccgtgccgatgctgccaatgtcgagctgctttcccgcctcgacttactcaagcaaatctttccgggccccgctggttccggcactctctcctccgccccctgtatggtctctctgccgatgagtgccgctaccgccccgcttcttttgcctccagtgtccgtcactaattccgaaaacaatggcacaattgcgcaaatggtcgaaattgcgcgaacaaatgtcgcctgacggatgagcgacggagccaccagccgaacgaagcgccgcttccgattgctttttgggtttttgtgtttgtgatagaatgttgtaccgattcaaaaactgatcagttatctgtctgtctgtcattattcgacttctctctccccaaattttaccatttttaatttacaaaattttatggcatattatttatcagaagtattctccaaattgcattgtcaagatcaaaaattcgcttgcctttggcaattcccttggcaatttggcaaatgattttttaatttttcattcttttcattttgttatttatttgttccgtcttcccaaaatgcctatgttaggccattcattcattcgccgtccaataattttcgctttttgcccttcggcacggattactgtatcacatgccccattaaacaccgtatctctcttttttctttctttaatttatttttatttttgctattggaaatgaatgtttttctccgatttggtgggattttaaggcgaaaggcaataaatttactctctttgagtgttctgtttgctcgtcgttctgtccattcgctcaccaatttctgatcggctgtgatcgatcgatgctaatcaccgtcttctactgtctgatcaaatattccgttcattctttcctaccgtatccttgccaccgtacccccccccccaccttccgtccattttttttttttaaattctaaatggaaacaaagtaattcttggtaagttgacgaggtaaatgaataaagagaaataaaagttatttatttatctgttgagtcattttaatgcgaattggcaaacaaaggaaaatgccaaagggtaatgcaattacagggaaaatggccaaatgaaatgaacacaattaaatttcgcattacttttgctgtgtccgcaactccgccgcattcattggcacaatttcacgaggacagaaaactgacggaaagagttggcattatttaagcgagaatggcacttaccgaagaaacaaccaaagaacaaacgaatgacaaatctgcccttactttttgtccttttcaatttgtgttcatttgtcatatagattaatttgtgattcatttgaatttcggcaggtgtttttcgtccctcgcccttccctaattctttagccaccctctgctcaattcgttttgtgctc

SEQ ID NO: 22831 - DNA, 939 bp, Heterodera glycines
cgcagaattaaagtacaggctatagggaagctattcccgaaggattcggtctccccataaatctgggcgcatcggttcggggggactgccccgaaaacaaaaaaatcgattttttcaagtgtccgtttggggtactcaaacaattatggggagcaaaaatccaacgcagaattaaagtacaggctatagggaagctattcccgaaggattcggtctccccataaatctgggcgcatcggttcggggggactgccccgaaaacaaaaaaatcgattttttcaagtgtccgtttggggtactcaaacaattatggggagcaaaaatccaacgcagaattaaagtacaggctatagggaagctattcccgaaggattcggtctccccataaatctgggcgcatcggttcggggggactgccccgaaaacaaaaaaatcgattttttcaagtgtccgtttggggtactcaaacaattatggggagcaaaaatccaacgcagaattaaagtacaggctatagggaagctattcccgaaggattcggtctccccataaatctgggcgcatcggttcggggggactgccccgaaaacaaaaaaatcgattttttcaagtgtccgtttggggtactcaaacaattatggggagcaaaaatccaacgcagaattaaagtacaggctatagggaagctattccggaaagattcggtctccccataaatctgggcgcatcggttcggggggactgccccgaaaacaaaaaaatcgattttttcaagtgtccgtttggggtactcaaacaattatggggagcaaaaatccaacgcagaattaaaagtacaggctatagggaagctattccggaaaggattcggtctccccataaatctgggcgcatcgggtttcggggggactgcccccgaaacaaaaaaatcgatttttt

SEQ ID NO: 22832 - DNA, 1411 bp, Heterodera glycines
actagagaccggcgcgggattttgcgggatctcagaccgcaatcccgcattttttggaaattgcgggatttgctgggatttatacctgcgggatcccgtcccgcaaaatttttcagtaccaatctcgcagatccgcaaatttgaaatttccggtctctagacggtaccattttcctagagacattttttctattagccaaacccaaattgcgattttcatacatattttatggctgtattccatttttatatccattttattacatgccctaacaattatcgttcatttgtcatttcccaataatccattcactttttcttccgctggcccgggactcattttcaaagaatatttgcgttcattttgcccgccttttgcacagacaatggcctaaatgaaataaaatttaaatctgatgaacgctttaaccgtggttggtcgattcctaaaaaagtgtaaaaatcaaaaaactgatttttcctataaaaaattaaaaacaaattcttctaaaagttttttctcgaataaaaataaccaagaaatttagcttgagttgaagcggatacatttctgtataaatattatcattttttattcaatttaagttcattttttaatttagtccatttgtaattgaactttaaaacattttaaaaaaatcaaagtcgtccggttaatattttatttaaggcaaatttaattattttattcgagatctaaaaaaattttaaaagaacgtatatttaagcattaatttaattaaattttaacatatttataattaaaaaattgattaaaaaatcataggaaaaatctgacttttgatttttgcacttttaagaattgacatagcaccactttagcaatggcaaaagctgttctcactcacccaatgtaatctgcataaagcataaagttgacattgttcaaattgtccgccaaattttgctcctcccactgaacaatttgcccaatttggcatcgcttcatcacccaataataatctgtttctttgctcagtgtcagcttttgattgattcggttgttcaccagtgcaaatggcacaattggcgttgacgggtacagcagaaaatgaacaatgaaattcactgaagtgttggcaccgataaatttctaaacaaaaaccaaaatgcaattaggtaggtaattgttttttggcgaagtgtgtggcccgccggaccgtacttctttgaaatcgttgatccattttatgtttcttgatatatcagtgtctgtacaacgcaatcgcttcggctgtccatcttttgtcggagtgtgcaaccatttggacaccactttccgagcagttgcatttttatctgtcagcagataaaattcgaagttacaagattcgattgaattaatgtccaagtcgaatagaattgttgg

SEQ ID NO: 22833 - DNA, 1657 bp, Heterodera glycines
  unsure (1)..(1657): unsure at all n locations
aggtctatatgggtttaaataaacagttcccgtctttttttgtagcatttgctgaacaatacttcttcgtcttcgtcttcttctgccgatgatgggccatcgtcgtcgtcgtctccgtcttctgtttctgctgccgacaacaccaacaaaacgccaacatcatcatcttcgccatcgccaattcgtttctgcatccgattgaccgtcaacgattggggtgagccggtgcagcggttgccgttccgttggctcggcagttcgctcagcggacagtgtgtggtgttggtggagcgtcggccggtggacaacctgaacgtggagctgtgcattgtgcgatgtccgtacatggaggcggtgcagcgcgggctcatggacaacgcggtgacaatgaacgacttggaggcaagttgatgcatcggacagatattgagcagagaactttgcaaaatgtcgatggaaatcatggacaaaaattgagagcagctcgtttccactcgaaatttttttttcaaaaaaatctagaaattaaaaaaaaaatatttaaatttgggagccaaatgcgcaaaaatgtctcaaatacgtctatctttcattttatccccggtcgggtacggaaatgaaatacgagtttacgcaggggcgtagcaagacccttggcttcggtgggggggggctgaattaaaaaattcgatttttagagatgcatttttctttttcttttttataaatcccgaattcgaggggtgcattttacaggaatttgtagccttttttcgtcaaaaaattaccatttttgccatttgtggtccattttaaaaatatggtaaaataggatccggcgatgcacacaggcgccgccaggaaaatttttgaaaatttgggtgtgctttgttaagggggttgtttaaaatttcaaaaaatttatccctcccaaaaaaatgttttagtgaacataatttagcaatgtctaatttgtcacatcatttcattgcagacaagctttgaatgggcggagccgctgtgtacggtggatgtgatgcaccgttcggccagtgccgaggacggcaacgacgatcaccaagcgttgaacgagccgcccgccatcgcaacaccatttctccactttttctgatcacagccactcactaactctgccccctggcatttgttgtgtgtgtttctctgctacttaatggtttggatgatgacgaaattggaggccaaccaacttttgatcatgatcatgattttaagccccccaccaatcacaccactaattttcacattgtattctctttttcgtttatacataattactgggagacaaaaaaaaacaataatacacacaataattaagagtttcatgaagtgtgtgtgatcacggatgtgcggttgccgcgcactgaaaaattgaatgggggagaattggcatttttacagttaattaaaatttcttttttgatagggcacaaatttaccgaaaagcattggtggcatgtcccgggagagcagctccagccacatgccatacacaggcgacaggacaatgttggcagtggcaaatggcatcgagctatttaattgngaaacaaatggaggatgngtcattaaaactggcattttttgnggagtatttttgggcactgccacgaatttt

SEQ ID NO: 22834 - DNA, 903 bp, Heterodera glycines
cccggtcagctaatgaatcgagaattttagtaatattttggttagtgccccgctctttttaaagtttttgtttgttttgtttttaagtgtcatgaaaaacatgttaacgtaggtattcggggtttctgatcagaaatcgcatccatttggacctattcgaaccatggactctcggattggaataaaattcgaaaatgcatcaatttctcattttgtggcaaatcaaaatgcacacttacgtttcttgataaagctttccctcgtcataatcctcagaaattacatgcactgaagcgaaatgaatgctggaaaaggtaaattttagaaaattctacagtcagacaaaagcataagtaccgaaattttttcaacatttccactaatttctgatgcacatcatctgggttcagttttgaacaaatggtgaaaatgcgcaatttggcattctgttgaaaatataatttaaaaattggcacaaaaagttgatcaaaatgccgtattcttaaaactgcctgataacttgttgggaagctgcgtgctcgatagagaaaaattgtatgatacagtacgcttatataagaaattgcttcactcaatttgggttaggagaggaatacggtatcatatagagtacccttgaaagggtggaacaattacaatttctgatagttgaaactgcgtgctctacagagaaaatactttttaatatgtacagtattcttattcataagaggaatacggtatcacacagtacccctcaaaaagcagaacaattacaatttaagataatcaccggaaggtatgtgttgtgttccctcaacagatgtgaaaggagcagtaccaatccaccatcgtcgtacagccaccaaacgtcgacaaaacctttgggattttcaaaaaaaa

SEQ ID NO: 22835 - DNA, 763 bp, Heterodera glycines
ctagagccgtaaaaaatataaatcaacaacccgaataaacaaaataattgcggtcagagttccacctcccaccttctattcgtacatccgtttgtttttatgccgtaggttgagccgaagtgttgcctggtaaataattttttacagcgattttaaaactgaaaatttttggtttctaaattttttgtaattttcagtttttctaataaaaaaacaaacattataatcgactcgttaaatttattttaacaaaaaaaagaaaacaagaaaaacattttttaattctcatgcggggttaaatgttggtgctcacacattttttgaaaaaaatttttctaataaaaaattctcgaatccaataatttttacctccctcgcccaccgtcgggtctaaattttttttttttttgcaagtttagtgaaccataactttttcaagaagcacccaaattaaacattcttaatatcattcgatagcactaagaatcctctatcagcctgcaaaatttcaaaaaattccgttgggtttcaaaaaatatatgaccaaaaatgtttaggaaaccaactttttgaaattttcaggccatatagtttttgaaacccaacgaaattttttgaaattttgcaggctgatagagaattcttagggctatcgaatgatattgagaatgtttaatttgggtgcttcttgaaaaagttatggttcactaacttgtaaaaaaatttatggtcgtgtctttttttatggtcgtgtgaaactgca

SEQ ID NO: 22836 - DNA, 1281 bp, Heterodera glycines
aagaattatacaccttaacatattatcttttaattctataacttgcaacattgtaccattacaaagaccattttcaatacttatgtttcgcataagcattactttacaattttgttttaattttaattcatgcaatggaaaaccgggagaattgaaagagttcattatttctggtgtaattggaaaattattgcttgtttcaacttcatcaatactaagataagtaacgcattttcctgggaatttatccaaagctatttcattataattatcggtcaaattgttgtatggggttagaattatatgattttttaattcattaaaattatgctttaaaaaaatgtcaccgtaaatttcatcgattaaatcagattcatttgataaaatacactccggaggtaattgaatgaagctgtttggactaactccatcgcctatatcaagaatttgttttgcaaatatgtccttggctcggatatttatagttaatttcaattgctcaaaattgttccataaaacagattttttgattgttagatcaacaatttcactttttactgcaaatttttttattggtaaggtctgtctaaaatcaccagcaagaataatagtttttccaccaaataataggttacatttagttaattcacgtaattttttatcaataacgtcaagtgcaaatcgtggtgtcataggagcttcatcaatcacaaaaaaatcactgtttattatttcttcggcagcctttgtgccttggacaacaccggaaacagtctgagcatttaaatttagcggaaatttaaatcgattgtgtattgttcttccactttttaataaagttgaagcgattcctgagaaagccatgtttgttatttgtttttattaccacgaattaaatgataaagcgcatttagtgtaaatgatttacctgttccgccaggtccatcaatataaattaatttttgttttatctctcctgttactaccttttttattgtttcatagattaatctttgatcactattcattaatttgtataaatcatcagcaatttttttttcttcatcaaaatttatatttttaatgtcgtcataatctatgaccgtgtcttgaggcaactttttaaaatcagataacgatttaccttcttgtattaaatttctatttatacgtgaaagagctaatttataagcgatatgttcaggttttttagtcaaaaaatcttcagataaattatttaaaaggtgttcccataatttctttctgggtatttggatcacc

SEQ ID NO: 22837 - DNA, 993 bp, Heterodera glycines
  unsure (1)..(993): unsure at all n locations
aaatcagatactgtatccatttgcaattaggacaaccctttttctatacaaaaaactgggtttacggtcatacagcgaccgccatcgcctttatagaaagtggccataaaatcagttcgtttaaagagagaactgcactttattctcatattagccgtcagatgcccgacttagcttcaaaacagttaaagccacacattctctatcattatgaattttgatcgcctcacttcccggcaattcatggccgtaaaatgcgtttgaatttcacaacttttgccatcacatgcaacttgtgtttttattttcaacggcgtgttggcgttgtgaaataaatcagatactgtatccatttgcaattaggacaacccttttctatacaaaaaactgggtttacggtcatacagcgaccgccatcgcctttatagaaagtggccataaaatcagttcgtttaaagagagaactgcactttattctcatattagccgtcagatgcccgacttagcttcaaaacagttaaagccacacattctctatcattatgaattttgatcgcctcacttcccggcaattcatggccgtaaaatgcgtttgaatttcacaacttttgccatcacatgcaacttgtgtttttattttcaacggcgtgttggcgttgtgaaataaatcagatactgtatccatttgcaatttggacaacccttttctatacaaaaaactgggtttacggtcatacagcgaccgccatcgcctttatagaaagtggccataaaatcagttcgtttaaagagagaactgcactttattctcatattagccgtcagatccccgacttagcttcaaaacagttaaagccacacattctctatcattatgaattttgatcgcctcacttcccggcaattcatggccataaaatgcgtttgaatttcacaacttttgccatcacatgcaacttgtgtttttattttcaancggcgtgttggcgttgt

SEQ ID NO: 22838 - DNA, 1422 bp, Heterodera glycines
ttactggataaagaggaaggtccaaagcattccctccaccttcgttcacgcaaacatcgcgtgttgtggtctagcggtttcgtcacgcataaatcggcgtcatcttgatggcatcaatccggaagacctcaagctgggctcacttgtgacggtggttgttgccaacattccacaggattcacttgtatcaatgggatacattctgccgaattcttcaccgtacaaactgggaacggaaagaagagccgaaacacctgaatttttcggtgcagttgcgtgcattcgtcctcatctgttggagtggccgaatctgaatgcaaacatgacgcccaaggtttatccatgctccgcggagcttactaaacatcatgttgtggcgatggagcatgttgttggagcagctctccagattgagatggagcgagaggttgacatgatgattgaagcacgctttgaaggaagggctcggaagttcgatggtgctgattgtctgattgtctttggttcgagatcgaagaaagaagtgaatgagttggccaaggtctgggagccggagtcccaagtgaaggtcttcaaagaattgggtgagaagcattttgctttgggagtggtcaaggatgttgaggtgctccacgcagagtacgaaaagttggaactccacatcgtcatcttcttgaacaacatccaagaaaggaagaatgtcgacatcgcaagaaaagtggatgagttcatccagggtggcagtgttgtcatacacccggtccctgccactgcggttgaggacagactgttctgtttccgctgcaacgtcccatcaataattgctgatgaagactccccgaggggaaggataatggcagttctgctcggccgtccagccatggaaggcattcgaatggagaagcaaagcgttgacgactcaacggattcgtggatggaagaagaagggccgctccaccctgcaattcttgctctcaactcgcggcagagagtgactgcacgcctaatgttgggaggaggtctggtgcaacaacaggcgccgccaggcaccggcaaaaccaaagtcgctgcggcgatcattaaggcaatgatggactcaaatcccgggttccggattgtggtgatggcttgtgccaacattccagttgcaaagctggtacaagaggcggaaggcacatgtgctgaaaaggatttggatggagcacgagcgattgccttattttccggttttgccagatgcaaatacacggatcaaataagagatgtccaacgacacacgctgcccaataaagtaaactctgaggagttcgtcaagcagttatcgcccaatgtacagaagcaggtgaaggaataccttgctcattatgagaagaacccgcgcttggcgcctgagagagcgatcggaaaagtgtgcacctcatg

SEQ ID NO: 22839 - DNA, 1185 bp, Heterodera glycines
ggaccccctccgttccccaaaagtttttaggaaaaaccgccgcaaaaaaatagggtgaaaagcaaaaaaaaaaaaaggtcgtcgcccgggagggaggtaccccccccccaagccgaaatcctgggaccgtccctggtggggggggggggggggtcaactgggccccaggccggttttttgtgcgataacttctttcatagttgaccgaattgaatgaatttgataccattcgatagccctatatgttctctatttccctgccaaaactcgaaaaatttcgttaactttcaaaaaagttagggccaacaaacttcaaaaaattggtgtttccgaaaatttttgaattaattttttcccagtccggtaaacaccaaaacacagccgccgaaaacacagctgggacataacacagccggagataaatttttttaaaattttcaaacttagaatcttaagagaaattttctttgaaaattctatgagaaaaaaaattttcagcgcttttttttgaaacttttttgaaaattcttagaattcgtcattaaattttgaaaaatagtctaaaatttcgttatttgaatttttttttttttaatttattcccggtgtgttatgtctcggctgtgttttgtgctgttccgcacacagtcgtcccagcagttcgtttttaaaacttgtcatacatttagtgaattcttttgctgttctgttcaggtgctcggtctctacggaatgattgtctctctgctgctaagttcctcctgaacaatggaaggaagaaagaaggaaagaatggcacgtctgctgaacattgtgccgaccgtcgtgttgtgatgatcaaaatgaccagccaccgtatataatagataaataccgtattttccatccatttttttttactgtgcccccccccttttctcttttttactattacatttttacaacatttaaaaacttgggaaataactgcggtggttgattttttgtacaaagcagaaagtggcatatattagagaatatccgttatgggcgtcaagctcaaaggttacaaggaacccaaatgttgttttatacttatagacagcaacaaaataaagggatttgactgacaaagacattttctaacctttacaaatgaaagtttgggtaaaaattatccgtcaaattgattatttgattgattga

SEQ ID NO: 22840 - DNA, 1373 bp, Heterodera glycines
aagcgcccgtcttgaggctgcgatgaattgctaaattacatcaatttctagtgacgcggcgaagccgcgtccctgagcgcgaagcgctttccccacagcaacagaactcaattgataatgttttgtatgttttaaaataacaaatgagggccatatattaccaagccacgcatgcacaccatagccaactgggcaccctagtttatatatatatagaataatgttgcagttcgtagaaaaaattataagtccccgtggtttgcccggaggctcctgaaagtgcggcattgcttaagcaactttttgaggcgcatctgggaaaaataaggatttttcggtccggcggccagttgagcgccagcggcgctgaaacggccaaataaaaaaaatcgtcgcggttttcgggctgtaacttttctcagggaaccgggagcggaaaaagtccgctgagagggcacaccccagacatgttggctacaactttgtcactgatcactttttgatcagatcaaatgccgagcctgtagaaattggcgactgaacggcgctcaaaatgccggttttggcttttcgtgaataactcgctgggggttaagcggagcgggttggcgccgcttgagcatttgtgcagtttttaaagctgcatccgatggcgttttcagattttgaaaattttcaaaatttttcgagctaggccccctcgaaaatttttcgtttttgaattttattattttttgccgatttttcccaggaaaacggagaccactttcaagcaaccgtttttcgagctctatcgattggtggcatttttgaaaaaatttcaaaattttccggaaatagaaaaattttccggaattgagctccccatttccgtttgaggcttataactcgtcaggcgttgatcttagcggaaatttgtcttagagcatttttgtagagaattttaagctctatctaatgtgctttatctcatgtttttaccatgagtttaaaaaaagttataaaattaattgtgattttgaaactcaaaaccataggggggaccccatggatttgcatttcttgagaaatttttttgctcctaaaattgccaaaaaatacttttctggggtattttgaggtgctgaacacgaatatgcactttctattgcgttttggatttttcagagggtggtaaaaaaaattttgaaaattcaataatttttggcccttgaaaattcaacctaaattttaaaaattcataactcgcctcaaaatggtccaattcagctcatttaaagcataaaaaatagcaaaaaatcgggagaattttatgagatttatttgaaatttataccacaaaaacaaaaaaagttattcccagaaattctgga

SEQ ID NO: 22841 - DNA, 2248 bp, Heterodera glycines
  unsure (1)..(2248): unsure at all n locations
ttacaacaaatttaatttttcagggtcacatcgcttttctttccaaaccacaaaattgcctccgcctgcacctaaacaggtaaaaagacgcatttttcaaaattggcgtttttaatttgctcgaaattgcaggcgcccatcgttgctgagcaaatgcaggaccatttccaatttgagtggaactccgtccgcttcagagaccaaaacggcattggcaccggcggagaagagacgccgctggacggagagcagcagagaagcgaatttgtctaccgattgcaggtggtcgcttattttctggggattgaaattgttttgtacctacagtaaccctatcgtaatgacaaaatgcccacgcccgcttcatctaatccacaatttgccttacagtaaataagctgcttcctttagatggcacccaaagttggttcttcagtgaaggaaaaggccgcagtggaagtgtggaagaccatttttgaggatgtaagaattaaacaatatcagtcattatacactagtattaatcgttgcgatgcttcaccccttacaatgggagagaaaaaacaaaaccaaactttgcagaaactgactcaaacgccgccaatttacgttcacaacgcatcgcaacagccgcgccaagtccgtctttttgtggtgcaaagatttgttgatacaaatggaagaacaattggtaacaaattacatcgtaatttttgtatcttgcccccttttttgcattttatttctattagtgatggttttaccataaatttaagctcaacatttcagaggaattggtgtccgccccttcgcccatcgccgtgtttagctctttgaagacaccgaacgaatcgcccaaaaagcggaatttgcaaagccaacaaccccagcaagggatgagcagcaacaaagcgacgggtgagcgaaaaatcgggaaaacaaatcttaatttaattccaggaagtgccgtcgtcggcagaaagtccgccaatccctacccattgcccaaggagaccaaaatgagtttgggcaagaaggttcgacgcatggcgagttggctgcgcaagaccgtgtcggagaaggactgcgcactgattgttttggtgggtttgcccatctgatatttcattttattgctggacaatgcgaaattaaggccattttcgtcattcttgcctttgggatcgcaattttgcttaacaacttttatctgaactgaacgccatgcatatttggtgaaatgagtcatcgcagaaccaacgaacgaacgaacaccttttaagactaaataatttatcactaaacatacataacatattccatttaaccctttttatattccgatcacattatttgcatatcattcgttcattttcctgccgctttttccttttcctaatttaattgatttttctgtactataaccacacacacacacacacactgaacagtttgtaaatgaatttggttgtctattgtcattttcacaatttctatttttcttattttaagaatatattacagatttcatacataattaattaaatgatagtttattttgtttggttttgtgcggtggtgctccccccccccttctgctaataaatattaattaatgaattataaatgtttctttttctttctccacttttatttattcttttgcttctgttcttcttgtcccataacccttaaaaaatagaatcgaattgacttcttttgtgatatttgccccgaattcgccaatcgaattttattatttttagtttttgcatttaattattttttgttctatattttgtgttaaattccgcgcggaaaaggtcgaatgtcccaaattgtaaaaaattatttaattttcgcacttttcaattccattttcgatccgttcccctcccccgtcgtgcataatcaattaaacattattaatcaattcctaattttattcgagaaagttttttatgcttacagaaatgcgcgtgttcaatgaattgttttattatgagcatttattattcattattatcggatcccaacaaaacattattttctatcggtcgcccatttcgaacactatcatttgacgacgactanattttccatagaaacatttttaagacataaaattatttttattattcattttttctgttaatcattttgtacttangggaaaagtgttttcttataaaacagaatgataagcaacggttgngagcaaccgaaaatattagtgtaaatataaaat

SEQ ID NO: 22842 - DNA, 1976 bp, Heterodera glycines
  unsure (1)..(1976): unsure at all n locations
gcacatatttattattccaaaaaagctgcggggtgggtacggcgatcctgagacccgagaccaaaatcggaaaccccgagaccgaaaaaacccgagactctagacatttttcaaaaaattttactattcgtttaaaaattgtttaaaaaatttttctttctttctttaagtcaatttaaaaaataaaggaattttggagttccggcggtgccaagaggcgctgtcggggaacatttttttaatttgagggcaatttattaacagttttaccccaaaaaatgaacaattttgcgactttgagctatttttaaaaattagaatagaggatttttagggtacggcggtgccgataggcgccgccggggaaaattttgaattcttattgcactttgttaatagatttagtccaaaaaagacaaaattttgcgattttaattgtagaaaattatttaatttccttcgtaaaaaggaataatttagaaaattaaacgtaaaacaactacatggagtggcactgatccaaagcaaagaaaacaacaaaatcacaaaccactggaccacgaatatgagtatacgtcactaaaaatttattaaattaatgtttaccaaaagcaaaacataggggtataaaaaagtcttggttttgagtctcaaagaccgagatgaaaacccgagactcgagaccaaaatttaacttaaaaatgcaaagaacttttattgaaattactaaaaacgcacgaactaatgaattcagctacaaaattatatttaatccgtattatagtgttaattgcatgagaaaatacattttaaatattgcgattaatacgaatcacagtaggaaattttttacagtttcatcttttgcgtgccaataaatgaaagatttctattaaaaaaatttgtctaatgtttaaaaacgtttttggcctctaattctgcttctttttttagattttaattaaatgtgctttttaaacttgattatttttatggttgccattttgttcctatttttatttggttgtctcattttttaattgatttcattttaaattgccttaatttaaaaaatttataaaaatttccaatttttttcctcacggtgccggacgacaattcctcaacttttttcaatttatgaataatgttccaacagctgctggtggtgagttgcgcttcaataattatttgtatgcctcgtgataaattttggctgaaaatttcggatttaattaattccatgaaaataatttttggcaattttacctcatcatgagaatggctgctgcgctggctgaagccaaaattggaatagaagaaataaaagaaaccaaaaaataattcaaaactttgagaattttcaccatattttaagcatattttctttaaaaaatcataattttttttggtttttatgaaaaaatttagcaaacttttttggaaaataattttcgttttgatgcttttttaaaatccaattaaataaggtcttttcggttttgtgtacaaacccataatttaaaaaaaaagtacaaaagatacacggagtttttggatgtcacaaaaggataattcaaaattatttaaaaattaacagattctaatgatttacccaaaagcctcaaaaatcttcaatcctcattacaaaaaaaatcttcattgacctatcaaaaaaccacaaaatgaggataaaacttcaaatcttggagccctggaaataacaaaatgtaataaattcactgaaaaaaacattaaaaaaagaatttgaaacagaactaatattaaatattacaataagaggcacaatttaaagatacttttaataatggttgttggcaatttttttanataattttctttaattanaataaatagattttaagtgaatattattttatattgttatttaatgatgaagatgatttncattatcagcaaaaccgtggacgcgcgaaacttggagcttcgtgctt

SEQ ID NO: 22843 - DNA, 1484 bp, Heterodera glycines
gcagtggcgtgaaaagccatttggccaccgcttgtccattcaaagcattggcacactgtcatcgcatggaaattcggcgaagaaatcatcaattcaacgaagtgaatcaaacaaaaaaattgtcgtaaaataaaattcaacgtgtcccgacatttgcgcctatgtctaaaatcgggttcgaacttacatttttcaatcttagagctcttaaacagcattaaattttagaaactggttcttttggttcattaggattaatgatttgcttgtttgaaaaattaattattttttaaaaatttcctgacgatcaaattatcgcatacaaacactttcaaacgcttattttaagctgtttaggctattatggattgaaaaaaattaagtttgactccgattttggacataggcgcaaatgtctggggcgcaaatgtggggtaaccaaattcaaaatctacctgtttttatgagtcaatcgagagtgaaatcccttaacattcattgaaaaaacataggctaaaaattacaaaattttgttttctcaaacgttttctgtggaggggaaaaagctttcaaaattgcaattgaattcatctcaatttccacttaattgagcaaataatgtatacgaaatattatcattcattcgttttgggaataaattataggagcgaattaaatttcgcccctcttttttccatttgtgaggaattccgttccaaaaagtctgttaatgaatgcacaacaaataaaacttatattttttaaattaattcttttttaatatttcatgttttattttttgaatagaattaatagtgaccggaaaatgcgtcagcgatacaaacattttaaaacaaaattctgtttattgtaatattaaattaattctgtaagaacaccattctgaattccgaaccccggacacgaattcgaacaaaaaatcgaaagtccaaattttggaaaaggttcaaatacacggaaacagactggaagccatcaatccttcaataagagatcatttatgccgtttttgaacaataaatgctaaattcgaaaatttgggcattcgaatttttgttcgaattcgagtccggggtccggaattggcacaaatcggtaccggattcgtgatcaatgacctcgaaaatccaagggagttgtttttatgccaataaaatttccactggcgcattttccgggagccgaagtaatttattctatttgaaattatattaattttaattgtctctttatttttcgaaattccttcatttatattcatattatttcgtcactccctcttgcctacccactcactcacccactaattagacaaaattaattatttcattagttcccattacgtaaagtgctcccgtttgtagcgtcaatttcctcctgcccatcttcgccatgaaaatcccaaaaatccgtaagccgtaatccatcatgacggggtccaaaaaggccgtaatttccgtaat

SEQ ID NO: 22844 - DNA, 2293 bp, Heterodera glycines
  unsure (1)..(2293): unsure at all n locations
agtagagagagaggcagggaagaggggggaggggccagagactggatcaactaaaaaaaaatcaaaagttggcttctccgacggatttggcctattgcctaagccttttccttttgcattctttccttttgcatttccttttccctttttcctgccccttcagttccctttgtacggtttctctttcgctaatccttccattcgcttcggtggaccttcttcctttttctcctccgtcgatttggagttcgctcagtccgccctttgggctctgttccgtcgccccgtcctttccggtccttccggccttcctctttctcgtctgtctgtgctctttttgtcctctgtccgtctgtnggcgttggccctctgggtttttggggggtcgtcggccgttcgtntggtcntcgcttttgtgngttgtgggcttctgttcggtgtggtgcggctcccntncctgcgtgnnggtcttggcccttcggcgttgtcgggggccggtnccgggttgctaattcttctccccacccaacagattccaattcgcctcctctgcaaattgtgtcgctgttcgacttccgaaacggccaaatgctcgcggggacggcacttccaatttcggcaccgggttgggctgcagcggggcccaattccatttcgaatgtgcaatacgacgcggtaaaaaggaaacaaataaaagcgatgcaaaaagtcaaagcatttgctgggaaataattgtctaatcagcaggaatccgattcggtgattgttttcgacgatggcaatgtttacacaatggaaatccatcggagaaaagcgacccaaaaacattgaggaaaaaggcgagagaattggcattttagacgatcactgactgatcaatcagcttcttcttttgttcgtttggctattacctcatgcattttaaagtaatgataaaatatgagtacagtacaataatcagtcgttaattaattaattaattaatcaaccaatgagtgtcgtctgcttaatatgctttttctcctcctttttataatttttcgtctcttttcgtccgttttcctttggcattaatccttcgcactttgcttcgtcttgctttgtattccatccacggattggtcccgtggcttctcaaagtgtgcttgcgcagtgatgatgggtccgtgtaggcgttggcacagcccaaaaccacgcaagagtattgtttctgcaaaggcaagcccaatcaaaagagccgacaattaggggcggggcttaaagtgagtccaaattggcactcctcattagtaaattaaagtgagtcccaatttggcattcgtccgtttggcattccgtcccccattctctctcaaactttgctgaccttctttttgtgcacgcgtttctcatgctgaaaagagctgatcaatcatttgctttccttttaatgtttgtcctttcattcactgaaccttcattttgtccgaaatgtttgtaaatgaccgtccacagatcgtacactgaaacggacgttctccagtgtgcgttcgctggtgcgttttcagattttccaaccgcgcgtagcgcttttcacaacttgcccactgaatgttaaacaaaaagatggctattaaggaacagaacgccggaaagggaatgatcggacattagagtgatcagagaaaggaatgatcggacattagagtgatcaaataagggaatgatcggacattagagtgatcaaataagggaatgatcggacattagagtgatcagagaagggaatgatcggacattagagtgatcaaataagggaatgatcggacattagagtgatcagagaaaggaatgatcggacattagagtgatcaaataagggaatgatcggacattagagtgatcagagaagggaatgatcggacattagagtgatcaaataagggaatgatcggacattagagtgatcagagaaaggaatgatcggaagaaaatagagtgatcaataagggaatgattggacattagaatgatcggacattagaatgatcagagaaaggaatgatcggaagaaaatagagtgatcaataagggaatgatcggacattagaatgatcagaaagaatgttcgaccaatccaactattcccctctattcttttaattgttcgtcccacgatttttaggaaacatttcaaacttttaaatttgcctcgcatttgtatggcttctcgccggtgtgtaccccgaaagtgttgaacaagcatataaatagcgggggaaggggcgtccggcccctttcgcagcccttccac

SEQ ID NO: 22845 - DNA, 1144 bp, Heterodera glycines
taatttatatgtaatattcgaaagtgccaagctaattaccgattcaggcgcacattggggcctgaattaagccattttccctttgatcggtacaaaattggccgaaaaagagatagccattttctgaggcccgaaggaaaatttgagagggctaatttatatgtaatattcgaaagtgccaagctaattagcgattcaggcgcacattggggcctgaattaagccattttccctttgatcggtacaaaattggccgaaaaagagatagccattttctgaggcccgaaggaaaatttgagagggctaatttatatgtaatattcgaaagtgccaagctaattagcgattcaggcgcacattggggcctgaattaagccattttccctttgatcggtacaaaattggccgaaaaagagatagccattttctgaggcccgaaggaaaatttgagagggctaatttatatgtaatattcgaaagtgccaagctaattagcgattcaggcgcacattggggcctgaattaagccattttccctttgatcggtacaaaattggccgaaaaagagatagccattttctgaggcccgaaggaaaatttgagagggctaatttatatgtaatattcgaaagtgccaagctaattagcgattcaggcgcacattggggcctgaattaagccattttccctttgatcggtacaaaattggccgaaaaagagatagccattttctgaggcccgaaggaaaatttgagagggctaatttatatgtaatattcgaaagtgccaagctaattagcgattcaggcgcacattggggcctgaattaagccattttccctttgatcggtacaaaattggccgaaaaagagatagccattttctgaggcccgaaggaaaatttgagagggctaatttatatgtaatattcgaaagtgccaagctaattagcgattcaggcgcacattggggcctgaattaagccattttccctttgatcggtacaaaattgggcgaaaaagagatagccattttctgaggcccgaagggaaaattgagagggctaatttatatgtaatatttcgaagtgccaagctaattagcgattcaggcgcacattggggcctgaattagccattttccc

SEQ ID NO: 22846 - DNA, 2281 bp, Heterodera glycines
atttttagcatgcccctgccggatgttttcggcggctctgagaggcgattccatgtcacgcgaagggcacgacgctaatttgtaaagaaaaaacactaattaagaatttcataatttaaaaaatgaatttaatgggattggttgagttctaaacattttttacatgcccatcgctgagtttggcgttgaattcgcccacaaattgggccagtgacaaatactcctgctgctgctgttgttggaagtgctcaaatgcggcgaagctggtcaacggctctgacgtggcaccgccggtggccgactcatcgccgaaagtgcagccgaacgcatcgccggtggaagagaggggccaaggggagatgccagtttgggaggagagtttggaacctatgcaaaatgaatggatagcacattttaagaaggtccagtataaaatctgcttacaatgagcttgacccgaaggtgctatgatgttagtcaaaaaccattaaatgaaaatatttattgatataactttgctcaaaagcaaccaaatttttaattcttgctataaagtgttttctattatcttgcaaaattcaaaaagtttcaagaaagttataaccaaaaatattcacaaaaaaggttattgagtttttcaggtcataacttttttgaaaataaacgaattttcttgaaattatgcatgataatagaaaaaacttaaagttagcgaatgataacaagttttttaaaatttgtgcattttaggcgaagttttgaataattttctgtcaaaatttttcattttgattgttttttgactaacgtcccagcaccgacccacaaaattagtggttttgaaacaccaaaaaaaaaagtaaaaagcaaaacaaattcaatgttttctggcttggaattgttgatttgttagaccgggatttagtgtttttaatttaacgataaatcaacaaattgaaacttcgactgcgcaaaaatgggtgcgattccgactcaatttgggacaccaaatagtcctcattcaactgttggatgagctttctgcgttgaattgcctctttgattcgcatcattttgccaagttgtctctgtaaatttaaatatttctttaaaaaaacatttttggtaataataatttgcatgggatggcagtgttaggcattcacttaagaagtgtgggagtctgttctgtctctcttgtgcagcattaacattcttttacaaggacttttaaagaggaaaagccttttttaaagaatgagaaatttgcagaggtattaaatattttaaaaaattcgtaaaattttataatttaaaataacacaaaagtgtgttcttcttctcatttgattgccatttaaaaatatatttgtttattagtaaaaagtgataaaaaggaaaatctttactttaatattaagtgatttaagcaacaaaaaaaaatgttaacataataaaaaaagttaaaaataaaatttgcctatggattttatcttaatgagaaaactaaacaaccaaaaactcaaatttttaaatttgttagaaaaacataaccaattaggttttgtttaaaaatcattgagtaattaattaacaattacaaataattatttgcttctataattatttaataattcttaaataattaaattgaatgaattttcaatttaataaaaaaggtttaagccatcattttgggccgaattgtgccgattaatgtcattgcactttttcgtactctgcattatacggcttacagacattagcggacggaaaattgcggacattttcggggaaagataaaaatatttattgaaaaatttttacaaaagaatttgtttggaaatatgtagaatggaagagcgggccttgggtctcgtcagtacgtctctaccaaacaagttttaaatttaaaaaaatatattttttattttttgaggcatgcttattcggcaacaaaaaattttccgataaaatttattgggaaagttggagaaattggaaaaaaagacatcggtgagcaatattagctattttcggaatttttagcttaatttaactaaattgaagcttcaatttggaaaaatttatatgcatatttttcacttttatgcgcatatttcaagattttatattcatttttttagactccctagttatacgttgtatgcactaaaaattccaaatatgcgcctaaaatatgcaaaagaacccctcaaatatgtatggaggcgctatattaaaagaaggacttttgaaacaaaaggggggagggaccctt

SEQ ID NO: 22847 - DNA, 1974 bp, Heterodera glycines
aagtatcagttataataaagataattaaatttaaatgttatagtgactaaatcctataaaattctaattttttttgtgcatgtttcataaatattttggcattttaatacatatttatttacatattttgcaatttttcttacatataaactcaatcactagtaataaacaatttctttacatattcatttatgccacgtatgaaagaaaagtcaattaagtcgtctagtattatttcctaataaaataacattgataaatattaagaaatttttttataaaatattgcgtttcttatatgttgcattaatacattaactcagaaataatgaacaaattttttatttttaaacttattttgttctcatttctactcgattattcggcaagcaccaaatcaggatttgaagaatttctacaaaactccgaagcaataacacttgtcaaaagctatgaaaacaaggaaataaaaacaattaatgagctgcttcaacggtagcgacttttttttgcgccgcgccatttgcgccgcgacacttgcgccgctcagcaaaaaagactcttgcgccgcggacatttgcgccgcaccatttgcgccgcgacacttgcgctgcctaacaaaagcgacatttgcgccgcgaaatttgcgccgctcattaaaaattttataagattgacccaacaatttttctaaattataatcgattgatattcaatcaaaaatcgtgaaataggggagaaaaattaaaatatgtgctttttttaaaattaaaatcgatgtaaataatttttaacaattttaatgacaaaatacatacataaatttcatcttttttgaataaaaagcaaaaaatagtctgtttttcttacagaaaacatagggaggggggcattaaatgaagtatttttgtgttaaaatgtgtttctcttttctcattgaattaaaagccgcagaaaaaataactaaaaacctaaatatcccccaccctactcatcaatttcaattattttttgagccgtgggcagtcaaaaatccgtgagtaggactaattcaaacagtgtcagtctgtttagttgttattcttcttcatttttcatatttttgataaacctaatcaatgttaagctttttaatgattaaaaataaaaaaattaatgtttatctttaagtagtgattttttgaaatttttcacttcgttattttcgccgttggtttttagtaatcttattgatattagtgaaattgaaatgaaaaatattatttttgactgcgcggcgcaaatgtccatttttgctaggcggcgcaaatgtcgcggcgcaactggctgaggcgcaaatggagcggcgcaagtgtcgactttgctgagcggcgcaaatgtccatttttgctgtgcggcgcaaatggcgcggcgcaaatgtccatttttgctgtgcggcgcaaatggcgcggcgcaaatgtcgcatcacgtcttaaagatttaaaattttttatgtttaaaaagaaaaagatgggtctcttgatttttcgggcccaaataagccgggtattcaggtcaaagtccaaacagaaaatagtttacgtctaggcctacgttaaaaaagtgctgtatgatttcgtcaatgaactatttcgtcagtgattttcgtcaataaacattttcgtcagtgtactatttcatttattttgctgttttccattttgctgaggaaatcattagccacggtttaaaacgagattttgaaacaacattatgccagaaaaacatttggctctaacagaatttttgatttagaaaaggacgcgaaaaacgttcagttgcatttattttttgattcactgtttttgctaatgaaattactcagaaatttccagtttttaaaaagatttggtattacctaataaattttattatccgaccaaagaagcagtgacaaatgccacagcaaataagctgggtagaaattgaaagaac

SEQ ID NO: 22848 - DNA, 1745 bp, Heterodera glycines
tttaaaaagggttcaaaaaaattgcccaaatatgaaggaaaacgaaaaaaagcgaaatacaccggggttatttgggctaaaaccttcactaaatcaaaaattttcaatacaagaatgctatttttgagtttcttcttttatagcatatgcaccaaaaatatttaaacccagccttggggattaatctttaaaaaaggcgcctaaatatgcacaaaaggcaaaaaaaaaaactgttttctacctaaataaaccggtttttctgttttcaatttagactaaatatatttaattatgcaaaactttaaaaatgaaaaaagttcagaccacgctaaaaagttttcatgcttatttcaatgcaatagggcgaaaaaaggcatcggcctaaaaaatggagccccaatgacatataataaatcaattttagccaacatcaattttccaaattcatttccatttaacctttctcattcatttttttaattttcgtcaaatgggacgatttaaaattactaaattttttatttctccattttttattattggctcaatttctctgctggtaaatgggcgaaatgacaatttgggcccaaattccgattttaaaattggaatttcgtcagctaaaaaagggcaaattggtgaacagaatgttaagggaaaatcacaacaaataattgaagatggcacagaaaaaagaaatgatttgttctcaattttcaagaaaaaagaaatatttgacgaattaattgaaaagaaacgaattgaaaagggaaaatttgacgaatttgtggaggaaatgagagaaaatgaccaactgatcaaaatggcattcgaacctcaacaaagtgatgattaccaagaagaaaaggtaaaagtggtcaattagcaaatatgttatgaagatcactgaaagaaagcgactcatttgtgaaaaatttgcgcggtttctgacggtatttggtttttaaatagaagtgatcggagaattttgaaaaaattaagtaaaaaattaaagcgcttctccaggggactcggtggtttcagcaccatcgttttggtgccagcccgagtttttttgggttgtaactttttttcattgttgaccaaatccaataatcttggtatcattcgaaagctttacatgtttagaagctgtttctaagctattgtttggcaattcgacaattaccaaaaaagttgtaacatgaaaattgcgaaaaaatcgaagttaaattttctagcatatagaaaagttattatgaaaaacttcaaaatttcgactttttcgcaattttcatgttataccttttttgataattatctaattgccaagcaatagcttagaaaaagcttccatttttttaaaaatgtgcagcattaatatttaaataaatttagaataaaaaatttaagctagaaaaacaaacgattcgggcaatttcaaaaggtcttaacaatgtaaaaatcgacaacgaaaaaataacagaaactcaacaggaaaaacaattcaaagagaaataccgcgagtttagaggccataaaagaaaaagacccggcgttgtgtcgattaatggaacaattaaattcgtaccgtactcaaatggagtcgggtgagctcacgatcgggcggagttattgtagaaataagaaccccgaaagcttgtaccaatttgtttattttattttaataattttgcccatgggtctatcttagtgctcttatttttaagggtgaccctgccagg

SEQ ID NO: 22849 - DNA, 1352 bp, Heterodera glycines
tttgagaaattttataaaataatttatttaatacacaacactggggagtaaggactccgaccaagtgttgtgtccaaaacaaataaaataaataaaacagaaattgaatgcataaatgaaacactggggagtaaggactccgaccaagtgtagatacaagcaaataataaaatttaaatggttgtttttgccactatatatctgtgattgtctgtcaaattgttgaagtggtggaaattacacttcagctttgcaacaaaacgaaattttgtaattgttttgatttacagttttacacataaaacaaccatttaattttcagaatcggaagacaaattgataagctcagtggaattattttcagaattggaagacaatagattatgggcttctttcactttttgagcttcttcatccattttgagggcagctattagatttgtgtcgtctccacgattaaatgaatccttttgttttaataataactatagttgaaatatttttaataattttacgtcaagtccaacatgtttgtcaaaagcgggcacctctttaataaaaacaattgaatcatcttcgtcatcatgcaattttggctttttagttgcggtttgatgctataaaaacaacattatagatttttaatacttttttgattgaccttaaacatgttgctataagccattagttctggcagcgtaatattccgctttcgccgttcttcaaaaagcaattctttttcctgccttttatattccttgaaaatgttgtcaacaacattgtcaacaagaaaggcaacagtttcttgaacatcttttgacacatctgaatgaatggcctcttgatccataattaataattcaaaattcgctgaaaaaaaaaatcattaataaaattgaaataggtaaatgaaatgattgacaaataaatattaaataaagcgtttttaaatgatttattgagaataaaaacttgtaattgtaaataattggcaacgaaaaaacatttgagatgcatcaaaggagtgctcactattttttattggcgacaaatttggtgaaataaattgtacattggattcagaacgttttggagttgaagtcaatataagtttgttattttgcatcgtttaaatattgaataaatctgtaagcaagtttttaatttattttttctataatattttggaatgattatcaaccatgctctttgcagaaatttattttataaacacatatgaaaaacaaattattttacctaatgggccgttagcttcaccaacaatgtatttttgttgttggctactagacttgcacaccacgatgaggtggcccatatgtgcaagacctacc

SEQ ID NO: 22850 - DNA, 2953 bp, Heterodera glycines
cggctcatgttttattttgggcgtcgggggaggcgggctatacccggcctgccttgatgtggatggtcgtggatcgagatcaccaaactctggcactctttttgccggagtggggtgaccggtttttttttgatgtcgacggcggtttgaattctgactttggcttttgttgttgttctctcttgacgttaggacgcggccggggtgtaggaggcctcggctgctcaacttttacttttgcgcgaggcagtggtggaggttgataaatcatcatatattttttgcgttgcaaatcatcatcagcatcagcctcgtcctttttcaattttcttctgatggcaatcctgcgctgagcagtgtccatttcctcaatttcttccgcattgtcgggcagcacaggcaaatcgccatagtattgtgatggtgctggtagcgcgaatccattctctagcatatactcatcatcatcatcatcatcatcatcactttcgggcagtggcgccgcagctgcttccgcaaggaggtcccgcaccactagcggcggcggctgccgttgctgttgttgtatatcgtatcgccttttccgccattgctccatacgaccacctctccgagaagtcctgctcggtctcggggggcgttgtggacgaggcggaggacttgttggtggcgaaggacccccgggaccacccggaggactgggcggtggacgacgaggaggtcttccaggcggcggaggtggtggtggaggagcgggaggacggcgtggggtatcaaccacctcgccttcttcgccacctctattcatcagtacacttattcccttggtcagctcaactttggttggtctgtccgcatgttcctttctcatctgtaaataacgtcggagctgctggttataatgcacatttttcgccgaaggatttgtctgtccacccctggcccggtccaggtcgtggcgaaccgcgtccaaattgaggtctcccgtctgcgagacggaggtgagaccccgataaatttcttgtggtacgagaatgaatttgtttgccatttttattaatgaatgaatgcgtgtgtgagacaattttacgagggtatttatgtgtttcgggtcacaaccgatttggccaattcaattaagacgggggttaaaagggctgcaaatagtccgccaaacccctctcctttctggatgacaagcgctcgcttcgcacccctctcgctcctcgctctgctcacgcggcgcaccgtgtccacgtagggcattagtcgtttcttctgccgagttgtcagtcggaatcgggaagcaataatgttcaagcacacttccaccagtgacagcagctgatcagtgttcgcctttctgatcagtctcccgcatcgtttcacacattttgcctttgacagtgcgcaaagccagttggcattttcttttattagttgactaactttagcttgttgttgttgttgttgttgccgtttataccgctccatttttgggaatgaacacaactgttccctcgtcctcctcctgctcctctttaaatatgttggtgcggaggcgaagcgatggatcagatgatgcgtgcatatcgattagcaaatagccataggggcgggcggtcgccttgcggtaggcgtcaaggaaaaaatcgagttgacgtggaaaaagctgaacttcaatatttcgaatggacagcagtgagttgggcgcgcacattagcaccaaatactgcgccgaaaaggcgagccaccttgatcttccgctcaaacagattctgagtgatgaacactaccgcaaactgatggtgatgggattttttggtgaacaaatcggacagatagcgctcctctattgacagcatcagatcgtcgagaatgagcagcatcggtttgggaaggcgcctaatcagctcctccgaaggtacgcccgaatacacctcaactcccgccttttgcagtagcggaaccgccgaattcatctcaccaaaacagtacagaattgagatgggactgggtgcgatcagttcattgcactcagcataaattttagtaggaattccgttttgcccgacgaggatggcccggaaataattataccgcaaggcaatttgaaacaaatatctttattactgaacgattgagaatttaacattttcaaaaattatgacaaatcgagcagtaatcaacttttatatatagggcagagcgagttttgcgctttttttgctattgcatattgcttgtcgccgcttgaatgctattgacgaaatcgtccattacatcaccatcgggagcagattcagttgttgctgcagcactgctgttgtttgtgcattcctccctcttctcctcctcttttgacgatagctgttgttgttgttgttgctcaaaagttggcgagacatctgttaatgattccgccaaaagcaaattggccagcacattgatcgcggttttggctttcttccaacgcgtcccatcctgcatcattgcgtctgccgctagaccagcttccactaagtcaagcgccacctttgccttacgcctcaaattcttctcctcctcgtcgtccggtgtccgttgatgttttgctgttgtcattggtggtggtggtggtggtggtagaggctgggcgcacctgtctgaggacggcagttcgctgtacggaacgctgaacacccttgccttattcttcacgcgaaagaaacagtgaccgggaagctcgtagacaacatcaaaagggacaaactgagccttttctatgcgtgtgcaccataaggtgattccctccttggtgaccattgtgtccacctcagcctcagttcctttacatgcgcggcaacgcccgttttcctcaaacggaatgaaacggggaacagacaggcggggtccgctcaaggttatgccgcccatgcttatagtgaggtccacctctgcgataacacgctta

SEQ ID NO: 22851 - DNA, 2755 bp, Heterodera glycines
ttgcgagcctacagtccttttcttcgtcgccgaaatcttctgaatggtttaccattcagaagggaaaggtgctctgtgtgtctctttttttatttataaaatttataatttatagcctgttgcaacggctaaacttttggccaagctcgtgccttccgttcctattggttttgcacccaaaaaggtgcaacttcattatttatatgtcaaaaatggaattcatataagcgtttagaagcggagcactttcaagccaacggaaaacaaaactgaaaaagtcagtttgtgtttggatgactgcaaagtttggccggttttgcctggattgtcttcaaaagaaacggctcgtgttgtggaacgtagcccggttttgatgcgttatgctgatgtgctaagcaggccagctgttatcgaaaagaaggtcgctgtaccaaattctggtcgtctgtcgccaccgaaacaaaagtcggccgcgcacacttgcaaaaatggcaataatggacgttctatcgtcccaaaaaaacaccggaagttgtgttttgagtccttggtctatttggaagagcgtaattggcagaagtttttgaatgccgggcgtactggcaacattttgacttccgttgctgtccaaaagaaacgagacgacatgccaattgcggccgctacaaaaaaacaacacttcggccaaagaacatacgctgatgtggttgcgacaaaaaacgtaacaacttctgtcgtcccacagacttacaccagaaattatacgtctaagccgtcttatactcgaaaaggcttagtgcttggtgacttcatttgcagtagttttttctcttctaagcatcagcgtggtggtgctgatcactctcacaacacaacgcctgcagaacgttcgggaactaatccaacgaacgaagagcaacacgcctttcttcttgctctattcaaagaggataaagaagggagagaacgtgcttttgcttcacttgtgaatcgttttggcctaaatgttgtatcccgttggacttatggacgttggtggaagaacttcgaatctggtcaattcatgctgagtcaacgtggacgtaagaataggcggataacattaaaactgcaatataaaaataggaaaattttcaactccaatggcctcgccagcgtcgtcggagagagatgacgctgtgacaattgagtcgcaaactactgcgactcctttatcctcacgccggaccgcaaagcatggtagtcaacgcgaaaactttctatataaatggataaaatcattgtattaagaagctggtatgtgcccgcaagagatccaagcaaggccacaaaacgttgacaccgaaagtgatgttacttgcgttgacttaacgttgagcgcagttgagcatgcaaattgtttggaacaaggaataggttaatgcaaaagcaatattcttttttggaactttttattcagaaaagcctatgcaatctgctttgttaccagtcgggaaacgaagccaatttacgtcgatcaaatgcgttaattgcaaacaggagttggatgccatggatggttatgcactggtagattgcagtcataaatggcattttgagaagccttttgctgattggtccgtttgcacaatgatttttttgcatttttttttgtaggtatgccgaatcatctataaaaaaatgcaaagttgatgattgcaagaaaaaatttaaaaaaactctttgtcgtgaatgcagagaaaatttgggggccggtgttttcgagacagggtgttactgttctgtcacgtcggcatcacctttacacgctgacgaactggaaataaagtaaattatatagtgatttgcataattattaatatttaaggctaagacaaaacattggtaaatgtccggaatgcaagagtcagcatcccggtttctgcttgctttgtcagcagttgttcaaattgcagtcaactggaatccgccaaagcaaagtttttttacgctgctgttcggcatttttccattatgaatgctggtaaacctgggctgatttgtgttctttaaaaatcgttgctaaaggtattctgaacaaccaagactaagctgcccgtgccagtgcaaaaatccatggcaaggaatcatggatttgcattatcagtaaggcttatcttatataaaaatatagtactatatgttatagtgaggtttgtggggtgaagaacgctgctccgctgcgaaacattggcaagaagaggggcgttattggcggccgacctcagaaagccgacatgtcagcatctgctgtttccgattcaaagaattctgccaaagtttcaaaaagaatcgtttccggttcggttgatcaggcattgatggactcacaactcatgccacctccttccttggttcctcgccgcagttcaagaattagcacgcagggatcaaggacaagcggacagacaaatgtgtcttcaaggaagccagttgctccggttactgatcagtgcgcaacaatgcattcatcgcatttgggttttggatgcggctcgaaaaaggccaaccatctgccatcatactacacttctttaaggagccaagtaaaaaatataatgtcctgaaagggtataactgattttacaaggaaacaccgctttgtccctactgcaacgcacttctcttgccgtccgagtcgactggcccaaaggcgtattccaaatgttgtgccaaaggacgcgtcaatctcctgcaacgctttaaaaaattgcaa

SEQ ID NO: 22852 - DNA, 2590 bp, Heterodera glycines
  unsure (1)..(2590): unsure at all n locations
cttggtttacactcagcaaataaagaggacatcgaaaagcggatttgcgggcttggtgttttgggccatttttgggccgcccggagctgcgacgaggggccccattttgggtgtccccgagtcccaacagtctccagagtagggctttgtcatggcgctcctgggtggatccgttgtcttagccactagaccacatccaccactggagggatgactgttgttatgggggttagccgacatttgcggaccgacttttgcggaccactatttctcgatagaactgtctaaataaagaaaaaaataataagaaattttaataaattcaatattcccaaattgaaattagtgaaggtaagctgatgcaaagcgatctgtctcaattggagagaagtcttatttgacataaattttttctttcttttttatagaatttctaacttataattaaactgtgaaattggcgaaaaaattagctaaattaaatataaaagtcagttcaagaattttataccaagaaaattttttatcttgtttcacttccacgctttagttaaccgagagcttaattttttccggcatgtcaaaccaattaaattaacaaacaaaaactaaaatagtttatctttttctcaaaaattgtccgtaatttgtgttattaaaactatgggtccaaaattaaaaatgagcaactacatactatatttatctatggaaactaaacttctttaaaaaatgggttctttcgatgttgattgcaaaaagttgatcgattactcttgaagggcgatgttcaacttggtaaaaatcacaaataaaactacttagtcactcaatttttgaaaaaattattattttttgttttttttgacagttcaacccagaaatagtggtccgcaaaagtcggtccgcaaatgtcgcactacggttatggggccatctttccttcattttggcccctgtctttttgctcccacagctattttcgatcagccattacagcgttatatttttcatttacactaaaatgacctagagataaggcgctaattctagatgaaataaccgtatttaaaagagacacattcgacgggttgaaccgtcgaatattaataaatttgggtgtttgagtagtttttggaatagacatagtgaaaagcttactgaaaaagtggcaaaaaatttcaccaaatttactcttagaaaatggatgcccttccttccattccaggtctctttttgaaaaattaaaatcacctaaaacaacgtaattttggaaaaaaattttttgaaaaatttgaccaaaatataggacccaaaccaaattagtaccaaaatttaattgattttaaattttgtaattggaaaattaaaagttcacaattaaattttgtgccagaaaattttatgaaaaatcctatttcctttttgatcaaaatagcacaaccgccgccacgagaacaagttttagattttcttgatacaaaaatacttctgtaccatatttttactaattaccaataaatttaaagttcaaacaaataaatgtgccaataaagtaatccaattcattcagcattctgtgatcacttcccaaaaaaacatttcatttttttcgtcctccgcgttctttcaactgaagttgcactgaagcattcggcataaaattgtagtaggccaaactctgactgtccttcatgaaaatgccctgtgnaaatgggaaaacaaaacgttagccaattaatgcaaatgacttaaaatgggaattaaatttgtgttcacctcgtagactaatttttgtttggttgcaggaactccgatctgctcttggattaacgattttaacgcagtgacctgaatacaaatcgatttatgtgcaagccccaaaatagtcattaatttgttaaaaaactagctttaatttttaaaaaagtggaaaaaatttttaaaagcacgtataaaatatttaaaaaatttgaaaaattaaaaccagtaaaataatacttgcaaaaagccctgcgaataacgcattgcttgatcatcctaacttatgactgaccgatgaactgatgtccaactgaatttgtactgtgttccccttcaggttccattcatcattttgcggcgtagcgatttgcacagcgatttgaccgtggacctgtaagcaattaaagattttttttcctcgttttagcaaatatcggtggagaccggcgctcaccttttgaagccaacgttcttccggttccagcgtttcttcgcgcgggcgtttgtttggcggctcatcgccaacagaggcgccggggggcggaggaggaagcatgaaagagccatgcggtggacgcatcatgccaggaggaggcattccttgaggaaaaattagaaaatgaatggatatgccattgagtcaatccacttattgtgtgtttgtccaaagaacaatggggtgacttcattattactatatttagggctaaaccgtgtttcgagttttatttagaaaagatagtgtttttgaatagcattgaaaaggcattccaattatttgggaaatttcactaaaatcgaaaggaacggactgatcctcatcata

SEQ ID NO: 22853 - DNA, 1461 bp, Heterodera glycines
  unsure (1)..(1461): unsure at all n locations
ttttgcacttaaaaaaattccaaaaatttgatcgtccataaataatttgtaattgatcagcgcntcaccaaatttgncagagatacgtatcggagcactacaaatgcttactatttttctagattttttaaacccgctgacaaagttaagcctaaacttnttcgtgcctgtttaaaaaggaattagaaatttttaaaatatttattcatctccctttttgataatataagagtcagagtgccttattcaacttgtaaataaattttggtgcgtttcagagcagtttctgaaaaaaatttatgaattaattttgcaaaaataaataaataatgaaccctcctccttaataattttcctgcgcccaaggtactcactcggccgcttcgcggcctcgtggctgtaaaaaaaatttggggcgatttgaaagagaatagaaagaaccaggttcgatgaagttttggtaagccaaaaaaaattcaaacatttaaaaatctataaaaaatttaaaaatgagaattcatgcgagattttctggaaataagcttaattgggcctagttaagctgtaaaaaaaatttggggcgatttgaaagagaatagaaagaaccaggttcgatgaagttttgttaagccaaaaaaaaatccaaacatttaaaaatctataaaaaatttaaaaatgagaattcatgcgagattttctggaaataagcttaattgggcctagttaagctgtaaaaaaaatttggagcgatttgaatgagaatagaaagagccaggttcgatgaagttttggtaagccaaaaaaatatccaaatatttaaaaatctataaaaaatttaaaaatgacaattcatgcgagattttctggaaataagcttaattgggcctagttaagctgtaagacacccaccacttttgcacttaaaaaaatttcaaaaaatttgatcgtccataaataatttgtaattgatcagcggctcaccaaattttgcagagatacgtatcggagcactacaaatgcttactaatttttctagattttttaaacccgctgaaaaagttaagcctaaactttttcggcctgtttaaaaaggaattagaaatttttaaaatatttattcatctccctttttgataatataagagtcagagtgccttattcaacttgtaaataaattttggtgcgtttcagagcagtttctgaaaaaaatttatgaattaattttgcaaaaataaataaataatgaaccctcctccttaataattttcctgcgcccaaggtactcactcggccgcttcgcggcctcgtggctgtaaaaaaaatttggggcgatttgaaagagaatagaaagaaccagaatcgatgaagttttggtaagccaaaaaaaattcaaacatttaaaaatctataaaaaatttaaaaaatgagattcatgccgagattttctgcaaataagcttaa

SEQ ID NO: 22854 - DNA, 1914 bp, Heterodera glycines
tgcatcaaattaatgtaatcgtaaagtacggacaaacgacattaaaatatttacccttttaggcatatcgtgatttgtttggcgatgaataaaaacaccaatttaaagaaataaatgaatgaaataatgcaacttttatgacgttttgaaaaaagcattgtaattttcaagttactttaataaataaggtcaaaaaattggaatttatacttttcacatccgcttctcacattttaatcttattttatcttgcggatattagcattttgtcgtcatggaatttagaataaaccaacagaagcagcaggaagaggaggtacggagttgaggaggagttggtaatgctcggaaagattcgcaattgcgctgagatgtcgagatttaagggacaactgaaaagaaaaaaggggaaaatgggagcaaacgccacaataaaaaataaaataaataaaataaaaaatcatacagaattgagagtgcctataaaaactcacagtgagtgttgtactgttctgcaacatcttcagttcagacagaataaacacttggttagtatatttgatgctgaacggtgaacataaatggaaatattgtcaaagaagcggattagtcactaactaattgacgggtcaattaattaattacctatgataaagaagttcttgcccgtctaccgtacgacgcgcgacagtaaacacattattctgttggaggactgtgcaaatttcatctgaatagagagaacccatcggaatttgaattgttctttcgttcccttaccggcagttaaatttctgttgttctgcacggtgaattggacctcattttgttccgggatttccttccaaagttgcagaaagtcgcgtttgtccatttgaccactttcttcgaagaacacattaagcgggacaacaatagcaaaataaaacacgtcgacattgtttttgacggccaccttaaaattaacaacagattgatgcgagaaagaacaacaacaacaacaacaacaacaacagacttgcaaattggtgagtggttccattcgttggatgggtccgttggtgttgcagggaagcgaagcggacgcactttggttggggaaaatggtggccacacttagcggttcggagggaatgagcccaaaactgaaaatgagttaattgggcaacaaagtggggtggaattaaaagattgagtgctaattgaaaagtgcctgtttccgttgaattgaatggcaaaagagttcatcggttgcagcgctttgtttgttaaattcatttccgcaattattcgcccgcttcgacggacccaacggccctcaatttgtaatcctttacccttggaagcatcgagccatgccttatgatataaaataagattatgcaaatttcgagaaataatgccacctcatagggcggaacaaagggtccgagtgtttgcagtgaaggagcaacgccagtgccggcactcgaaccaccgaacaagttggcgaattggtcaggggattgcgaagtggttatagccgatgattgtgaaatagaagcgcaaaaaatctgatccaatgggttggtggcattggcggacgaaagagtagtcaatggatgttgtggttgaagtgggggcggtgcgttgtcaaaaacggacgaagacggaggcgcatcgaaaatatttggtggagggacagcgggggcggcagaagaagcggttgtatcagcagaaggggccgaaggaatgccaaatatgtccatgatattcgcggtttgagaaggcagggctgaaacaaaggccaaaaagtgataacaaagaaagagaataaccttacccgcaacgggaggcccagaaatgtccaaactgagaaggtccgcaattatcgagtcttgtggaggctgaaatgacgtcgggctgcggaggaac

SEQ ID NO: 22855 - DNA, 986 bp, Heterodera glycines
acaggataatggtggagtcgacaaaagagctgggcggcttatgataaactgaagccagcgaaccaatgtgacagacctgaaaagccgggagggaggggtaagagcaacgaaaagtctaattaatgtcctgaaatatgcattttaatgcatttcaccagttggttaagaagcgacggttccaggagatcagtttcctccgaaatcaatggcttctccgccagaacaacttcttttgccgcttgtgggtcggcacttaaaaggcgccagtaaatgtagccgcggtcccgaagatcgggattgtcagaatcctatttcaaaatagaaaaggcaatcattgaccattgagatactccccgaaataacgggtaccccaccacccagaatagaggtggtctgtatccacctgcgtcgccaatgtgagcacacgttggaccaattgttgcgtgtcagtgggacgctttaaaaacaatttgaccaccttaacggatggaaaataagaccaaaaattaaattctaattgatgagtacggccgtgaggagctgcagttgaacttgggtattttcgtcatgaaatccttcgacgaacgattccaacaattcgtccgcattgtcaatgcgttcggcatattcaccaataatctgtttattgaataaagaaatagttgttttatcgataggatttacgctgtcacccaaatcatcgacgcgcgtgcctcgggctcgtccaacgtgtcgaggttttcacacagcgtggaaatgatgccctcatatcgatttggatattttcggaagatatcctaaaagggataaaattagaaattgttgtctctcccatctctcgccgatggtcggccaaatcacttttatgacgaccactgcctcttggaccacataattcactttcgtctggatcagttccaacagcgtgttcacacatcgttccgcactgtgctccacttttatggcacaacgtccgatcgctcgga

SEQ ID NO: 22856 - DNA, 2026 bp, Heterodera glycines
  unsure (1)..(2026): unsure at all n locations
aaaagaaaaaaaaattttccaaaaggggggggccgaccaacggcagtattaccgcaaaatcaaaccaaaaaaataccatcagaaaaaacatagacgataagaatgcctttcttctcttggtaaatgttcagagcagtagtaacgtcaccagaataccattccattttggagtcaattaggtattgtaaaatccaagttatactcgagaataaatacctaaatatatcgtcataagcatatcatcaaattttataaaatgctttttactggttttattcaaaatcaaattaatgacttaggtataagttttttgaatagtacaaatcgcggcagtacattttgagttttttggggggcccccaactcgaagcatcgggccctaaactggaaaattatccaaattcggacggaaacaaatttattttttatttagtaatcaaaacgccaaaattttgcaaaatttaaaaaagagggatttttccttgttaaggtacaagaaaccgacctcgatttaaaaagtttttggaaaaagatagtcgtaagcaactcatacacagatgttgtagagattaaaaaaagcattggaatgagctattgaatgtctagagatgtctaatttttattttaccattttattgtaatttaattactgtccgtaggggtcatatgaaacggggatgtggggttcgagcccgcttggcttcaatttaatttttatgatacttgatcagaaataagacaaaaaattggattcttcgaaaatttattcagcagcgcattttttaacccggaaaggctttttaaaattttacaattttttcccattgagaccacaattctgcaccttagctattagtcaaaaatcattgcaacatcaaaaaatggtcatccgacaatgagctcagggtagtgaagtacatcttttctcatagaaaatttggtttttaaatgtttatatttttcgcaaaaccacaaaactgcacttttgccatcattaccattgacttccccccccccaatgcaatcaatgttttcgtttttgaaaatttatgtcattaactttaaatcaaacataaaacaaatggttaacaaatttatataacaggaagaacaattgcatataatgtcacctcacgaaaaggtaaatgtaatatttaccaagccacatatttaatatttcttaatgtttgcctggccacataattaatatcccacgttctgcaaatatttgtccaaatcgggcacgttattcttcagcaaactctctttgactttaatggattcgacggcttgacgaagaggccgctccaatgttttcagagaatgttcgtccaattcttttttaaaaaactcctaaatttaaatgggtctaaaatctccgcttttgccactgattgtgcattaacccaccataatgtcctcggccatggcattcgaacagaaacccgaagtcacgcagtcaaagcaatgcaagaacacgttgctgttgacgctgccgtacttctcgatcaaaagtgcgaaattgtttttgaaaaagtcccatgcgaaatgtccacagcacgccatcggtgccatttccgttgccgcgaacaaaagataaaggtcctggtcgcggattttgccttgaataacaccataattgaaaatgtcctcgagcattttcaagtccgaacactggccaagtccttaaaaggtttgtcataagggaccacctcacatttgcctaatatctcatacctaatacacatgacaactccacttgtgcgtagcccgatgtctccatcaaatttttcaatgcagcaatgattttttcatcatttgtagagcctacggcacggaaaatgagctntcgcaagtccgggacaacatcgacgcctttctcgatgagggcattgaatttggaagtgccatttgaatagtcggttgatggcgaaatgtgacaaacggctgaggagcagggcacgaagacgtccaacgtgtatagctaaaaaggaaagaaagttatgaaaaaaacaaaatgagtttc

SEQ ID NO: 22857 - DNA, 1686 bp, Heterodera glycines
  unsure (1)..(1686): unsure at all n locations
gcgaaacgctttgtcggctggagggcggcggcagggaccaggcgagcaaatggcataatttcgaatttaaaaatcnttttttgtgccattcattagcgntaaggcgtgagaatgtttggcgcatcggagtgaagcgttgcgcattgacttacgtccgctggcatggtgagcagtgcatctgcccgagtacgcgctgttcgctgtgctgcactccaactcggagatgtacaaagcagcgagtgcatattacaatcaggtgggagaagggaggggggggggaagtgattggacggagagacaaaaagtgatcaaagtggactcaatgtgaagcagggagggaaactgattgatcagagggaggggagacatgttgagaagcaatgatagagaactaaagatcagagagagagaggagagatgatcagacaaattgatcacttaaggagccattgctgaggaaaatgatcagaaaacaatggcaaaacaaattaaatttaagaaaattgtatgatcaatgggttatgggtaagaaaactttgatcaaacacataagttcattgatcggaaaaacaatgatcggcactttgttcctaagagggttgtcgagtgccgaatcgctgcccaagtgattgccaaacaaagcgggtgtttgccggcggacactgattggcgttctgttcgaaccctgcggcagggtataaagttgggtggttagacatgattcggatttctcgggacccgaaaaacttttcttggccaagtttcagttgctgcactgctcggcaaagatggccatccggagcaaatgttgacgctggtggacgagcacttggcaaaacggtgccaacgccaacagcagcagaaattggcggatggcattcacacgagggaggaaatttgtgccattttggactgttcagacgcacaattggcccaatggtcgttgaatgcgaacacacagaacagtgagaagaatgatctcgaattagaacaaatcccagggtttcttggctttcgcaattaaattcgacttctacccaatgatttaaatgccaatttgagacttttctcggcttagaaattggatgcttaatcagaatggcgacattgctttttctctcacttcatttaattcatcccaatttccccaaaaagtgactgagttttggctggccaaacgggcacggcacgtttatgcggaggcggcacgagtgttggaattcgaatgggtgtgccgtgaagggagagaggacaatggcacagtggcaaaattgggcggtaaattgagacaaaattcaacatttaatgaccaacggtttcccgaacagaactgatgaacgcttcgcatttgtcgtgtgcgcaactgttcgagtgcagttgccccgaattggacgaaacggtggccaattgtttgagtgcgggatgcattggtgccagactgacgggtgattttcacggagtttaatgcctggtttagtggaccaaattctataaattttggtgccatcattctaatccattcaaaatgctttaaaagtgatgcttgggccctacttttgtaggttaattttccaatgggagaaggtaagacggagtttgatgagtttatcgttccgtgatcattgaaatacatttcatgatgatgaataaaacggaacacaatacaggacggtctcaagttacata

SEQ ID NO: 22858 - DNA, 654 bp, Heterodera glycines
ttctcctcccaacggcacataaattaaaaaaaattatttcaaaatgaattattatttttttgtgattccaaaacgaaaccaacctgtggcaaaagggtgcaaacggcgaagaaagcgctgagttgccacgagcccttgggcagcaccgtctgggggatcagaatgtcggtggcaatcacagcgaaattcatgtgactgacacttctgacaaaaaaaacaacaaaaaattgggaatttttgggtaaaattttttaaaattatttatttattttattttttttgatgcgtctcacctcaaaatatgtataaaatttgtgaacacaatgcactgaaagtcttttgcgctgatcagttgctgaaaaaggaggagtggaagagcagcatacatgtgcaaggggtttctcagcccaagggccatacaacagacgattgggacagggggggtgtctcgggaccgatttttcatcatacgaaggtccaaaattttatttctccgacgaccgttttttttttgccattcagccacactttttttgcggtgttttccaaaaaacttttgaggaaggggtgacgggcggtccggcggtgccgatagaccccccctcctttacagccgccccccttacgacgcacgtgggtggggggggggggggg

SEQ ID NO: 22859 - DNA, 880 bp, Heterodera glycines
gagtcaaatttcgcaagaaaaaatgccgaaaaattgtgaaacgatgagggggggggggggggtaggtgaaaattctcataaaaccgcccaaattagtcaaaatataaattttctacccattaaacccctccctggcgcctaaaaatttaaaatttcaccaattttattggcctggccattgtaacctgaaaaatgcgtcgtagagaaacagtgagacgatcaaatgcaatccctcgacgtacggcggcgaattgggcgcacttcgccacgggaaccaagtgatcagaaaggagaggacgagaaaggggccaaaataggtgaaaattttgccacggtctttcatccaagtgccaccgacgtcctaaaaaaatatgggaaaatttggaataaaaaaatgcgcattttttttttgttgtaaagctaggccttaagataattctgaaagaaatttcccataaattccccaacgatggctaaaccatgtcggattttgttagccaaatttatatttgaatttacaaaaatttcgttaaaaatcacaccaaaacaaacagaaaatggttgtatttcttcgctaaattttcaaaaattagactcaaaaattgagtgagtctaggtaaaaaaagcacgcttaaaaatttttgcgatttaaaacttcatgaatttggttaagagtttttgttaaaagcgggagattcgctcgctacctgcaaatagccaaaaagtgggtcattgatggcattccaaatcagaaacaacagctgggaccagttgaaccaatactcgttgacttggaaaatgttgagaaacacctgaaaattggggtaaaacaccttttataacccattaaaaataagaaattcttaaatttcatattttt

SEQ ID NO: 22860 - DNA, 846 bp, Heterodera glycines
tcataaccgaccttttttggcctatttacgcgcaatcgctttccggatgccggaaccaaattgatttgattgaaatatttttaggaaataatccgttctgatgactagaaaaatttttttttaatttaaatttactgtcggattgtccgctgttggattgtccacttctgtcggattgtccaggagcactctaatttctttcttttccttccctctctctgccctaccctcccacctctatcacgctctctctctttatcccttttactctctcccgctttctctccctctctcttaatctctctccctctcggtctttcttaaccattctccctctatcttttttctctttaactccctctctagctctctctcttttcctttcactctctctctcttttcctttcactctctctctcttgctctttaactccctctctagctctctctcttttcctttcactctctctctcttttcctttcactctctctctcttgctctttaactccctctctagctctctctcttttcctttcactctatctctcttggtctttctttttctccgcataatttatgttttttaattgtatttatcttaaacgaacttgatcatccaaattgagcagcgaaaatgccatgacggaacggaaaacgtcgagcaatgaaaaaaggtccatgcacagtattgttctgtagcttgtttgtccattgctatcgcataacggaacggtgtatttgtccgcatcactgagaatggagatgtgcgactcgaacaatttcgtgaagagtgccaaatcgcgtgacaaaatcgtcccgaaagacgcgttcagtggcataaaatg

SEQ ID NO: 22861 - DNA, 761 bp, Heterodera glycines
  unsure (1)..(761): unsure at all n locations
tttcattttacatcagtaaaaaaaatcaaagaaatttcacttaaaaatgcatacccgtgatggcattccgagaccccaaaaaattttctgaagacggaattccgtgccatccctggtgcatacattcgataccaaacccactataattgaatttactcgtctttactttatgtatttgtgatttagattgatagaaaaaaatgtaattggtagagcccggaaaaaaatcatttacggagcgggagcccgaaatgttccgggagcgggagtcccataaaattcccgcgaggctcccgctcccgccgggctctagtaattggactcaaaacttgattttattaattgaaaaacagattggactcataacaaagttttcgcccctattaggctcctaaaattgtaaattttcgcctttaaaaattaccctcacaagtgaacacattgtaatatttgaagaagcaaactccgccacaaacggcacatgttctgctgttgtttatcactctcatttggtgttcaacaacattttcttcatgaaacatggaaatatgataataaatttaatggaatttgtaatttgatggaaaaaagcaaattaaaatttctaaaataaaacatatccaattgatgcattaattaattggagaaaatatttgaaacattaaaaaaatcactccattaaatgaatcgtttttctctcattttncgagacataaaaggagaaaatttaaggcaaattgatcatttttcgctaattaagg

SEQ ID NO: 22862 - DNA, 2979 bp, Heterodera glycines
ttaaataaaggtgtaaaaaacctggttttttcgcaactcctccaaacaggtacttgattgggatagcagctacaatttcccaaacaagctccgatggtaaacgacgtttgttttgttgttgttgcgcattttttcagtgaaatagacaatgaatgaatgagtattagagttggctgtaggcgtcaagcaagggatataaattattattacagtaccccaattcccaagggaaaattttgaattggcttctaaaagttttgatcagcatgaccttgcaaacacctggcgtcatattgatattcccggggattatcgattgatgggaggagcttactaatatttggatggctttataagagctcactgacactctatttggttatttttacattttcaaatttgctgttaaccagggctgtttctcaacttaaagagctccgtttatcctggcagaaaatttttcaatttgccttttaggtcttgaggtagtgcactagacatatctaatttcacgaaacgctttaggtgctctgtcgtcttgtgcttcatgggtggcggtgcgctgctcatcaggtcatggttggttgctaccgatttcacaatgatccatgcctatataagcatgctttttctctcaactcatcattttatttatgcacaaaattcaaaaatttattatttaatttaaatagatttaaaaatgtccaaacaattcactgacttttctattgacgccattctcggcaaaaaaccccgacaaggcttccttatcaaccaaattttgggcatagcacacctgctcggatctgttcaacacggcgaaggttcttccaaaaaacctgtcaacaaatacgtcaagaagttgaaaggcagtttggaacacaacgaaaagttccactacacgaaggtcaagagccgattcagcattaaggacgtgcctgccaatccggaagcactgctcgcggaaatcctgcatcgaccaatcaatagcagacagtcgcggcaagggaatcgagccaactcatcttggttgtctcatcagcagccctttactcagtggcggcgacattccgatccccatccgacaaatcacggacaacactgtcaacaccatcctaaaccgcttcaatcaagtggcacagagcaagaaacaacaaaacgttacactctgggttgaaccgtttaccgtggttgtgacaacagtggatcggtctggactccccgcaaaacgacaagtgaagggaggtgctgcttgtccattggctccagttcggcatcaaatacatgatcgctgtttgatcaaggtttaacctcaattggaagcctcttggcatatatcaatgtgttagtttaagatcaggaacccggacaggcaaaatttctgtctcttctatgcactgcaggcgacaatggttgccaagaccagaggatggccccgatgaaagttttacgattatctacaaaaccgacatggacaacggggagaacttcaacatgatgcaattcagcttatgaatcaaattggtgcacctatgaatttgaacgcgtatgatgcagatacttatgtgccgcgcgttatcgactattggaacaacaacaatcaacagcatcgattctctgtcttcatcttaggggcaacaggccaccacaagcccatctacaaatatgtggacaacacctacaacacaccactgctcctttatttcaacaacagccattttgatggggtgcagaagcagggtggccttttcggaaagccttactgtttggagtgtgaacgaccatactcgagggcaccgcaacacaataaatcgtgcagggctcgcagtttgttatgctcacggacgggcccactatttccatgtcaagcacatgctggattctttatgcattgcgatgggtgcaacaaatcttcaacaacaatgactgcttccggcaccatctccagtcaggtttctgcaataggtccaaaaagtgtaaggactgtggtgttgtttgggacgtgaatgataacaacagaaatggaagaaaaggtcacgtgtgtggtgagcgctactgcaacctctgcaaaaatttccacaatcccgaacgtggctgcttcatccaactgcttgagccaagggaaatggagccttatcggattgttgcatttgatctcgaaacaatgcagcaccagcctgttagtcctcgtgagccagagaaaagggagcatcagccaaactttatcgcagcaaaagtgttctgccctgagtgcattgacaacagcagatggcggaacggaactgcgggttgcaaagtgtgcggtcctcaccgaacagttgccttttgtcagcgccgctttgtcaacactaccgtcgacaaacaagttgtcgctgacaaccctttggaggcctttgtcggctggctcatcaacgctctgcccaaaaaattcgacacatacgcattctctcactttgggggtcggttcgacatggtcctcgtgttccgcgaactattcaaaattgggttcaatcctgaaatgatccgacaggtaacttaattgttatatttttttattgtgttattatttttagggcaataaaatgttcgagatgaaagtcaagaagcagaagaaccgcaaccccaacatcgtgttccacgactcgttcaacctaatgccctgcgcattggcgcagctggtaccttcctatgggctggaggtcgaggacaagcccttcttcccgcatttggccaaccgcccggaaaactacggtcgacacatttacccaacagtggatgactacctcgcaaatggaatgatgccggagaagcgacgacaatttgacctgtggtacgagcgcatcagcatgagccatttcaactggatgaggcattggcttcctattgcaccaatgacgtggaaatcttatcggctgctctcatcgccttccgccgcgaattctttgaagtctcgaagcggaatgactacgttgatggagt

SEQ ID NO: 22863 - DNA, 1741 bp, Heterodera glycines
tcattattaatttaatttgaaattttgtgcaatatgatattatcgaaaatggtcattgtctaaaaggtactgtcgaaacggtcattggagaaacggacattgtcaaaatgtctagccaccataaaaatttatttgttttcacattattattagaatttatttattttaaaagcacaaatctaacagtctgtcaaaatcgttaattaattccttacggtatccaaaagtgagtacaagcgcattgcggaattttctgtttaagagcaaaagaaaatcaccacaatgactatgcatgcggatcagggctgtggaccagggctggacgtaattacggattacgtattacggattacggaaattacggactttttggagttacagattacgggttactgatttttgggatttttccgtaattttgatccgtaactggcttttttagaatatttttcgagacgatttcttgtaagattttttttataaaagaatttattctatttttattaaaaggctacccatatttcgatttcatctgacttattcttgttaatttgtagtattattaacatacataaagggcggggggcgggaggctagcgaatgggaaaagaggaaatgtctaaaaaatttggctattttttaacaaaattcgttaaaaattctgaaaatttttcctcggccgtacttatcagcaccgtccgccccaaaaactcctaattatttttaaatattagctccaaacttagtcctttttagacaacatcttttaacaaattgcataataattttcaaaattttttttggcggcgcctttcggcgccgcctgacccccccccccccccatgttccccagttttttggataaagcatgccacgaaaaaagctgtttaaaaaaatcaaaaaaggtcgtcaatttacatagctgggacccttcacaaatgattcccaaaatgaaccctaaaaattttaaaagaaaagaatgaatttttacgtcacaaattataattatttgcctttcggcaccgccaaaccaggaaatcgttttaattttgtttaaaaaggacttctaaaagggtgagattactgaaaattgatgaaaaaattttgaaaattttcgaccacagctctgaatctgccatttttgcccctatttttctatcttcctcccggctcatattttgggatttttcacctcaaaaaatcatgcaaagcttttattctgatcataagttactcttaaccaatttttagattggatttttttaaataaaaatttttacaattaaaattttttttttttaaattacggatcacggattacgcctaattacgcctttttggacctccgtaatgacggattaagccctggtgccgataggcgcgtgctaaggaattttttttaaaacctttgtttgattttactaatgtattgggttggcaaataagtccgtgccattaaaaaaaatctttttaatcattttatagtgaatttaaaatattatgaaattgtaaactagaaaaaatgaaataatttttttaaaaaatattttgtttttaaatgtactttaagtttttatttatttggaatagcacaatcttttgaatttttcaagagaatctattggtttttttttgtcaattagccctaaaaatgtaattttttttacatcaatattaaatcaaaaatgcttttttcaaaaggtatgactgagtttaaaatcaaacgtaaattattatctat

SEQ ID NO: 22864 - DNA, 977 bp, Heterodera glycines
  unsure (1)..(977): unsure at all n locations
ttaatgaccctgtgccatgcctaccaatgtctccgtgtcncaatggaaatggacaagccccgtctgctcaaatccgtactccttcaacgtgttctcttcgtccaattttttcttttggtatttgttatcaaatgcaacagcatccggagtgagtgtgaatggaccgtattggaaggaaaggtgccgagcaacaaactcacgaacactcgcaaacttttcattctcatggaaaatgccctataaaactggttttttatcaaaaaaaattaatatactcaacggaatatgattttaataaacagatttgcaaaataatttatatataataaaatttgatatttaccgctttccggaaatgagccgttttttatttggaccggtaaaaagtagagaccggacaagagggtcggtcggtcggtttcggttaaaaaccgaaaaaaaaccgaaaccgaaaaaaaccgacgaaaaattttcggtatatcgtttcggtttcggtttttttgaatttttatatttttccaaaaaaagcaataaaacatttttattaacagaaaaagctaaagatcacctctgagtaaaattgtaaagctattgaagctctatcgaatggtgtactaattttggaaaattgaaaaaaggaagccaaaaaacatttttttaaatagtgagaaaaagtgccaaaatagttaaaaaagtccaaaatagtgacaaatagtgactaatacaaaacttttagtatcactatgatgaaattaccttacaaatagagatgattgaattttctattcataactctttcaattaataacctaatatgttataaaaatggatataaattatattcttttgcatattttttctgcgcatgtgcaatgaagaaaggggttcaaattttttttaataaatttaatgctattttttaactgattttgtctaaaaataacaaattttgagattttgggcttattttttaagaa

SEQ ID NO: 22865 - DNA, 1005 bp, Heterodera glycines
ttgttgtttgagccaacattttgtgctaacatttgcttcctctttcgcttctttaagaattaataaaatatgcatgagaaatgtgggcaatgcctcggggggcggcggcgtcaaaatgccaatggcacggcgcgacatgccaaactttgattaggcaactggtgaaaaacaagttctccattttcattgcaccttcctcaaccacagtggtgggcttgaagacaaacagcagcaaaaagcccgctaaattttgtgtccaattaatttgaaatgaagcgaagaagtgagagagataaaggggaaaaagagagagtgaagagagaaagagtgtaagagagagaaatggagaggaaagagtatgagagagcgaggcagagagaggagaaagtgaatgaaagaaaaatggggaagagaaagagtggctgaaaagaatagtgctgctgaagagagtgagagagagagggagataaaaagagaaagcgcatggaataaaaacagacagagtgcggatgagagagcatggggatcggagagagttaataagcgacgaaaagcatccttgagggctcgacgcaaatccacgcaagtgtcatgccgacttctagtggaccaatacaattcggactgcattcgccacaaccttcaactccaaccattccattgtcagaagaaagcagcttgcagcttattccacgctgggaacaagacatcgtctgtcctccacgcttcccaatctcgttttggaatgtgtacaccagagctcaaatggcaattgagcgaacgaacaacggcatggaagccgcgcatggacaatttgcagtaaaaatttgtccgttggaaaacacttattttttgttaatttagcgtgaactcaatcatcatcccgtcactgagtgatttcatagcagcattcttcaggacatcgacaaacactggacttcggacgcgcaaaacagttccagaaaagtagaaaccaccgcaacgtacattatcaagaacaaaatg

SEQ ID NO: 22866 - DNA, 1277 bp, Heterodera glycines
cgttaatgaccccctaatgatttttcgcttctttaaaattgaagccgatagacaaaaagccctaaaaatgtttagtggcgctccatgggtaatgttgatgaatcaaccgcaggcactgctgaaacgcaacaccaacagcatcataatcagcatgccaatttgaacgtcagcagttttggcgggttgaaaagtcggttggcattcagtttgttcgggttgggcaaaagtgccgagacggagagagacaaatcgttgacaatgacgacggcacaaaagcaacaacagaagcagcagcaccggcgaagctcgtcagctgccactgtgccgccaaatgtctgcttaatatccaatcattcatcagcaacgacgtcaccgtaccatccaatcggtggtggcagcaacggcagagtgccctgcggtgcgacagcgaaacgaaaagccgaagcgacggcacatgccaacggaacgcaagcgggcatgggcatcacaaccaagcgcatatcgaacacagctcaggtgatgcaagaagaaggtctatgctttgctagctgttcatgctttacggtctgcagaaaaatgggggatttatgatggcaaaagcggggggatttttcttcaaaagtcccccccccctccccaaaatccgtttaaatatatacatatatatatatatatatatatatatatatattatatatatatatattatatatatatatatatataagcatattaccgttttcttacctgatgcagcaactgatcatgtcctgcttggacaagtcccgtggcgatctgagcgggcgcgtcctttcccgtgccattcacaagcgtgccgacttcagcacattttgtgccaatctttccgccgctgaacaatggataatcttttccgaacagttccacacatacattatggatgtgctcggatcactgcaaaatgttgagcaggtaaaagcgtcgagggcataagaaaagatcggaatttgttaaagtcgaaagggaacaaaaatggtcaaaaaatgttcatagtgtcaatcatatcaaaacctattcggaagagacaatcaatcggaatccaagtgaattttggaataaataattcgagtgcccttggccaataagtctagagatagccatagaagaatgccgaaggctgttgtataaatttggttggcttatcctaattggtcgctctagaaaagtatggaatttcaatcaaaattaagcgcaatttcctttacttagtcttaatggtatcccctaaaaattgtaaa

SEQ ID NO: 22867 - DNA, 1664 bp, Heterodera glycines
cctagacatgtctttatgtatgatttaaaaacttttttttatggtctgtaacgacataagtacccaaatttgggctgtttaaattgagcaaaataaattggcctaccaccgccgccttctgaacatggcacgtattgaacaggataaactctggagcattctcattgaatggtgccactaaaattgaggtcggcgggggcttgtcctcctcttcttcccctaaaaattcaattaaaaaaacaattttattttgtcggagtgcctggccgtccaaatcggttgtatgaaactgcggtttgatcacgatgacggatcagccaactgcgcattttttgaatcattaagacccttccaccactttcagacccctcccgacagccgttcgactcaaattagtttttaagacgagttgcaacttttctctatatatgtataaactagcgggtgtgtgcatgcgagggtggcgcttgggaaagcgctgcgcgcttcttgagcttcgctacctaggcgcgttttagtctgttagggtctttgcgtcagccgacatgcacttggtttcctccaataattggagttgacacatcgcataatgcaatggaaaccggaagtgccctaacgttgcacgtcatggccctcctccctcccttagtccaggcgttggcacgttattgggttgagcgctaaatggcaattcacctgtaggccctaaagagggctgaccggtccatgtcccggatccaagcttctcaccattttcgcacccaacatagtgcagatgggaatgggattggcatctctccaaaaaccatgtgcccaactgctctggactaagccatttattgtaacttgagcatattagtagctacaatattcagcactttggctcggccttgggcatcaatttcccggttgggagcatgaacacggacattgtttccgtctgtcgcccgagagaaggccgtatacaattgaccgtgggaaaatacttccctttccagatcaatgccgacagtgcggattgtttggccctgaccctttttgaatggtcatagcgaatgcaggctttcattgggaactgccaaagctcgtattttatgccgccaggcgatttgtcttcatagacatttcgtgttcttccaagaaagaatctcacttggccgccaatagcattgctattgataacacgaccaatgaggcgatcatcgccaagttcttccagaactatgcgtgtgccattgatcagtccttccttatcacttttattgataagaaggacgacgacgcatccgactttaagccggagactgtgcgggggcatgcccgagtctgtgcgccggttcaacgcagccacttcggactcgatctcatcgatgtccagtgggcggtcgtcaaggggcttatccgtggacaagtattcccgcacttgacctggcacattcgccatcatgatctcgttgacttcatcacacgtgtcaatgtgcggagcgagaatcaaacgattgagcagctctttgtcattgccaaggagttgttggaagttaggatagacataatctatcagctcttccttgctcttaacgaggaactgcggaggaatccagaagtgctctccggtttctccgggagagatttggcggcacatttgcaagtacgcttgctgacct

SEQ ID NO: 22868 - DNA, 1593 bp, Heterodera glycines
ttatggctctgacagtgccgacaaaaaggtcggcgaaggctcttacattcaaaattggggcattaatctgtaaaaattgtcaatttcccaacccaaaatgtctcctaataaaacttcagacagaaaaacctgttttttgatgtcctttgggtgtttttgtggtggtgccggtgcttgtccaactccatcaccatcgttctcctgctgctgtttctcctcttcactattcactcctttttttgatgccttttgctgctccggaaagtgcgctttgtcgtcccattcgttgtcctcggatttctgcatgccatcctcgtggggcgctttcatctgctgaacggcgagaaaatgatgaaaatttgcttttttatcacaaaattttccgtttcacaatttaaaaaaatctaatccgaggttcgaattaggcaaaagaatgtaggaaaattgttcagtaagcatgaaaaaaatgcataaaagttagcaaaattggaaaattggtgaattttagaattttttttttacttattttacgctaacttttccattccgatcatccgccgatgaacgaaccatgaaaattgtgccagtgataattgtggcgatgaatgcaccgcaaacgcaaatttttaggaaatggacgatcttcatttgtgattgtgctttggaaaataagggttaaaaattttgttcaaaaaaataagtaaaaatgttcatgttgcacaagggactcgaacctccgccctctttccctttactattttacaaaaaccacttcgccacacattcatttcctttttgaacttggagcctaaaattgactcggtgtgttaatgaacgcatttttggcacctgattagagaaaggcaaatcaacatttttctcttagcgaacattgttttaataaatatcaacattgacgttgatatttaattaatagggcagcaacttttagtgaaaaaaactttttttttgctcaattgttttgaagaaaggagctcaaaaaacgcatttctgcattaaaattttttcatttggacgtcacttttcgtcactagaaatcactattttggggttttgtcactaaaatagttaaaaatcactattttggcgttttgtcactattttttcactatttcgacattttttggaaaattccttaacaaaaatgtaataaaaccaaaaaatacacccctaagaatcgacctaaaaaaatttcaaaaaaatacacccctaagaatcgacctaaaaaaatttcaaaaaaatacacccctaagaataaagcttcaaaatatactcctatgaaatgaaaaaaaaaatttctcaaaaatttacattcttggcaaaaatttttattttaaaaatttttttaggtaactattttgggttttttggtcttaaaaatcccagtcccactcatttgcaactgcaaatagtgaataaaaattagttttgctcaatttttggctgaaaattatgtcactattcgtcactatttcagactttttgtcactatttcttcactattttggcatttttactcactattttagttaactattttgggatttttcgtcactaaaagttgctgcccta

SEQ ID NO: 22869 - DNA, 1078 bp, Heterodera glycines
cctccgtctcatacgcaagcgcttttgtgaggtataaaatttctcaaaaaaagagatagccatttttctgggatagagtataaatttaaaaattccctcaaaaataaaaggtctattgcgcaccgccctccctatcatgctcgagagcatttgtatgtgtataaaatttatcaaaaaaagagatagccatttttctgggataacctctaaatataaaaatcctctgtgaaataaaatggcgattgtgcacagccctccgtctcatacgcaagcgcttttgtgaggtataaaatttctcaaaaaaagagatagccatttttctgggatagagtataaatttaaaaattccctcaaaaataaaaggtctattgcgcaccgccctccctatcatgctcgagagcatttgtatgtgtataaaatttatcaaaaaaagagatagccatttttctgggatagagtataaatttaaaaattccctcaaaaataaaaggtctattgcgcaccgccctccctatcatgctcgagagcatttgtatgtgtataaaatttatcaaaaaaagagatagccatttttctgggataacctctaaatataaaaatcctctgtgaaataaaatggcgattgtgcacagccctccgtctcatacgcaagcgcttttgtgaggtataaaatttctcaaaaaaagagatagccatttttctgggatagagtataaatttaaaaattccctcaaaaataaaaggtctattgcgcaccgccctccctatcatgctcgagagcatttgtatgtgtataaaatttatcaaaaaaagagatagccatttttctgggataacctctaaatataaaaatcctctgtgaaataaaatggcgattgtgcacagccctccgtctcatacgcaagcgcttttgtgaggtataaaatttctcaaaaaaagagatagccatttttctgggatagagtataaatttaaaaattccctcaaaaataaaaggtctattgcgcaccgccctccctatcatgctcgagagcatttgtatgtgtataaaatttatcaaaaaaaggatagccatttt

SEQ ID NO: 22870 - DNA, 2167 bp, Heterodera glycines
actatgtgtccaataaatgaccatattcattttattagaggacttttttcttgctaaatgccaacattcttggtatcaaataaaagatttaattcccggtggtttataaatgtaaggagagagagcaaatactggcattaagaaaaaagtataatgaaaacaaactgctataattattttaattttaagaataattttggtttgttgtttttacattggttggacgcctaaagtgcaatagagccgtgaattgagtgttttatgatttgttctattaaaggcccaaccgatcacactgacgaaaatgcccaacgtcctgaacttctcgacgagaatggccatcgttacgtcggcctcttcaaccaagcgatgacttgctatctcaattcgctgattcaaacattgtacatgacccctgagtttagaaataaagtttacaggttgtgcttaattcctggtaaaatacggacttgagaatttcagttggaaattcgtcgacacgccgacggatgaggacaataaaaacattccttaccaattgcaaagactgttcttgttgctgcagaccagtgagaaagcgtcgctggagaccaaggagttgaccaccagttttggatgggtgtcaaacgaagcgtttgaacagcacgacgtacaggaactgtgccggattatgttcgatgcattggagcaacgatggcgcaaaacggagaacgacgaatcggctttccataagctttacaagtgggtgggttcggcagaatgccgaaaattgctgtgaattttcagaggcactgtggaagactatgttaaatgtttgcgttgcaaaagagaaaatgtgcgaaaggacgactttttggatttgtctttggccgtcagaccgttcggcgccagcgaatcgtttaaatccatcgtaaaaaatttgatttgcaattgggagaaaaataatgaaacttcgaaaggaggaggctttgagtgcgtttattaaacccgaaatactcaacggaaacaaccaataccaatgcgaagtgtgcgcatcaccgcaagacgctgagaaggtgaattatcaatgaaaaaatagaaaaactgccaaaaaaacttaataaaaaagccacataattttggattggttctcgacataaaattgcatcttttgcatttcttttgtactccttcattttcagggcttgcgcatcgtcgaatttccgtatttgttgaccattcaattgaaacggttcgactttgactatgcggctttgcaccgcatcaaattgaatgacagagtgacatttcccgattatttggacgtcaacgactttgtttattcgccttcggcgtcggcccaaccgaagccgagttacgcagaaatggccaaaaagtttttcggtctacgaatttttagaaattgacatggttttgttcagactaccagagcaggacacagcagttcagccatcgacgaatggacagtgcacttccgccacagaggacgaagtcgcggcggactgtccgaatggggaagggccaagcggtgaacattttgttgtgggacattaggcctaatttctgcggcaatttcttaccaccgatggcattttccatttaggtcaaaggcttgtggaagagaaaactcgtgctgaacacattgctcaattattgaagcgtggcaaatacatttacgagttgttttccatcatggtacaccagggaagtgcgtcggcagggcattattttgcttatataaggtaaagaaagacccatttgtcaaactgattgtctaaatgctttgccttagaaatttggaccagaataagtggttttgtttcaacgattcgtccgtccatgtcgcttcgcttgacgacatttttcgaacatttggtggccatgccaacggatggatgaacaatatgaacggttctaaatgctatttgtttcgtgatttgttctcatcggtcccttaaaagcgtatatgttgatgtaccgacaaattgatcacagccaaaacgaacatttcgtcaggagcaccgaacttcctgagcatttgattctgctcaaggacaaattggaggcggaggaggaagaacgaagtcgacaacgacagattgacgagcagaattccgcgcaggtgagaagaattttaagcattttcatgaaaggagttaagcaggag

SEQ ID NO: 22871 - DNA, 1120 bp, Heterodera glycines
ttaagctgaaacttgaacgaattgacggaggggcaccaccattagtggatcctcgtggctttatttgactcctacggctcggacaccataaggcttgacagattgttttgctcgatcgtgggcattaaagagttgacgacccagcttttgtgggcacaacttcttggtggatgtttggtggtgcattgactggcttcgagtcaaagataataagcaataacaggtctgtgatggatgtctgggaatgtacagcacattgcaatattgtgcgtagccgcgaggacactcctagtaaagatgcgttatcaaaccatcttgaatacgtccctgccctttttacacaccgcccgtcgctgctcagaactgagctatttcgtgattttcgtggacggttagtgttccagctgcagttgcgacgcagactggaaacgatttgatcgcaatggcttgatctgggcaaaaagtcgtggatttgattacacagttgattggcggtaagggttcgccgcatgtgaatgtgaattggatagacaggtctgtttagaaagtgccgcgagcaatgttcttccgttggatttggtatgccgcccagtgctgcacaagtgaaagccaactgctaggctgcttgtgtggtaatgggatggtggcggatcgccttgctttggtgggtttgctgtccggcggaggagacatgttcgtggtgcgaaagaaaagtgcgtccattcgctcgtacgtgagtacctgactgcgcagcaggcgaaagcgtatgagtgttatggatggactcaatgttgaactagcgaggcaccaccacatgcccgtctgctgcttgcggacgccaggcccgttcgatggggtctgtggcgctggtgatgatacattgttacatactgttcacagtatgttccgtgaccctcaagtgccgcgagcaatgtgctcttcttcagttggatttggtatgccgcccagtgctgcactagtgaaagccaactgctaggctgcttgtgtggtaatgggatgggtggcggatcgccttgctttgctgggtttctgtccggcggaggagacccgttcgtggtgcgaaagaaaagtgcgtccattcgctcgtatgtgagtaccc

SEQ ID NO: 22872 - DNA, 1135 bp, Heterodera glycines
  unsure (1)..(1135): unsure at all n locations
aaaaaataggcccaccccagggctagggagtttttttggatattcagaaaaaacaggtccaggccagggctaggagttttatttggattttcagaaaaaataggcccagccagggctaggagttttcttcgattttcagaaaaaacaggtccagccagggctaggagttttattggattttcagaaaaaataggcccagccagggctaggagttttcttgggttttcagaaaaaacagtcaagccagggctaggagttttattggattttcagaaaaaaaaataggtccagccagggctaggagttttcttggatattcagaaaaaacaggtccagccagggctaggagttttattggattttcagaaaaaataggcccagccagggctaggagttttcttcgattttcagaaaaaacaggtccagccagggctaggagttttcttggattttcagaaaaaacagtccagccagggctaggagttttcttgggttttcagaaaaaacagtcaagccagggctaggagttttattggattttcagaaaaaaaaataggtccagccagggctaggagttttcttggatattcagaaaaaacaggtccagccagggctaggagttttattggattttcagaaaaaataggcccagccagggctaggagttttcttcgattttcagaaaaaacaggtccagccagggctaggagttttcttggattttcagaaaaaacagtccagccagggctaggagttttcttgggttttcagaaaaaacaggtccagccagggctaggagttttattggattttcagaaaaaaaaataggtccagccagggctaggagttttattggattttcagaaaaaaataggtccagccagggctaggagttttattggattttcaggggaaaaaataggtccagccatgggtaggcatgaatttctgatccaaacttttttgaaaaacttttattttcgtgttttgcacttgcaaaagtaaagcactggtcaaaggcagggctaggagttttcttggatattcagaaaaaacaggctgcttccgtatnccaacgttggaaaaaaagcttaggaggaaagacacaaaattcaattgcaaatgggtccaaact

SEQ ID NO: 22873 - DNA, 1389 bp, Heterodera glycines
ttttaatttaaaatttctaaggacagaatggcaaatattcctcaaatcatttttaaaatttcttatttaaaaacattttcccttgcaaatctcacccataatttatgaaattttccggcggcgtctatcggaaccgccggcacgcaaaagtgtttatacctttaaaaaattgaacaaaatagcgaaatttggttatttttgcgcaaaatctgctaggaaatcgtggcaaaattttcgaaaattttcccggcggcacctatcggcacagccggctccttcccctaatttaaatttttttcgaacaaagcccacagtgaacgttgtacgaaagttttaaaaaatctgatttacgaattgaccccattgacaattgaccgtcgtacacctctccgacacctggaactactcaaaaaatcttggtaacaaaaattcatcgttttaacaagtcttaaacctaaaaataataataaaactcattaattttttttaattcgctcgaataaagtaatttaggcaaaatatttgaacaaaccttaacaaattttcaaaaagtgccttaacccaaaactcctatttttcttcaaaaatttgttcaaaattccaaaatattttttgacaaaatatgtacaaaatgaactgaaaattttttaaaaatctttcccggcggcgcctaccggtgcagcgggtcctattaggctccaaaaatttttaaaaaaattataccgaaaaagacggtgtgaaacaaaaaaaaaagttcaccgccataaaaataaattctaccatttgtatttttcttttatgggggctttcaattttcgtcttcttaacaacattcagaaatgttttttcataacgtaatgtgtcactaataaatagggttcggaattacatgcacataaaatcgtaaaatatgcgcataaaatatgcaccaaaaaacgcgaaatatgcacataaaattttccaattgagggtgtaatttctcaaaatttcttcaaatttgttaaacataaagtaaaatcttcaaaaattggctaaatgtggtattaaaaatcattttaggagaaaaaaacacgatacagcttaaaatttactcattttagcgaaaaatcaacctgaaaagcaaaattttgcttatttttgacctaaattaaccattttttgagaaaatttatttattcaatatttttcgtgaaaattttgctaaaaaattattttttttggaaaattttccggtttttgaggtaaaaaaggccaatttgtctgttgggggccgttctattagaggttttttggaaaaatgccaaaatatgcacaaatatgcacataaatcgcgaaatatgcacaaatatgcaaaatacgcatatggaaagtcatcctagaagcttcaaa

SEQ ID NO: 22874 - DNA, 1234 bp, Heterodera glycines
gttggctcctccgtcctcattcattatgcttaaattggcagttcacattttttcagctgccgctgaaatagccgcaaaaagccccgattttttgctggccaaatccccaattttagttttacaaatattttgatataaaaaacgctataggagggggggggggggggggggggagaggagggcgtcaccttgctgccaaatttcgatttcaatctcatttatttcactttacatttgatatatatgtatgtatttatgtacataattttctattttctctctatcatttgctctctttctctctcttttccttttcgtcctcctcttccaatttcttcttctccgcatggacagtaatttataatccattaattactgtacagtaaaatcaatttttcttgtttgatttttgattccttcgctttcttttcaccctccacatttttttattgtcctttcgcaagaatttaatttgtccaccctcatgcggtgttccctccccctttttaatctccgcccactcccacacggatacaatcatcataaccaagaacaaattgccgcaaatcctttcattataaattaattgtaacacagaaataattgataaacactttttgattgatcaaactttgtcagctttatttttggttctgattttttgaacagataatgacggttttaattgatagaactaaaggagagggtcccaaaagggacccccccccccgaggggtttttttgtcgtcacgcgactctttccgtacgtcgcccatcgggcgctttgtctgactaatgtgaatgaatgtttctttttgagaatgtttgaccccacctgactgatagaagaaacgacgaacacttctgccgactaaactttgctcttcgatttttggcttttctccaaatgattatttttggtctttttttgattacatttttttcaatctaatggattgtcccaataaattcggataaatgccattgcaagtgatcaaatgatgaatcactctcatatcatctcccctagcgttacttctccgatcagtcactgattggtttgctttgtttttcattggcttttatctctccgattttcttcccctccccaatttataatatacatatttcatttccgttgctgctgctatgcactcattttctgtcctctccttcactctactgctgataatacaattgtttatttggggaagctaaatattcctcttggaga

SEQ ID NO: 22875 - DNA, 1178 bp, Heterodera glycines
  unsure (1)..(1178): unsure at all n locations
ggacgtagcagcaagcacaaacacacccgttagttacggcacgtaagaccgggaacgaaacccnccatcccncagtcaggtgttatgtgcctgccacaacaaccgcntcaacgacgcacagacgccagcacagccgttaggtcgccccacgagcgtgcatcccacattggcgcagcgaaccagccaagcgaggcggcccgccaccgacacattgccacgcagcagccatacacaggctttcacacgtgcagcactgagcggtataccacagctccaacgtatggaagcaccccaaaagcatggctcgtgaggcagctgccccgtaatgttgggcagcgtccacaagtcatctcgaacgacctgtgcccatcagcggacgggggcatttggtggtgccaacgctagcccaacaggacagcaggtaggtggtgaataggaatcacttgggtaatgatccagcagcaggttcacctacagctaccttgttacgacttttgcccggttcaagccactgcgattaaatcggttccagtctgcataccgaccgaagccggaacactaaccgtccccgaatttctcgaaatggctcagtcccgggcagcgacgggcggtgtgtacaaagggcagggacgtattcagagcgagttgatgactcgcccctacaaggaattcctcgttcacggacaataattgcaatgtccgatcccaatcacggcaaattttcaccggtttaccaacccctttcggggaaggacaagcacgctgattttgccagtgtagcgcgcgtgcagccccggacatctaagggcatcacagacctgttattgctcaatttcgtgcggctgaacaccgaaaatccctctaagaagttgtgcccacagaagcaatgagccaactatttagtaggctagagtctcgctcgttatcggaataaaccagacaaatcgctccacgaactaagaacggccatgcaccaccatccaccgaatcatgaaaaagctatcaatctgtcaatccttacggtgtccgggccgggtgagtttccccgtgttgagtcaaattaagccgcaggctccactcctggtggtgcccttccgtcaattcctttaagtttcagctttgcaaccatacttcccccggaaccggaagactttcgtttccgggaagctccccaccag

SEQ ID NO: 22876 - DNA, 1830 bp, Heterodera glycines
  unsure (1)..(1830): unsure at all n locations
agtccacagagaaataatcagtgtgctgccttctaggaatnngntggtgagtgagtgananngnnnaanactttacagagntgtgccaaaaatatcattagacattgtgccaaaaaacagatgaattatgcccctgatattttacgttaatttaatcactgtccttttcgttaagcgcggattttacatccatggtcgttctgtgcatggctttgccgacactgacatgctccagatgaaaaatcccttggcatggcattagaaggaaaatcccctggaatggcattggaatgaaaatccattcgcatgcattggaatagaaatcccttttcttcttttgccaggacaatttgtgtgccatgcgcggcttggagtcgaggcaaaaaaaaatgaaaaaaaaatttaaaaaattatttcgtgctgtcttacttctttgatcactgatcagagcccgtaagggtatttactcggcgtgcgaatgccgttttgtttgttgttccaggcaattgttatttcggctttgtttggtttggccattgtcccctttttccagggactgctccgagtgcgagtacagctccgcctttctctacggcaacgaatgggcactgctctccgccgagttggcactgttctgtttggtggatttgttctggcgccacagactgctcgccgccttcgtcacttttttactgtccgcctccgttcgccacacggtcaagctgtacttcacccaccaattggttaagagcagcatggtggacagccgatttctgatctgatcagaccacttctgatcagaacggttgctgatctgtcctcctctttaaattccccgtcaatgcggtgttaatataattgatcaattatcacctcataattgtcattgatcagttcaaactgttcctttgttgtgaccaacatggtgtccaaatgggagaagccgacgagcctaagcgggaaaaaattacgacggattaacaaaatgccaccgtatttttgaggtttttggccataactttttttgtaaaccgacgaaattttttgaaattttgcaagctaatagagaatcttaagagctattaaatgatacaaaaattttttaatttttgttgctaatgagaaaagttattaacaacggcggcgaaagggtcggcggcgaaccgggcggttcccatcagacaccgccggaccggaaacaaaaaatctaagggggaagagaaaaagagaagggagaagagaagaagagaagggggaagagaagggggaagagaagaagagaagggggaagagaagaagagaagggagaagagaagaagagaagggggaagagaagggggaagagaagaagagaagggggaagagaagaagagaagggagaagagaagaagagaagggggaagagaagggggaagagaagaagagaagggagaagagaagggggaagagaagaagagaagggagaagagaagaagagaagggggaagagaagaagagaagggagaagagaagaagagaagggggaagagaagggggaagagaagaagagaagggggaagagaagaagagaagggagaagagaagaagagaagggggaagagaagggggaagagaagaagagaagggagaagagaagggggaagggtgttgtctgtgtctgttcctggaattctctctcatccttcaacagtaataaaagaacacaaagatgtaattaaggttttgcttcttgtttttcatgatcgcgtaaattcttccctttttttaccaatttattcagaagttgtttctccctgtgcacccattcacttgaataataacaaaaattta

SEQ ID NO: 22877 - DNA, 1723 bp, Heterodera glycines
  unsure (1)..(1723): unsure at all n locations
cgtttgtggacatgtatgccggtcttgggttggatgactttgacacaaaaacggtgtccattggactccaacgtttcctaaactggatgggctttcttcgtcatcccaatgacctcaacgctggatgatacggacgggtttgagctgatccgacagggcacgtgcacgcttaaagtccaatttgagaagcctataaaagatgacggttacgaaatgttgatcctcggcgagtttgattccgtcctttccattaacgctgaccgtgtgttgagcacagacggaagtgtttaaacaaagagagatagagagagagagagagagagagaaaatgaattctgcacaaattgacacgttgctgagaagattgcgtgcaacaagaggtaagttcatcggtgtctacccgtcaaacaaagtgccgctgattcacgacagacagagacgactgcagcgctatccgcactgcatggttgtcaacacggaccgggaaggcacacggggagaacactgggtggctttttatgtgcctagtgcaactcaaattgagtactttgacagcctaggtgtggcaccaaaccctgatctgtctgcctatctcaacaattttcgccatgttcaagtgaacacgcagcaaattcagttcccctcatcggacgcttgcggccacttttgtgtctatttcttggccagccgttgttccggtgtcccgttttgtgtggtggttgagacgttacgcaaaacgcgcgggatggcggactggttggtcaaatggtatgtacgcatgttagtccatcatgtataaaagggtgactaaaagagagggatgccacacaaatgcccgctcgctataaggcggataggcactagaaaaaatggcgttattttccatgctactaatgctgctgctactcctgctccatctgtccggcggagaatggatcaacgtagagctgagcgttgacccacccaatttctttgaccgcacctttcgctccctttccaagacatcacccatccaacattggttcggctacaaccggaacaccgcgtgtcacgttgagcgggaaacaaacataaatcgactgtacaacagtgctgatatgtggaacattgccctcactgatgtggacaacttcatgagcatggggcggcaaactatcgagttgttgtccagcgcattgccgtgggcgtgttttggacatgaccgccacagttttgtgatttttgaccttcgaaatgacgcaaatgaagtggcagttgtgcgcggtcatcagcacaagatagcacgaaatttgagtgcgtatggacgcattttgttcgaccatatttccggccggttgtacatggtggacaagcacgagcgccggatccatgagctgctcatcaccgattttgtgcgatggtggactctgaataacactgacggaggtggtggtggtggtggtcataacggcggcggtgagaacagcacggcaacacactcgttgaggagcaactttgtcgggtttttaccagaacaaaaaacggattttttcattgcggccgaccatgtgtacctgatttggcgtagacgtgtatacaagttccgtgttgggcactacttcaatgatccttcctcgcagctacagtttttgaccaactccagtgacattcgcttcaacttcctcatattcgagagagatgatgacgccanaattggaagacagcactgatcgtagaaacagca

SEQ ID NO: 22878 - DNA, 1186 bp, Heterodera glycines
tctttacaaaataataccctctgagagaagagagtgggacacatgattttcgaaattttcaatttttttgtattctaatctactcaaaccggtttcagaattcaataaaaataacattcacggtgcgaaaaatggggtatgaaaaattattggggaaaaaaagtttttacaaaataatacccctgggagaagggagtgggaaacatgatttcgaaattttcaattttttgtagtctaatctactcaaaccggttcagaattcaataaaaataacattcacggtgcgaaaaatggggtatgaaaagtttattggggaaaaaaagactttttaaaataatacccctgggagaagggagtgggaaacatgatttcgaaattttcaattttttgtactctaatctactcaaaccggttcagaattcaataaaaataacattcacggtgcgaaaaatggggtatgaaaagtttattggggaaaaaaagactttttacaaaataatacccctgggagaagggagtgggaaacatgatttcgaaattttcaattttttgtagtctaatctactcaaaccggttcagaattcaataaaaataacattcacggtgcgaaaaatggggtatgaaaagtttattggggaaaaaaagactttacaaaataatacccctgggagaagggagtgggaaacatgatttcgaaattttcaattttttgtagtctaatctactcaaaccggttcagaattcaataaaaataacattcacggtgcgaaaaatggggtatgaaaagtttattggggaaaaaaagacttttacaaaataatacccctgggagaagggagtgggaaacatgatttcgaaattttaaattttttgtagtctaatctactcaaaccggttcagaattcaataaaaataacattcacggtgcgaaaaatggggtatgaaaagtttattggggaaaaaagactttacaaaataatacccctgggagaagggagtgagaaacatgattttcaaattttcaatttttttttagtctaatctactcaaaccgggtcagaattcaataaaaataacattcacggtgcgaaaaaaagggggttgaaaagtttattttgaaaaaaaaactttacaaaaaaattacccctgggaagaagggaggggaaaacatgatttccaaaatttt

SEQ ID NO: 22879 - DNA, 1454 bp, Heterodera glycines
tgggttgagtgccagtgattgaaatgttggtgggtccctctcagtgattgaaatgttggtgggttgagtgccagtgactgaaatgctgttgggttgagtgccagtgattgaaatgctgttgggttgagtgccagtgattgaaatgttggtgggttgagtgccagtgattgaaatgttggtgggttgagtgccagtgattgaaatgctgtgggttgagtgccagtgattgaaatgttggtgggttgagtgccagtgattgaaatgctgttgggttgagtgccagtgattgaaatgttggtgggttgagtgccagtgattgaaatgctggtgggttgagtgccagtgattgaaatgttggtgggttgagtgccagtgattgaaatgctgttgggttgagtcccagtgattgaaatgttggtggattgagtagagattggaatgttttgatcattgaaagttggtgggttgagtgccagtgtttggaatgccggagatttgagtcccattgtttggaatgccggagatttgagtcccagtgattgaaatgttggtgggttgagtgccagtgattgaaatgcaggagaattgagtcccagagattgaaatgctggtgggttgagtcccagcgattggaaagcctgagaattgagtctcagagattgaaatgctggtgggttgagtcccagagattggaatgtcattgaaagttggtgggttgagtcccagtgtttggaatgccggagattttgagtctcagagattgaaatactgatgggttgagtcccacgattggaaagcctgagaattgagtctcagagattggaatgctggtggcttgattttcagtgattgaaatgttggtgggttgagtgccagtgattgaaatgctggtgggttgagtcccagagattggagaaaaagccaagaaaatgatgcgaggccgcgaagcggccgagccagtcgattttatcattcataattctataacacaatcgtactgcctagcgggggatgcgccgaaggcgctgaccccgctagtgtaaggatattttcgactaaacataaccaattccgagtttcatgaggcatcaacttcattcttttcttgtcctgcccaattgtctcaaatgtatacctaaaaatgcgctaaaaatgatcaaacccgtttttagccgaatatcctgtcaatatttccctattagaaacgatactgtgaattctttcgcctctttaatattcattcgtgctttgcttcggattagtctaaaaatttctggacgccaattttacatattagccaatttttattttatttgtgaccgccaatttttacatactagccattttttattttattgtgaccaagcatatctttcctcgtatttctgggatttttttcgaatgtggtcatagaataggtgggttgaattatttgtattttttatgagtatcat

SEQ ID NO: 22880 - DNA, 1355 bp, Heterodera glycines
  unsure (1)..(1355): unsure at all n locations
gtttttatcaggggctcccaaatttttttttttcaaaaattaagacaaaatgggctttaaaaaactaagattcgggaccacaaaaaataagatttttttctaaaactaataatagcgcaaaggaaacgcaataaaaacacgaaaaatcgacttaaaaaatatttttttagcgtaaaaagccagggctttaaactgaaaattttcaaaaatcagcattcgtccgacaaaaaatcatcatttgaggtcaaaaatcaacattttccagagggcggacacctcaattaaataaatgtttttctctcattgattttattatttttaaaaaatgaacgaatatttgtaagaaaaaattcagccaattataaaaaacaataaatgaaaaacatttaatttttttaataagagggaaatctttattttatttctccttatttcaactaatctttattataaaaatgtatcatttcttaatattttggaattcttcatagaaatatgcttgtctaaaacgaacttttttttttggacattttctagcttttcaaaaaaaaaatttaatgagggttcaaaaaaggcgatgcaaattctaaataggcctgcaatatacattaaacagtctgcttaagataattggattatgtgaaaggtattatgaaaatgatcaatatatgtatattgaatgaaatctttttatttaattttttggcaaaataaatatttcgaaaaataaggtaaagaaatgtcaaaattcattagtgaaaaagatcatcattagggagtccaaaaatatggatataaaatcgcgaaatatggccataaaatatggaccaaaaatcgcaaaatatggacataaatggcaaaaatgtcaaaatatggacataaatttttcaaaattgagtgcaaaatttcttcaaatttattggttgaaattgcatatgagatacatttccaaattttttgactcggtaaggcgctttgacaaagacggctttcgttttgcaattagtcggtcaacattcggaaattggtctcgaattttttcggcaattacgtgcaatcattttaaaagaaaaaaaacataaaagctaaaatttattaatttttttagcgcaaaatcaacaacaaaagcgaaattttcgcttttttgcttatttttgacataaatttattaatttttaagaaaatttaaatttattcaatattctcgagaaattttggcgaaaaaatgattttttgaaaatttttcgggttttgggctcaaaaaggctaatttagctgctgngggccgttctaatagaggtttttttgaaaaatgccaaaatatggacataaaatatgggaccaaaatggccaaa

SEQ ID NO: 22881 - DNA, 1794 bp, Heterodera glycines
  unsure (1)..(1794): unsure at all n locations
tttntgtgcataaagatactggattttttcaattttaccttctatttttgcacttattttagcattttggcgtttttagcatctattttgcacttttttggtacctaatttagtacctatttcaggatttttagcacctaaaaatccggtctttacttataactgaattaagataattaataattatatatactataaaagaaagatttaaaaaatcaatagatatccaacataatattgagtgaaaagataaaaaaattaactatatatgcataactggtacttttgcagtttacaggctacttttaacatacattttcagatgcttataaattactcaatttatatgtttgtttaagcatggaaatctaaaagactaatattcataaattatttactctctccaaaaatctgacgctgaatttgaagaatggcttcgaaaatttaaaaaatattattgaaactcattttgcgtcatacatgtgaaatttgaaaatctgtatggatggtaccctcatggacatctctgcccatgatggtactcttggtacaggaagctgtcaattcgttgtccaatatacaactccaggggtgcacaatagcgctgatcagagcccgggttcgttatcagcaccattaaaaaccctttgaaacttatttccaccaattattaacacaattttttttgtgaaaaatgtacgttaaaagtagcctgtaaactgcaaaagtctgcaaactaaaagataaatttccaaacgctttttttatgcttgattactttaagcatatttaaaatagtgaagaaaaaatttgtgttgggtcaaggcatctcatccatgggctatgaattagactatgaattataacaaagaggaataaactgaaacattacaaaataattttgtatttttaaaaacaatagtattgagacaatttaaggactagactttcatttaaacatgtgcttatccatatactttttattcatattctttatcaaatatataaacattaataaatttttataaaaatattatgaaataagaattgaaacttaaaccaaataatttatacatttaaaatatctgtgaaaattaaaaaataaaacaattaaactggtctcaattattatattacattaaaaatgttctaactataaattttgtcaatgaagaaaaaacaaattattaacaacaaataaatattattttaatctattctaaagatgaaggaactagcgggtgtgtgcatgcgagggtggcgcttgggaaagcgctgcgcgcttcttgagcttcgctacctaggcgcgtttagtctgttagggtctttgcgtcagccgacatgcacttggtttcctccaataattggagttgacacatcgcataatgcaatggaaaccggaagtgccctaacgttgcacgtcatggccctcctccctcccttagtccaggcgttggcacgttattgggttgagcgctaaatggcaattcacctgtaggccctaaagagggctgaccggtccatgtcccggatccaagcttctcaccattttcgcacccaacatagtgcagatgggaatgggattggcatctctccaaaaaccatgtgcccaactgctctggactaagccatttattgtaacttgagcatattagtagctacaatattcagcactttggctcggccttgggcatcaatttcccggttgggagcatgaacacggacattgtttccgtctgttgcccgagagaaggccgtatacaattgaccgtgggaaaatacttccctttccag

SEQ ID NO: 22882 - DNA, 1676 bp, Heterodera glycines
  unsure (1)..(1676): unsure at all n locations
agggcgcaggcggcccatcatgaagtcaatggccaagggcgctggggcccatcgtgaagtcaaaggccaagggcgctggggcccattgtgaagtcaaaggccatgggcgctggggcccctcgtgaagtcaatggtcaagggcgcaagcggcccatcatgaagtcaatggccaagggcgctggggcccatcatgaagtcaatggccaatggcgctggggcccattgtgaagtcaatggccaagggcgctggggcccatcatgaagtcaatggtcaagggcgctggggcccctcgtgaagtcaatggtcaagggcgcaagcggcccatcatgaagtcaatggccaagggcgctggggcccatcgtgaagtcaaaggccaagggcgctggggcccattgtgaagtcaaaggccatgggcgctggggcccctcgtgaagtcaatggtcaagggcgcaagcggcccatcatgaagtcaatggccaagggcgctggggcccatcatgaagtcaaaggccaagggcgctggggcccattgtgaagtcaaaggccaagggcgctggggcccatcgtgaagtcaaaggccaagggcgctggggcccattgtgaagtcaaaggccatgggcgctggggcccatcgtgtagtcaaaggccatgggcgctggggcccatcatgaagtcaaaggccaagggcgctggggcccatcctgaagtcaatggccaagggcgctggggcccatcgtgaagtcaaaggccaaggggcagagtgcccagcagaagtcagaggccaagggcgattacgtgcacacgttggtcaagcgtgggaatgtcgcggctcgaatttagccgcgactgtccgatgatcggacagttgtcgaatggaaagaaatgcggggggagaaggaggaaaaaacaggagaacgggaaattgggcgaagaatgagaaaaaagggggaccgcaagaggggcttttgcatgtgaatggtaagaaagaagaagtgaaaaagcggaccagccccgccgcgcatgtgaatggtgcctaagggcagaaaaagccgatcgagcgatcaacgacgacgaagaagaagaacgaccaatcaacccaaatgatcaccccatcatttttattgtacccgcccattttctgatcctatataagcaacacaaattgtacatttcgatggcttgcgacaaataaagactaaaaacccgtccattttgggggtttcttgggtagtctgggcagcccctctccctctccctccgctttcacccacccccgaaccaatggacgcaaagcgtcccgaagcgatccgcttcatgtggcgctcctgggtggatagtggggtttgttagcaagggaaggggggagtaagtaggccccacgggtttttcgtaacccgtggcgccttgcatttgcgcattgtattttgttttgtatttttgcgccgtagtgccccccccccccgggttttttgtaacccggggcgctttccatttcgcgcgttggccccctgggttgtctgtaacccagggtgcattccattgcgcgccatacggccccttgggtcttttgtgacccgaggcgcctcgccttccgcgcctcgccttcacgcctcttttactcgctcctcaaatatgtatgtgcatgcgcttangcagctagcctatctcgcactca

SEQ ID NO: 22883 - DNA, 825 bp, Heterodera glycines
aattaaaaaacgggcgcgaagcgcccctcttgaggccgcgaagcggccgaatgttccccacaaaattaactttcgggcgcgaagcgaccgtcctgaggccgcgaagcggccgaatgtcccccaaaaaaatttaaaaacgggcgcgaagcgcccgtcctgaggccgcgaagcggccgaatgtcccccaaaaaattaaaaaacgggtgcgaagcgcccgtcctgaggctgcgatgaattgctaaattacatcactttctagcgacgcggcgaagccgcgtcccatagcgcgatagcgctttaaaacttcacactaatgcaattaatgtttgtctgtttaaaataacaaatgagcatgtccattttctcttcatccaaaacccaacggcctacgccgccccagtcaattcccacacgctagtttatattactctacagaaaaagggggtttcgtcttcaaaaacaaaatctcccggccgaaggccgggagcgccctgaaagtagtggaagggtcttacaactttttgaggcgcatctgggaaaactataggttttttgctcccgtggccaactgagtcccggcggccgatttctcacttttgcttgcgtttgatggcccgtaactttttttctaaaactcgaatcaaaaaatgcccgctgcgagggcaccccgccaaagtgtcctctacatgctggtattttttatttttttaatagagccaccccctggcctgcagaaaatggcaactgaagcgtgctcaaaaagtacacttcagtaccaggcgaataccgcgtcggggttttgtctgaggaaaaggtgtccagcag

SEQ ID NO: 22884 - DNA, 1202 bp, Heterodera glycines
ttattattattattattattattattattattattattattattatgattattattatcattatcatcaacaacaccactactacgattattattattatgatgattattattatcatcatcactccgcggatgattattattattattattattataatgataattattattattattattattattattattattattattattattattattattattattattattattattattattattattattattattattattattattattattattattattattattattattattattattattattattattattattattattattattattattattattattattattattattattattattattattattattattattattattattattattattattattattattattattattattattattattattattattattattattattattattattattattattattattattattattattattattattattattattattattattattattattattattattattattattattattattattattattattattattattattattattattattattattattattattattattattattattattattattattattattattattattattattattattattattattattattattattattattattattattattattattattattattattattattattattattattattattattattattattattattattattattattattattattattattgtgttttcacccatttattgttatcaatcgtaacggctgctgcccattttgaacatttaaacaaggtctacaataataacaataacaataaataataaatcatttaaatgtttaattgcctactgtacctcatttgctgtgccctttaattgttaggctatataaaccttcgattagataacattttctcgccctaactatcatcaccatctgaccataccacaaataattggcgccagaaagaattagacgcatctgtctaactgtcactttgctaatgatccaccaaaacgaacaatattatgacgactaaaatcgaaagataagcattcatttttgacattcaatggcgatatatccttcttaaaataacactaatacatattctctcattccaattctataataaat

SEQ ID NO: 22885 - DNA, 1716 bp, Heterodera glycines
catttttggcgccggatcttataaagtatctttgcataatgcacaatgctaagtcctgatcaggccattggttcctgtataccaaaacaagacgttctgtggtgtagtaacattatttggtgctctcatttttggcgccggatcttataaagtatctttgcataatgcacaatgcttatgtcctgatcaggccaattgttccttgtattaccaaacgaagacgttctgtggtgtagtaacattatttggtgctctcattttttggcgccagatcttataaagtatctttgcataatgcacaatgcttaagtcctgatcaggccaattgttccttgtattaccaaacgaagacgttctgtggtgtagtaacattatttggtgctctcattttttggcgccggatcttataaagtatctttgcataatgcacaatgcttaagtcctgatcaggccaattgttccttgtattaccaaaacaagacgttctgtggtgtagtaacattatttggtgatctcattttttggcgccggatcttataaagtatctttgcataatgcacaatgcttatgtcctgatcaggccaattgttccttgtattaccaaacgacgacgttctgtggtgtagtaacattatttggtgctctcattttttggcgccggatcttataaagtatctttgcataatgcacaatggttatgtcctgatcaggccaattgttccttgtattaccaaaacaagacgttctgtggtgtagtaacattatttggtgctctcattttttggcgccggatcttataaagtatctttgcataatgcacaatgcttaagtcctgatcaggccaattgttccttgtattaccaaacgaagacgttctgtggtgtagtaacattatttggtgctctcattttttggcgccggatcttataaagtatctttgcataatgcacaatggttatgtcctaatcagcactattgttctttgcattgccaacatcatcggcattgaggtggaagtagcagcagatggtgccgaactcattaatgagccggtgccgattgaacttatgccaccgcctaattgattgttggtgccagccggtgacgtcatcatgttcatcattgccccaggtggaattatggccaccaatccactcccgccacccgccggcggtacaccaccaacaccgcccatgcccatcatcatcatcgcttgctgatggctcaacaaaatgcaattgccggaaccaccggcagtgccaccggtggcaaaaacgggacgaaaagctccaccaacaatggcattttgaccaatgaatgtgggaccagcagcgccaacaccaccaccacttcctaattgtttacagcggcacaaatccggcagaataattgcctaatggtttttctatgcttttggcaatgttcgagaatggaaacagaaattgattggttacattgccgggaaacattttgaaaattttcgcaattttcttaaatttttcaaaataaattacacccgaattctataggtttgactttaaaacctcgacaattcccaaagtccggagaattgggaggcgaaatttcacaattaatgttctaaagcatcattgtgctaaaaaaccaaattatcgaacattgccattgcactcagtcgatgagtttgtaccggcatttaaagtggaatttgttgctgttgctcagcagcaacaacaa

SEQ ID NO: 22886 - DNA, 1653 bp, Heterodera glycines
  unsure (1)..(1653): unsure at all n locations
tgtgcgacatgttgcggcaatctgtgaaatgtgtgaccgattgatgcgacagcagccgccgaagacgcgtgccccgagggcgaaccaatgcggcacggcagcgacgatcgaatcgattttggcatcgccttcgaatttgcgggtttccgcgttgtacacttcgccactgttagggtaaaccacctaagaaacgagggtagttggaaaaacaagatagcagaaattcaaaaaatcacagagtttcataattctcccccccccattccctccttaattttcccttggccttttactgacaaatatcaaatgaatgctttaacgtcacccaccaatgcctttgaattgttcgcttttttcgcctctgttagcaattcagtgatatgatcgggcgcagtgcaattgataccgatcgctacaatctgtggtgcaattgggtgtgattacgatgggattttacctaattacactaattaccccccttccccccacgccacctttgggtgtccatttgctattttcactgcgtccgcaaatgcgtcgccgctgcgcgtccttttcccgtccttcaaatgcttttgctccttttaatctgcttgtccactttcacctgacatgaacagcaaacccacgcctgcacagtgtcgtccaattggtccatcactttggccacacattcgacttctttcaccgacggaatggtctcgaagttcagcgtggtcactcctgcggcaatcagaggacggcattggaggagataatagtcgatgatggtctgaagggagtgccaaacgaattttgaaacaataatttgccgagagcgaattgcgagcaaagtgaccacctgctcttggaagtcgggctttttcacataagcaccggtgtattccgaggcatccctcaaataggtggcgtaaggaccgacggcaccgacgagggccaccggacgacccgaagcagcaattgcctcacgggcaatcagcacggatttctgagaaaggcatatgaaataggagaaaagggggagggtgagaagggtggcaagtggcaaagttggagcagtacgtggaggatggactcggcctgtcccagcgaaaagccccggctttccatgagtttctgaatgctgacgtggtaactgttcgtctcgattatatccgccccggcatcgataaacctaaaaaaaagaaaaatggcatgagagatgtgggaaaggaaggcttcatcttttggacacggaggtaatcaccagttgagactttgacacattattaatttcgttttcactaatccgtcactttctcttactttttatgacatttggccaaaaggtcgggcgcatcgattattgcttccccactccaaatcaccgagttctgtttgcggtcaaaagtcaaaccccgtcagaaaggcccaaaaatcacattgatgggatagccaagctcctccaattgggaaccaatcccgccatcgagaacaaatgccaaagccaagggtttaagagactgaggagggaaagtgccattgagggaaagcatagcgaaaggggcaaaggacgagaaaagttgaaggaatgcaatggaaatgagagggagagggaggaggaggnggaacagaggggggaggggttatcagcagatcagcagcaggcttttg

SEQ ID NO: 22887 - DNA, 1886 bp, Heterodera glycines
ggactcaattttcctgcatttcaatcgctgggactcaatcttctttcatttcaatcactggggactcaaccctccagcagttcaatcactgggactcaagccaccagcattccagtcactgggactctgtttctcctgcattccaataactgggactcaactaaccagcattccaatcactgggactcaattctcatgcatttcaatcactgggactcaattctcttgcatttcaatcactgggactcaattctcttgcatttcaatcactgggactcaattctcttgcattccaatcactgggacctaacctcacctggtccttcggcatcgcaatcatcgagactcaattctgcgacattccaataactgggactcaactaaccagcattccaatcactgggactcaattctcctgcatttcaatcactgggactcaattctcttgcattccaatcactgggactcaattctccatcattccaattcccgggactcaatcccaccagcattccaatcactaggactaaatccttcacttttcacggattcttcggcatcgtaataaccgaggactcaattctcctgcattccaatcactgggactcaattctccgccattccaatcaccgaggactcaatccttcactattccaaacaatgaactcaattttacggattcatcggcatgtcaatcacgggacttaattcagacctgttcagcataattttggaattttaaaaatgtatttcaattatgaaatacaatttgcgtagaaaatccttttcattataaatacttgttctcttacattttaataatttcttttacataaatatctacatacaaaaaaagaacaaataaactgaccttatatcgttaaaagtaacttctttttgtcaaaacaaacaataagtgcgataaatccatccaattaaaccgtatccagtaaaagaggcataattgacatccgctttaattacaaaaacaaaaaaactccatttcaaagtcaaaacaatttctcgaaccaaaactttttcaatacaatatcaaaactaagtgtaagatcatttccattgactttgcatatacaaaaacaattctttttctttacaaaagtgttaagagcattcatttccaaatgaatatttttaatagcaaaaacaaattacttttcacttaacaaatgcaatagaaagcattaatttctatttctttatgttaataaaacacacaaaatctattttgtcattaaaaaagaaaaacagaaaaaacatttttaaagactgctttttgcaaaactgacaaaacgaaaatgaaaaaaacaaaaccaacatttcttttttttcaaaatcatttttaacgcaaaactcaaacaaaacgccacacaaattcaaacactggacacacacatacacacactcaactttattatataagatttgcaactgtaatcaatgaataaaatgtgtgccttaatttgataataaaacagtaattttaaaattatacccctaaatttggaactttttcgtgcttattttcgcacttatttcgcgattttttcgccattatttaaggccttattttggactttttcacgcttaaaaatcccatcgctaatgatcatataatataaaagttcactcacaaaggagtaggaaaacgaaaagcatcattcaaagcaacacaaaaaaagtcaccacctcttcagtaaaaaacctctttttctaaccaatttaaaaggctaataccaaaatgtcatgtattttttggggtaataaaattttaattggcaaaaaaaatgcgatgatacaaatttgcacagtgcgattttagttttgtattcatcactgagaataaacatgaatatataaatgaggat

SEQ ID NO: 22888 - DNA, 1200 bp, Heterodera glycines
cagaaggaaaattgtaaatagttaataacgtaatgaattctgttcaaataaaaaaatgcgtatttttcaaatgagtaaaaattttaatttaatggttatgtcctaaaataattttactaatttaaacatttatggttttaaattcagaaattaagaaaagaaatgtcacgattatttattttgctcttaccagcggaattaatttttgagatcgtatgcaatattcctaccttatccttatttggtataattataatcgaaagtaaaataaatacttattttagggagaaatggacctccgtgtatcacagggatagtcaacagacaatttgaaacttttagggacttgaaaaaagaaaattttaaaaaattggtaaattatttgcaaaaacttgtaactttttactaatcttctttaattttagaatgatttaattgatatcattagcataaaatgtaagatacaaattacttattggggacacataaaccgaagattttacgtccatgaacatgctgttaaacgagatttggtagacttagtttataatgaacttcattattatgtacgttatggtaggagtgaaaaaaatttattagaaggtgttacatggttttcccccgttaatgaggtaatttatgaaagagaatatagataatattctaatttagaccaacagttttcttgctcttttattcaaaaggacattatatggttttatacaatcggctaatcctttcaccatgagaaaatatatagttttaggcccaattatgtttaatgaattaccgttaatttttgatgaatcggttgacaaaatgataaaatttggtatttatcccggggtaagagacaattacacaggcattttttatgtacgtaataatcactggactgctgaaaacagagtcttaaaaattttttcttattttcatccaaatcctggaactttgtttatatgttttaataaattttaaaaatttaattttttccactgttctagttcaattttactctttttaaaatatcttttcgcttatttttcgcgctctttaatcaaaattttaggaaaatgaatccatttagaataaacatttttttcacttgatgggcacaggagtggactaacaaatatttgtgaccttaacaaaatagaaggtcagaattatgtaacaattctcgggaagattaaaaatgta

SEQ ID NO: 22889 - DNA, 1702 bp, Heterodera glycines
  unsure (1)..(1702): unsure at all n locations
tagaatccgaacagaattcaggtccgggcttcggaattggtcgaaatgggtatcagattcgtgatcagcgaccccngaaaatccccccctagaaatttttatatgtatgatttataatattttttttgtggtctgtaaacggcgtaagtacccgaatatgacaattatttgggcctattccgaacaccgaaaccaaattcgaacaaaaagttgaaaattcgaatttttgaaaatttgcttttatgttagaatctgaataaaaaggatcattttttggtgtttcaatgatttgtgacttctttcagctctttttaatcaattttatggcaacagtgattaaaaaaattcgaatttttgttcaagttcggggccgggatcccgaattgtgtcgaaataaatgccatattcgtgaacagcgacctcgaaaaccaacgggtattcatcattatgtgtaacaaaaaaaatagacaaaatatgaggttattcagtccttcactggtggttatcgtacgaaatccgaagactcaccacggatggccatccacgagtgtccgcttcggtctcatcggatgaggaagaggaacagcaaggaaaagcagaagaggaggaggaggaaatcatcggaggagaacgaatgccaaatcgtagagcacagcaaaccaacaacctttgataaaatagggagattttattaaagatggcatagaaaagtgaagaaaaatcaaaatcagagagaagggcaaaaaattgaataaaaagtgaaattgatggaaataaaattaaataataaaacaaagaaagaaaagcaaacaaaaattaagcacaaagaaaatattcaaaatgcgaaatcccacagagattcgtccccattttgggcatttatttgcgtccgctgttgggcagacaatgcgaaacgacaaagttttgcccgaggcaaaatccgcaattccgtcgccaatcggtattctttgtccttactcaatcctctggaagaaaacgttacgtccttttgtcgacggcggcggaaatcgatagaggcgacacgccctccccacgactcgacccagccctgtcacccgctccccacccctccttttgcaatttacccgttccatttattccttttcttccatctgcccaccactctccggttcatccagcgatgcccacagcctcttccagttcttcctcttttactcaacacgctaaaagaaagtgaagcaaagagaagagagtgggtggacggagaagaggattgagtggagaagaaaaaagagaaacaggaaagggagtgggggaagagaagaaagggtgcacaataaaacaccaaaatttgtgtgagcaagaccaacccttgaggggcaagtaatagaggaggatggattgatggagggagaggggtgtggtggtggacattggtcgtcaaacatacatatccatcatccatcccatcaatttagcaactactcatcagtggataaagggtagcagcatctaatgaaataatctgcagaaaatgaacgatcgatgagtgaaatgaaggggaatggggggggggggatgccggaaaaactatcggaaaatggacaacaaatatgaacctaatctttaatttgaaattctggtacataaatatctatcatatggcccggagcccaaaatggggaaaaggatatatcaatttcagggccggggttcgaaa

SEQ ID NO: 22890 - DNA, 1214 bp, Heterodera glycines
cgcatgtgtcaatgtgcggagcgagaatcaagcggttgagcaactccttgtcattgctaaggagttgttggattgaaaacaggctgtcacctgagcggttaagccttcatgaggcacgaccggcagcgactgtttgaagtcaccgctgaaaatgaccgtttttcctccgaagaggagatccttgtgctggcgaattgccatctctttgcacactcggtcgatgacctcaatcaccgtgttgtgaagcatggtgatctcatcaatgatgatgagttgggcctcacgaatccgacgggcaaagaagctctccagcggaatgcttgggagtttgtctaatgacacttctctacccagacgaaacgtggaatgggctgttttcccatatggcagcaaaatggctgcacacccagtggatgccgtagcaagcactttgtaggtgtatggggcctttcgcaagcgcctaataatttggccaaacaggaatgtctttcctgtgcctccatcgccgtatatgaagaaacggcgggggacagtcgaatcccttgggtccgactgaatagccttaacaacagcatcaaagaccgtttgttggtcgctgttgagtggcggaggagtgatttgctgaggccgaggatttggttggccaggcggcaaattcaaatcatcatcgccaaagaaaaattcatcaattgccgcatttgtatttttggcaattgagtttggcgggtctggcaggctaaaatgcacacagcttaagttaaagcagctgtgcagccgccaatcaatgtcagctagggcttcaagctctgctgcttggcgttgtgccggtgtggtaatgccttgaggaaagtacatttggtctttgtacttgttccataattcgacggcattactgggccggccataaacgaggatgctcatgaagagccacctcatttgatcaggccagcgcgatagagctgcctccgccagagttttgtcccaaattttgtcgtcttcaagaagaccatgcattattgcagcctcagtgaatgaggtacaaagcaacccattaaccatcttaagatgggtctgggtctccaggaaagtgacgcataagtgaatagagcgcgaacctttccgggtctgatggggggtacaggaacaattcgaccaattgggtggtctcttggacaggttatattttccttttgttccatttatcctttgcccat

SEQ ID NO: 22891 - DNA, 2079 bp, Heterodera glycines
  unsure (1)..(2079): unsure at all n locations
aaaggatccaatcgttccaattgctcttatcttatgtcggaatatatgcccgaataaatgaatgattaataaataattaatttgtctttgatcgctccgacgtccgactctcatctcctccgactcgactgactgattggtgggggaaacaattgaacggaaaaggggcggggatttgcggggatttgtgagagttagagaaaagagaaatagtgaataaaatggtgaacggggggaatgtggaaaagatgaataacattgattggccaaaaagggaaatgtgtgaagggttcgtctttgctcatgggtgataattagaatatgttacacctccctccnccaatgaaaatggccccccatttttaattcacaaccaaagcttggatggctgttgctcttttctgtcccttttattttatttttgttttttttttattgtttttttatttttaattttttttttttgatgacattttctttctttttatcatccttccctcttaattattgtccatttgctgtccctctgctcttttttgttgcttcctctttttgttgtccgctgtttcaaatgttgtaattgacggaagagttgctctgttgtcagagttctcttttcgaagctaacttggtgatgctcaaattgtccaaatgtccatcaattgagccgacttttctgaatgacggtccttctgtcgtttctgtctttctcttctgttgtcctttctctctctcttggcgggctgttgaccacaaatggcgatgctgttgatgtttcccgtcgtttgctgtgctgttccgcggtttgtactgctcgaagttgaagaaattgtcgtttggacttacgtgaggggaaaaattttttttttgtttttttttatgggcagtgtccaagagcattggttatggattaaaaataaataaattttgcccgggtaaagaggtgtaagataagttaaaattaaaaaaaaatagagcaaagacgaaatgaaagaaaatgtgaaaatttaaatgaagaaaagtgagggaaagaaagggagaaaatggcagggagttcagtcgtttcgtctgcctcttccatcatttgtgcgattggtccattggcccgggcggcttgatgttggacggggcatgtttggtgatgggctagggcggtcaggacagtcgcgaaggaagtgaccagggcgcagacagtagtggcacagaccagcgggcatgttcggatgtgctgaaccaggttgacgtgctgactgctgctgcctcgaaagtgccagcgaataacatgcgcggaggtctaattgacctaggcagagagggaccatcagaaccttgccaatcatcgtaaaagtcgaatgctttcactgatccgtttgaggtggcaattacgccatccacaaattgcggtttcgggtccatcatcgcatggatatactccggagttacagcaatagccttatccagagctctgcgcaggaatcgccgccaaatgccgtcagctgtccacaacagcttcaagtcgccaacaaccatcatgccgaatttgctgcggctgagtgccacgttaacacgccgttcatcgttccaaaaggcgccgctgttgtcattggagctcaggccggcttttgttgtgacaacgaagacgaattcggcctcgtgcccctggcaaccatcaactgttgttaccattacgttcggcatgttgagcgcagacacttcggttccaatttccttcgcttgaccagcgtaaaagcagacaacgcgaatcaagccgttgaaacatggccgtaggaaagtcaagcacttcatgacagtccgggtttgcattggatttgttgccgaaaatgaggtcgggtcctcctgcattcgatcaatctgatggacaagaatgatgggacactgcggcactggaagtgaaatgggagtttttgatgttaattcgtccatctgcttggtggttcgtccggtggtcaagatttcattttgcgcggcatagactccggcagaaatgcattctgtgatgaatgggtgtgatcgaaagttgacagtcaaagtcgtccgatcaacgcccgctgctgcgtc

SEQ ID NO: 22892 - DNA, 1482 bp, Heterodera glycines
attttttctatccctgatagccgaaatagcattaaaattaaaaaacatagtcttatagtttaataagagcattaattctgttgtttgaataattgctgattttttcaaaaactaactgatgatcaaattatcggtcataaatcatttaatatcatttagttaatgatatttagactatcagggatagaaaaactcaaatttgaacccgactttagacataggcgcaaatgcccgaggcgcaaatgcctggacacgcttttcaaacactttttttttgcggcgcgcttttttcaaaaaactttcaaagtcaaaacgaaaaaagcggtttgtgccaaaaagtggcaaattttgccattttggggtcaaaatttaagtaatttcccattttttggtgtccaagtgaggaataaattaattttttgaaacaattgctggatttaaaaaaaaaaatttccggccacggacggtttttgcttttcaatgctttttttgcgccgcgctttttttaaaaaactttatcaacgccatagcgaaaaagcaggaatttgtagcggttttgtgccaaaaagtgacaaacttcgccattttgggatcaaaatttaaaaatttttccccattttttcttggaaaatttaattgttgttgtttttttcggcatcatttggccctgctcaacgagttgcgctccatcttcgagctggacagtgtggacggcggtggtggcgggaagcaaaaggcacggcacattttggagacggagggcaccgccaaagtgtcgccggcggtggcctaataatttaaaaaatatatgaattttacattgttttattttctaatttttttaacgggcttcgttacaaatttcaaattgtgttttttttttattataaccgaaccaaaaactttttattaaatgcgaaattgttaaaattgcccatatcatcaacaaaaaactttttgtacagcattttttaaacgaatcttttttgtaataattcatatgcaatttattcttgaccttgccctaacggttacaaaaacggatgagaatgataaatgagggcggatgaatgtttatgcaaatgtctcagtcttcattatcacaataataaatctcttcatcgaaaatcctcttgataagcaatgttccttttaccgaaatgtcacagacgtaaaaaaaccataataattccaccgtttcattctgctttttaaacaaataataattttttccccttttttgacttttctgaattgacatttcttcgtccttttgtgaatgcgtcaaatgccagctgaattgcacagtcatttctgtattcaaaaagggacattttaaaatatcagtcaccaattatttggctaaaattaagcattacaccaacgctttttgaaataaggttactctgaaaattaaatgtttcgctttgttgtttgtgtgctccttctcccggaattcgttcatggtttttacgaccttga

SEQ ID NO: 22893 - DNA, 1758 bp, Heterodera glycines
atgtaccgcgcacttctaccccaactcgaaatgttgaacttcccgagcaaataggaccattcccgtttgttgttgaccgccctacagagcaccaaccccacctttaaacatacggcaacaaattttccaccccatcccactgaatgcacaccgcattaaccaagtgtcggttaacgcgcaacgcaacattgacgttcagtacgtaacaaataattgcgttaatgtcccgccaaacgtacagcgtcattgcgacattcagtacaccgctcctaaccctgtcgccgcgccatcaaacgcgcaacaaattcaagcaggaagtagacttattcaaaacattccaatgcaggctcagctttggcagggccctgatggaaaaatgactttggtttacccccaagaccaacagcaacaagtgctgatcgagcaacctaatttttctcaaaatcatcaaaaattcactcgccaggtctttcagattccggaaacgaatcaagagcctagacatttccctacctatccccaaccgaatgttgcgccaagcaacctcgaattcaacttgattttggaaagaattccggatctaaatggaaatgagggtacagattctgtgcgccgctttttcaaaaaatttgatgcatacaccgacggatggccaaacgcgaaacgaatttcggtgttagaaagcaaagttttcaacaaagcagaaagagcttttgaggcagcaaagtcaacgcagccctaccgatacgagcacatccgcaaagatatgattcagcagttggaagaaaccgactcaaagcaactaaatgcttttgatgatcttatgttgggcgttcggagaagacaaaatgagagcattgatgagttggctggaagaatttctcgcctagtaaagagtgcttatccgggtttgaccaacaatctgtgcgacgaatattcgatcaaatttctgatcagatcgatgggaaatcccgatcttgcgttaaatttggaattaatccgcacaccgggaatgactcttgatcattttgtgtcactagcagcaagggctgaatcaacccaacgcgcttcaaaacggttcagtacacacccaaatgatggctttcaacagcgcgagcaacaacccaaatggcgacaaaattttggtggtaactcaagccaaaacatggcgaaggttcaaaattttgctggaaacataaatcagcatccccagcccaaagaagacactagaaatcaatggaaatgttacaattgtgatgaatatggccacctttcacgcaattgttcacgtccaagaacttttatgcaaaaccagccaataaatcagcaaaaaaactttgttgctattggtgcgaaccgaactcaaatccaacccccaaatcagaaccgaaattttcaaacaccaaaaccaaattcagctaatttcctaaagcaaaattgtttggtggtccagcatgaagaagtcttagccgaggcgagggtaaacaaaattgagttggcaccggaagtaagtgaattttatgaaaaattggaacggatcaccgaaagcaaaaatgaaatttttttgccaacaattggaaaggttatgtcgttgaaacttgaagtgtttggcacagaaaccgacgcaatgcttgacggaggcgcacaaatctcattgattagtggtgattttctgcataagttgctgattgagaaagcgattacgctggaaacattgaaaagttcaaaacgaaaacccaaatttttgacgtaaacgga

SEQ ID NO: 22894 - DNA, 2379 bp, Heterodera glycines
  unsure (1)..(2379): unsure at all n locations
aacttttaagtcaaattttgaaaatttttgtgtattttggagacccgtgaaaattttttgggatttttacgagatttttcaagaaaaattagaaaatgacaatattttttaatttaaattaaagatcttaattaaaaatggagatttttcgaaaagttatcgtgacatcaatcccgcgggataggtaaaatagtcgggagagatcccgatgaaatcccgatcccgatcaatcccgatgacctaacttttgcgtcaaattttgaaaatttactgtattttggagacccgtgaaaattttttggatcccgattcgggatcccgatgaaatcccgatcccgatcaatcccgatgaattaaaaatcactcaggacggttcctgaggtcaggatcccgaatttaatcccgcgggatcctgaaaaaatcccgcaggatcccgatcccgtccggtctctaattctttgtacaatttatttcctttaattgaatttgtaatttatatgctatgaaactctctttcattttttaaattctccatattattgtaggtgtcttatttttctcttattccgtcatttttcatatgcaattctgtttttcaggcatgtaattaattgacttgatctcgttgaaacgccgaaaagcaaaagttttcggttatacttaatttaattaaatttattttatttattttctaaatttatattgattagttgccgttctttaagcggacaaatattatcatatttaaaatgatttacaaatattattttgaaaaaacaaaaatgaatttgttcattatcattttgttataatttttttctaaaaataatcttttacaataaagtaaatttatattcaattaaatatttaaatattattgatttctaataattttatgtttaaataccattcctagattttccttaaaaaattattctcgcaatacttttaaaacaaaaaatttcagaaattgaaagcaagtttattctaaaataacaatacattagctttatgatttcatctatttttgtttttaaattctcgcatgcacaacatatccatcttgggtttcccgttcaattcttatgtatgtcttaagtttaaaatttgacgccgccactttttgcgggatcccagcgacttcatttactcttcatcgctatccagttcgccggtgacacaccaatcggcgcgcactgctctgcctgtcaacaacgcaaccatgccgatgtaggcggacagtcagccgagaaacgaaagcggaggatggtcagtaaggatggagagccgagaaaagaaagcggaggagagacagtcagccgagggcatggaaaatgtctaaacttttaatgagtataagattgttcatcgaaaattattgcttgaaaaattcatgaaaaacagaaatttgaaataattttttgcttttttataaattttctaaatatcactgaattcgttatctcgttatccacgattaattgtgcatttttctgacaaaaatccttttcccctcaaaatttcgtcggtttaagggtgttttttggtgggggaggtacgtacacgcgacagggtagtcctttcaaaaatttaaaaaaaatcgctgaacttcttgaatttttcataaaaaaatctattgctaaagtgagcggatacttttacccttgtcatccgcgcgaatcggccttcgatgcgcaggccataagcatgttcgagtcgcacattgacacccgcgaactcgccttcaaaatcacacattttttttcattttacatttttgtgaaaagtaccgaaatctggccagttacattcataccagggatgggccaaattgaaaaataaaaagcgaaatgcgaaaagcgaaatttgcgaaactgnnaaatgcgaaatgaaaaaaaagcgaaatgcgaaaagccaaaatatgcgaaaatgcgaaaagcgaaatgcgaaaagcgaaattttttctacaactttttaatagttaaaatcataaagcaaaaatcatttttaaaaattttattccaaatttaaaaatcaataaaacgcttttttgaggcgcgctttttccaaaaaaactttttaaaatttgttgacagattttcaccaaaaaatcatcaaattttgtgatttttgtatcatttttctaatgagaaataagagttttggcgcgccgctgagaacagtttttcatcaaattaccaaattttgcgattttgggccattttctaagaaaaaataggagttttgggggcgcggcggtgccgataggcgccgccggggaaaaaaattgaaaattttgatcatttataaacagtttttcactgaaaattagccaatttataggtaaaattttgaaaaattttatgggaatttaatcaa

SEQ ID NO: 22895 - DNA, 2924 bp, Heterodera glycines
ctctagagtatatttcggtgccccgccctttttcgaaaaaaataagcttgtaaaagaaatcttttttaataaaagtgcgaaattcgaggaattaaaataaattttttgttcgagtccggatttcgaattgaatgtcaatttatgatcagcaatttcaaaagaaatttgggcaagtttgctgagttatattttttaaatttttcatacgatttgcaattccatgacaaataactattttagactccaatttcattcagattgttgccactgtcatcctggtcgtgctctattactaccgattttacaaagtgcaaaaaacattttttttgctcatttcttttatttttcttgtcaagacaatccatgcttggctcatcgtcagcactgttggactgctcaccctgttcagcttctccttcattctgttagtttttttggggcttgggggtaattctgtttatcattcggtccgtcccatcacaaaaacaaaaattttaaaggaatatggacaatttaatttctctaagaatcggcttctctaaataagggagcagcttgtttcatgcccgccggtccccgacctccgaaaattttcaacaaaaaatcgaaacttttagaaaacaaaattttgaatgtttttctggcgactttttcaaaatttctgacgaattattaagtttttctaaaatttttaaattttttctgggtgtggaaacttaatgtactcctacataaggacaattattagcaataaggtcacactcttagaagccctgaaattgaaattaaaaacttttttttcaaataataaacaatttataatttttctcagcgaggtgttcaagaactacaacattccgctggactatccgtctctggccatttttctgtggaactgtatgatttggcttggttttttctttaattttatgaaaatcgaatttcagggtgtatggtcggcatgatttgcatccattggaagggcccactggtgttgcaacaagtattaatttttgcatattttccttaataaattgatcgaaactgattggctccccgccggacccaaatccctaattttctgaaaaatatgctaaaaatggcaaaatttactcatttatcaacaaaatatgtttaccaatcgctttccaaaattgttccaccggcggcactccccatgttccacaaaatttttgaaaaaagtgtttcaatctcccatcgtattggcctgcgagacatcccttgaatatgtttggattttttttgtctaagaaataccagttttgaaggtctaagggaattgaagggacccctcttggggaacaccaaaaattaccgttacaattttccattttttttttgctggtggataatgtgcatgtctagaagcgtaagaatttctttgttgggctaacaaaactgaactaacaaaattttatgtttaaattgccaaaaaatccccccccccctctctctttttagttctatttgatcgtcgtttccgctttgatggcattgcttttcatcaaatatttgccggattggaccgtttggacagtgttggcaattctgtcaatttgggtattttttttcactggcattttttggctgcatgacaataactcagtttttgtttggcaccatttaaaagttcaaattctgcatcgaaaaaccgagtgctgaatttaattaaaaaaaaaaaattcgtttaattgcaggatttggtggccgtcctcagcccaaaaggtccgctgcgaattcttgtggagaccacgcaggagcgaaatgagccaattttgcccgctctcatttattcatgtaaaattttttttcttgttataaaaaaattactaggatttctgacaaattttgtttgaaaattaacaaaaaaattcaaagggcggggggagcagtaatttatccaaggtaataaataaatatttaaatatataacatttttaataaaattcagcaaccgtcactgtcctctactcatatgtgctccatggcgttgtttcttccgcttttattgtcgccgccggggtgggcacaaatggcgatgatgaagacgaacagcaacaacggcaaccacaaccgaatgatggtaggcagcagggatgggccaaatcggaaaataaaacgcgaaatttgtgaaagcaaaaaatgcgaaatgaaaataaatgcgaaacgcgaaatttgcgatagcaaaaaatgcgaaatgaaaataaatgcgaaacgcgaaattttttctacaactttttaaatagtcaaaccataaagaaaaagtcagcatgaaaaagctgggcctagaagcctaaaaccaaggctaccaactgaaaatttccagaatcaacattggcagacaaaaacaaaaatcatcgttttggaaaattctattcgatttaaaaaattaataaaaattaaactttttttttctgcgcacttgtttctatatattaagcataaaaaaggctgtttccacttggtttgaggctcatacgttgtcctttattatgccttttttgcctttttcgggattttcgtgcctaaatgcctttttggcattttgccgttttggtgccttttctggtgttttttccgaaaaattcttactaagaatgcaataaaatcgggaaaacctcctaagaaatgatccgaaaaaatttcagaaaatacacccctaagaattgaaagtttttttcaaaaagtgaccgtccaaatttttttttctaggtaaaaaattataggtttaaaaatttccttttttacaagaaaaaaagtaaataatttattttcaaatcattttataaccggtattaaataacgatttaattgaaattatttattttttattccttatgattatttttaattaatcatttttaattattcatatttttgcattatttctttaatgattagat

SEQ ID NO: 22896 - DNA, 1913 bp, Heterodera glycines
cgtggcgttgctgaaaatcccccccaccctcgcctttcttttcagcacattttattcatgcataaaaaaaatttgatgatcaattggggaggggggaggggtgtcgttgagatggtccaccgttttgacaactcctcaataaagggtgtcgaaaatgcaaaaaaaaaaaaaacatggattttctgggccaataatggccccaggatttaggatattcgtcgcttagcgcttgggatatctggtggaaaaaatgtctttcagctaaattttcggtagaaattttaccatttcttggcggggaggggggcggcgtacgtacccccgtgcacgccccccccccctgggacttcccctggactaaagccctaaattttttgccgggagccaaagaattttgagggtcctgctccggcgtataggacattttcaccaattcgtatcaaatcaaaagcttaatagtttctgcgatgatttttttgtatggaaaatggtgaaataaatttctgaatgtgagaaaaacacataaacataaataataatgggacaggggcgactaattgaggattcccaatttttaaatgcggtggaaaatgagttttccctcaaattatgctgagctcacgggggaccaatgaatgttccgtccagttttgatgtgagaatgacttcacataaacatgcaattaaaattttttaatccgggggttgggggacatttgatatgctaatgagcttattatgtaggggcgggcagctgtccctattttgaaggtcttctccaattttttaaatatctaattaaaccaatgcctagatttttgttccagaaaataaagaggtcaatcagcaggtccaagtatttctcacaatgtgtggactaatgaccgaattcaacaataatgactgacatataacggactctattgtttggattggtctctgacctgttccattcacccgctctcaattaatggtctcgcaattccattgtcaactaaatccgccgcatacactttcaacgaccaaccaataaagacttgtttaattagcaccttaattatttgctgtttgcttttctgtctttgcctaatgcccccccggggaaagataggggcggtgggtcggcttccttttacctcttccactccattgtttaattttgaaaggtttatgaagagaataggggtgtggtcagcagatgaccgactactgatcatgcatgattcttgctcggtctatttgtaatgattatgccattggcggacggctaaatcgctttaaagccataaaaggaaaggatgaatgggatggcctgttgctggtagctcagcagacggtaagaccactggtttgggtgagaagccgatcgctacaccagcagaggatttcgagggttcgattccctcctttaattagcaaacaagaattaaagaaataaataaaagccaaaactttgaggggcggggggggggggacagaagcacggaaatcagttggaccaaagaccaaacagaaaaaggaaacaaataaaaaacatctgcgcaccgcacttcctgcttctgctgcggctccatcaaaattagaaatgagacgacaacaaataatgctaatggtaattgacaataataataatgatgatgatgcagatgagcccagccagcagcagcggaagcaatgcgcgactcaatcaatgatcagtgatcaaatttctgaccgatcagatcaatgcgccgcggtaagatgcggatcactttctgatcaatcagcagaaacggacgagcaccaccaaaaaatgggaaagaacgcacatagcgagagagagtgggagagagagacagagacaaagaggagagagtgtgtgtggggggggagagggtagggaagagataaaagaagtgaaggaggcggtgctg

SEQ ID NO: 22897 - DNA, 981 bp, Heterodera glycines
atgtgataaaaacaggtttatttttttccttttcagtatccctgcaaagttgggggcgcttctgataagtttctgaaaaaaaagttaagcctaaactttttggcctgtttaaaaaggaattaaaaatttttaaaaatttattcatctccctttttgatagaaaaagcatcagagtgcctaaactagcatgtaaataaaatttggtgcgtttcagagcattttctgaaaaaaatatttatgaattaattatgcaaaaataaataaaaatttctaaaaatttgatcgtccataaataatttgtaattgatcaggggctcaccaaattttgcagggatacgtatcggaacactacaaatgcttactaattttcctagattttttaaacccggtgaaaattttttgcagacaccaccacttttgcacttaaaaactaaactttttggcatgtttaaaaagcaattaaaaattttattcatctccctttttgatagtaaaagcatcagagagccttatttaacttgtacataaaatttgatgcgtttcagagcactttctgaaaaaatatttatgaattaattttgcaaaaaataataaacagtgaaaaactcagaatttctaaaaaaatttaaaaccaattacaattgtcattttttcaggttaagttagtcctgttccggggagtatgcctataaaatttggtacgattttattgcttattgaaagagctagagccgaagaaaatttttttaatttaagcctaaactttttggcatgtttaaagcaattaaaaattttattcatctccctttttgatagtaaaagcatcagagagccttattcaacttgtaaataaatttggtgcgtttcagaaccctttctgaaaaaaatatttatgaattaattatgcaaaaaacaaataaataatgaactctcttccttaataattttcctgcaccgaaggtactcactcggcctcttcgc

SEQ ID NO: 22898 - DNA, 1777 bp, Heterodera glycines
tccaaaaaattttgttcagtttaaaaaaaatttcgagccaaaaaagttggaaaatctggtttttttgatgaattcttctggccataacttttttgaaccttaacgaaatttttcgaaatttttcaggctaatagaggatacatagggctatcgaattacaccaacaatgttggatttggttggcaaagaaaaaagttatagcaaaaacttgtgctcgtacgaaaacgaccccgaccccatttttcatgcttaactctttgaaataaaccaatgctagatcatttgtgccatttttttccgggtcgttcattaaactatgtatatgcgtaatttcaatggaataatttaatggttaattattttactaaattatttttatgtaaaattaaaccatttaccacttcactggttttcttattggtcattcttttctaaggactttgctcgtcggtgcttacattacattgattggaacgcggactctatgatcggatcaaagaaatttctgcaaattgaccaaaaattgttgtgcgaaatgttggcccgtgttcagttaaagaccaatggcgagataacaatttggaaagcagtaattaaaagccaaaacaaataaatttattttcaaattaatttaaggcccttcgttgggctgacgaaaagtgccgggagaatggcgaggaatgttcggcgaaaaatcagcgagtaaaacttggcccagccttgtacaaaattcgctttactcacatgccaaaagaggaatttgcaaaagaaattggtaattgggcacttaattgagcttaatgagtgttaattgtggacagaaagaacgttgatttgccaaatttccctctgtcagttccgtccggcgtgttgacaatggccgagctgatcagcgtgttgtgttccacgcccaccccaaccgcggcatttccgtgccgtatccgctgaaatttgccacccaacggcgcactctgtccaaacacatcgatgcttacgtttgtcccgtgctgacactgcgagtcgaccatttgtccgcttttgtgcgcgagggcagcgaccgacgcattagcgacgcggtgcacatcaaaggacttccgtggataattttggccgctctggtctccgatccgagtaccaaagagaaattcttaggcttttacctccgatgcggcgaagaaaacggtggcataatgacaaaaagaaaaaaacaatgattttgaattgtaaattaagactcggagtggagctgtttttgttcggcaatgtttcgaattgtttcacaaaaggagagcaaaaaggatttttctcgcaaactttcccacttttttcacgccaattcggcggaccgatgcggcttttacaattttatgacgattgaagtgattaaaagcaattagaaaggcaattaaatttaaaaagcaacgcattaagcgattgatgaaccagcggaatgggtggtacgactcggagaaggattgtgccgttttggaggtcgatattgacttgacgaacgcagcagcgaccaatgggacgcaaaagcgccggtggagcgatgctttttgagaacggaaatttgggctaatttttaatttatcaaaaatcaatcagttaaaatattttaatcaacaaatttcaattgccaacaaacaaaaacattttaaatttgcaaaacgaatcatgttaattgccgcaagaattttaatttattttctaataaataatggtcattatgtatttgtgccctcaagcaatcaccatttgcctgtggatactttcc

SEQ ID NO: 22899 - DNA, 990 bp, Heterodera glycines
gagaaagagagagatcgagagagagaaatttagagaaagagagagagaaagagagagagagagagagagagagagagagcgagagagagagagagcgagagagagagcgagagagaaaacagagaaaagagagagagagaaaaagagagagagagagagagagagacagagagcgagagagaaagagagagagagcgagagagagagaaactgggaagagagagagagagaaagagagggaaagtaagaaaaaagaagtgaaaagaaagagagagagcggtagcgagtgcgatagagagaggaagagagagagagagaaactgggaagagagagagggaaagtaagaaaaaagaagtgaaaagaaagagagagagagagaaagagaaaaataaaagagagggagagagtgagaaagaaagaaatggagagatagagcgcgtagagagcaagagagagatggagagagagagagaaagagagagagaaaaagagagaaagaacgcgtagagagagaatgaaagatacatagagagcggtagagagagagacagaaagagagcgaaagggaaagttagagagagagaaagtaaaagagaaggaagtgaaaaaaagagaaaaagaaaagagggggagagtgagaaagaacgagagggatagagagcgcgagtaaagagagagagagaagagagagatggagggagagagagaaagggggcgagagagagaaaagagaagaaaggatggtggagagtaagagagagagagagagagaaaaaggcagagagagggagagaaagaaagagtgagtgagagagggaaagagggaaagaaataaagagagggagtgagtgagtgagagcgaataaagaaaaagaacgggatgagagatagaaagaaagagagtgagaaaagaaagggagaggagagagagaagaaaatggaaggcgcgatggaaagaagttgtttttacatttttttaataccatttt

SEQ ID NO: 22900 - DNA, 1287 bp, Heterodera glycines
  unsure (1)..(1287): unsure at all n locations
tgcaggtcnncggtaatcatcggttttactggtcccataaaaaaaggaggcaaaaagggggttttgagcaattttgtgttgctttaggcgtgtttttgagtgcgctgaacacgatgacatccatttagacccatttcgaacccctgacaagaattcgaaactaccgatggtactccatccttttttcaattatgcaacaaaacctgctcaaatgcacgcaattcgaatccgagtcaggggttcgaaatgggtcgaaattaatgtcatattcatgatcagcgcccccgaaagtcaccgaaagcacaacaaatttgctaaaaatcccccgtttttgcctctcttttttatgggaccagtaaaaccgatgatgatcgaacaggggcagggacggtcaaaatttgggaaaaaacaaaaatttggatgccaattttgccctcatttattccgtccgttcttaccaaggtcttcacgcatcacgaacagatgcaacggagtgaagccggcattgttccgggcgttcaggtccaactcattgtgcttcagctgaagcaagctcatcaacgaggccttctggttggctgcatgcaaacactgttttggggtggaaattttttgaaaaaattaagaacggatggaagatgcattttttgggcatcggaattccgtaagtcttaaacggtttggcaatcggaaattgtaattgacgactggggaaaaaaaatttttttttttttgccataaaaacgagattttaagttatgtcaactaaatcaaataattttggtcgaaaaagcacacagttgaagaataaattggtttaaatgaagaatgccaaaatgggatcgaaaaaaaaaatcagaatttttaaggcaaccagaaaattttttttttttgcgatttcgtttttaccgtgtttccgtttgtcgggtcccgttcatgcagcaagctgggcgacttttccagcagcacacgaattgcactgtaattttgaattttgatacgataatatacaaaaagaaaaattgtaaaaaacgaacccaaaagagaggtaattaaagaaattgaccattctatacaatatacctaaaaggagcaagcgaaaatcgaattacttaagcaaaaaatgcatgaaacgatagaaatagttaaagggatttcgaaaattttaagagcgttcaatattaatagacttattttggagtcataaaagaaataatttccgcaaaaatttcggtacttttcaagtaacgctgatacttttaacatacatttttaaatgcctataaa

SEQ ID NO: 22901 - DNA, 975 bp, Heterodera glycines
ttggtgctgagtcgttatataaaaaccataataagggcgttatataaaaaaccatcaaatggaaattgtcaaccaaaaactgaccataacttttgataatgtcaacagaattaaacattcttggtatcattcgatagccttaacatttctctattagctcacctaaatttcaaaaaatttggtcaagtttgagcaaagttatggccaaaagtacccaaggcaccgggttttcaaacatttttggccataacttttttgaaacctaacgagattttttgaaattttgcaggctaatagaggacatacactgtgttaatttaaaataaagacaccctgttttttgggagtttgaccacttcccatgaaccgatcgagctgaatttttaactgtacgtagcaattctgaaaatattaagattctaaaaaggagaaggcgaaatgacgatggaaaaaattttatgaattttttcccgaaaaaggggtgttaatttaaaatagagacacttgataaaaacgaatcaaatctcaataactaccaaaaagaaactgataaaataagctaaataagaaagaacaaatcttttttcacatttctatttattttgcagacagaaatctgtcttttaggcggagttgtgttgaattttccaagttttccggagaaattaagggccataaggcttaaatcacctcaaacatttgcccaaccgaatcaaactaacagcaatcagcactaagataacgtacagacatcctttaagcattttttattcattttatgccataaaaaaggcattaaacacaaaatttttgcgggtgaaaaaatacgaaaatctgagtaaattcgaaaaaaaattctagggggttgggagaaattttccatagaagatgaatatgacgaacatacagagcacaaaattctctacaaaatggactttgaatgaatgctctactacctgtatccgcgaaggcgcg

SEQ ID NO: 22902 - DNA, 630 bp, Heterodera glycines
ttcttatttataagaaatgttctgatttcggggtattgttcttattttgttcttatttcttaacagtgccggcctcgatttttcccaaatttcccagatcccgtgaacaaccctccccaagtagaaatgccgtaattaatttggcacaaaaatttttgaaaaatgcggttggctaattgatcaaataatttatggtaaacgaatgaacaaaatgaatgaagcaatgtactgatgctgtatgatgatgccgtgtgatcgatctgtgctgccctccacaaacccaaaaattcgcctccgtttcgggcattcatccaattcagccggggggggggggggggggataaatgaaatgcgaaaaatctcccgctgtttttcgctcttttcaaagtgtgtgcacaaacacaaatttggtgagaatgtgaatgaatgaatgaatgtgtatgaagaaagaaaggcatctcagatttgcgctttgggttgggtatttatttgtccgcttattcaatggatttttcggattttcataacgagaaattttggaaaaattttcatcatccgtccaacttcctccccccccccccttctccctctccagcagggtgtaccccacaatgttgccactataaaacg

SEQ ID NO: 22903 - DNA, 1002 bp, Heterodera glycines
agtcagggtcagggggctggtggtaagtaaccctctccccttcaaaacgcgaaaattttaaaaaactaatgaaaaatgggaaagagttttagaaaagacaggggggcttagagtggccctctctccccctcaaaacccgaaaaattaaaaaattttaaatgaaaaatgaaaaaattatagaaaatataccattttcttaaggatttcgttaaacttgtatgttttatgtggttttaaaatattttaaaagaaaaattcttgaattttctacgaaaatacactaagaactttattaaataattctaaaaaaacataaaaaattttccataattaaaatttaaaactttcacatacaaaacgagttttatccatcccaataaaaatgccccaacccaacataataaatatgtagcccaacaaagtttaggtcgtgcaaatattttgcaaaattttatgggataaaatcgggcggcgtcgcgtcgtctcatccccacccccgcctcgtccaatcgggtcaattgcctcgtcgagatcggatctcgacgacgaggcgcagcgattattgttgttgctattatttggtattaggtgactcacaaattattaatattattattatgattatgaatatatgatatttgctgtgagccacattaaaattggtaattatgcaaaatgtgacactttcgagaaataattcgcccgccggcgaaatgatcggcgcgcggaccgatcgacgaaaagatggtcaaggatgggggtggtgttattattattatatgtttgttgtgatgtgaggtgcataagtaataataaggaaaacattttttaaattgatggacgggaaaatgaaaaatgttttttgattaatttgattccatttttagacaaaaaaaaattgcacataattgatagaaatgtctaaaaataaatatgaaataataaaaaatagatagaatttttttatttattagaaaattcttttaaaatttaggaatttat

SEQ ID NO: 22904 - DNA, 1260 bp, Heterodera glycines
  unsure (1)..(1260): unsure at all n locations
cagaaattaaaattactaaaattgaagagggattttctcacctaagtttatttgtccaatggaaaagaagccttgggaaaaactaaaaaaatcaaatgtaaattagagaaaaaacaaaaatcaaaattttttgaaaattgaataacaaaaacttactaaatttgaaaatgcttttttatagttaattttgcctaaattaaaaaaaaacaaattcaaattttagagggaataaacggcgcccccacaaagtgtccaagccacgaaatgtccaaaagagtaaaaacccacgaaatgtccaaaatttttcaaaatttataaaaacaaaatgagtctaatttcgaatttttagggttttcggggtcgctgaatacgaatatatacgaatataccctttatattaccccttgcctaaccttaggcccatctgaataataaaaactcaaattcgagacttggacattttgtgggtcagcggaataaacaataaaattcttaaaaatttattcaaaaactaaagaaaaagaggaaaattatttttcgttaagtgaaactttcttaaaaatgaaatttgattaaatttcctgtgagaattaaataagaaaaaatgaaaaagtgattttattatattggaaatatctggccaataaaaagcaaaaaatagccaatggaattttggccagccaaaaagtaaaacgacagcttaatgggctatcgtttaggcgttaagtgatttattagccaaaagaccgatcgttggccatcaaagcagaggcgagatgagtaattaatgggccgagaattaattggtttttcttttcctgtggcgtatttgtcgagaatttttatttgaatttccgattaaaaattaaaaaaaacgtaaattagtaaaatagaaaaggtacttttgtagactgactgatatttttcgagtgaaaaatcaaagatcgacggtattttgattttcgaaatattgtaaatccgaaattccggaaaacttttttccattggcaaatgcgaatttccgaatcgaatatgattcttccataacatgtgctatcatttaaatttcccattcttcgcattcattttttttttgcaatttcagtgccaaatttcaattaaaattcatgccaaaagacactctcattaaatggtagtggaataanataattttaaaaaattntaaattaaaaaaaaattccttttcccaaacncattggncaataatttgttgtgacatatggcggcggaagggctttt

SEQ ID NO: 22905 - DNA, 1564 bp, Heterodera glycines
cactatttcgacattttttggaaaattccttaacaaaaatgcaataaaaccaaaaaatatacccctaagaatcgacctaaaaaaatttaaaaaaaatatacccctgagaatcgagctaaaatttttcaaaatatactcctatgaaatgaaaaaaataattttcccaaaaatttactttcttggcaaaaatttttaattttaaaaatttttttaggtaactattttgggttttttgatcttaaaaattccagtcctactcatttgcaactgcaatcagtgaataaaaattattttgctcaatttttggctgaaaattatgtcactattcgtcactattttggactttttggcactatttggtcactatttcagcatttttactcactattttagttaactatttcgagattttacgtcactaaaattcccatccctattctcatttcatttttttattgcgcacccccccccccagcaaatttgctgatggcgcgagtcgagagtgttggcgaaagtcgagaaaataaaatttaggacgcctggggggcatttgacccgccgagagagagagcagaaacaagcacaaaaccggtggaaagatgacaaactgctctgattggaagatgggaaagaaatgatattgggagtgatcaatttcgtcggtctctcgcccaatcattttcaatgccatttcattaattgatttgatcacttcgtttgtctgatcagaccggtggaacgcagacaatttgataccaaaaaaattattggtaaaaatattaaaatcaaattttcaatatttatttatttatcttttacgatcaacggaacagcacagtgatcaacaaaaaatacaccacgggtcatgttgctattcgggtagcacccaagagtcaaattcactgaaattcgagaccagcaattcacttccgaagctcaagagccgagtccgataattaacccccatggcttaaaaagcccaataacaatgccgagagacgggaccccccaaaaaagccgagaaattttctagcaccgtttttgaaaactcatttctaatgttgttgtttttgttttcaatttagtgaccccattttcacgcggggaaaagaactcgtcttatcggttttgtcgtcgttgtcaatcgtcgtttttgcccctaccatcgccatcgacggaccatcaatcgtttcgttttcccatctttttcccaaagtttaaacagtcgccattttcgccgatttgatcatttctcctcccccattttcacattttaaaatgtttgctgtttgttggtgggatgttcacacaacgtgatcaaatcgtaagataaattgtcaagaaatgtgagaatgtaaaatgggaatttgttgtacaaattgtcaggcgtgggaagaatgaatggaattctctgtttttggctacctatttttagtgtcggaattcgattaatttcctaattttgtaaaattcaaaaataaattaatttttgcatttttttttttactttttttggattttttatacaatcggcaaatatttgtttttgacaatgaaaaaaaat

SEQ ID NO: 22906 - DNA, 1751 bp, Heterodera glycines
aaattaaacttctattatgatcaatttaaatttccctcccacaacgggtttgctttaaacacgctggccgatgaaaaactggagttttatggatgtcaaattttgggacttttcttcgacgtggccatcagcgggttgtttcgtgacaaaaacaaaccagtttgatgttattcgaatgagctagacgcgctctacattttcaaatgtatcaacaaagggtctaccgccactccctggcgagatatggcctgtcaaagcagaacggggccaataaattgaatttttgttaatcttcggcagttgcctttatttcgagcctactctacttgtgcatcttttcccaatatggcactgcttccgaattattgaactgtttcacgactgattgttgagataatttttttttccgattcctttatctccaagcatgagccttataagtgattgttcatatccttctcttgaaaaaaattgtcagtaaaaaaaacacgttttctgaatattaacaacaaaaatttttagacactttctaaagaggaaggaaaaaaatttttcatttgcctaatatttatttatactgttgaactgttggaaatgcagctgatgccgtcggaaaagctccgattttttggggaagtttttttctttcagtttcaccactgattgttgaggcaatttttttcgccaatttcttttgtctacaaacattatttattgcgtttcatcctgtagtgtgtaaaaaattttcagtaaaaaaaacttgttatctgaatatttacaagcaaaatttaagaccatttccaaagaggaaggaacaaaaatttttgcctaaattttatattatattgttgaattgtttgaaatgcatctgttgtctgccgttttgaaatttttcaacttttcgcgaaaagatttcccagaaaatgcatgggacaaataaaaattaaacttctattatgatcaatttaaatttcctatcagtttcgggtttgctttaaacacgctggcctatgaaaaaatggagttttatggatgtcaaattttgggacttttcttcgacgtggccatcagcgggttgtttcgtgacaaaaacaaaccagtttgatgttattcgaatgagctagacgcgctctacattttcaaatgtatcaacaaagggtctaccgccactccctggcgagatatggcctgtcaaagcagaacggggccaataaatttgaatttttgttaatcttcggcagttgcctttatttcgagcctactctacttgtgcatcttttcccaatatggcactgcttccgaattattgaactgtttcacgactgattgttgagataattttttttccgattcctttatctccaagcatgagccttataagtgattgttcatatccttctcttgaaaaaaattgtcagtaaaaaaaacacgttttctgaatattaacaacaaaaatttttagacactttctaaagaggaaggaaaaaaatttttcatttgcctaatatttatttatactgttgaactgttggaaatgcagctgatgccgtcggaaaagctccgattttttggggaagtttttttctttcagtttcaccactgattgttgaggcaatttttttcgccaatttcttttgtctacaaacattatttattgcgtttcatcctgtagtgtgtaaaaaattttcaataaaaaaacttgttatctgaatatttacaagcaaaatttaagaccatttccaaagaggaag

SEQ ID NO: 22907 - DNA, 1178 bp, Heterodera glycines
atcgaaggatggtgggaaggggaaatgaatggcagtgccacggaagagaagcaaacgagaagcaattgcacaattatgcgggttaagcaccgctaaatacgccgatgccgtgggtcggtccgcccttttagtgtaaattcatcggcggcacttccgtctccgttttcttcgcctttctcttcgccgattttatcttcctcccccctcgctcattttcacttttattagacaattcgcagttaatgctttgattttatcaacagataaaatgctttacaaatggaaatgccaatttttcgaatgttcaaacaatgaatggcatcttttgaaaatgccgtgcctttctctgccccggcatttcctccgtttttcctccgtttcttttcccctcaagtcattcccgcccttgtcaaattgttctgcaacacaatgtcacaagtagcgccaaaaacaaactctgttcaaaatcccattggtttgttttgtttttccaaatgccttttctgaccaaccgatgtttttcgtgtcggtggcatttgtcacgtgcgtgtaaatgtgccgattattctcttccgtgttcacctttaaagcatctgctgatcactgagagatgtttgatttggttgggttcacttacacccaagaacagcttcttcacaaattccacctgttcgtcaattgtgcctttttcagtccgtttcgtttttcccaattccccccccccccaccgcttcggcgtatgcgctgtcactggtaatgtttttggtccgatctaaaaaaggaaatggaaaatgaaagggcacaaaaatcggtcgatttggagcgatttctctgatcagtgaatgaatggacaaaccttcaaaggccgggtagaacctgtgcaacggaacatggcgcaatttgagctcgaaaaggtcctttttattgaggaataaaatgaaggaacactgcgggggaggggagagataaagttggacggatcaacgaaggaaagaaagaccaaagaacgcgaagagagactcactctgatcagaaacggattgaagaacatggcacggaacaggtcgatgctgtcgtccattctgttctgaagcgaccatttcaaaatgaaaaaggaaaatgacctcgaatttgatcagagttaattgtcccattcattcgcccgtccatttactaat

SEQ ID NO: 22908 - DNA, 1056 bp, Heterodera glycines
  unsure (1)..(1056): unsure at all n locations
gtcgatcagcctttagcgcagcacataaaccaaatgatcacaccacanaacatccgatcacttctgctgatccatcacccgaccaacctgatactgaagcgacggaacccaaaagtaatctgtgaaaaggcaaaattaaagtgacagtatacgagtgccaaatgaaatgtggtggtcattacttcgtggacacctgtggtggatgccctggcatggataatgtcaacggcggtgggaagataatttggcatcagaatacgtttggattcggcgaaaaggctgggtcaaattataaggcaattagctaaagaaaatcactaattggtattgtccggcaggtaaaattcgtttaggcgctgacaagccgtggtcaccgagtcgtaagataagaatttgaggatctgaactcgaaaagcaaattaacagtttaatcgatgggtggtcaatcattggcttgccaatttgatcatattgtcatcgtcaaagtcaaggaaccttaaaaggatgtcaaaatgagcggtgaaagacaagaaacgctaaactttgagaaggaatattcaaatttgtcgaccaaatctttttcattggacggcacggcaatttgaagctgagcgatgccgcgggctatgtaatgcaaagagccgatgtaattagtgtgaagcatatacctggggaaaagcaaagtgggcacgggagaaggcccaaaatgagcaagagaagaagcaaccggggcaaacccacctgtagttgaccaactccgtttcactgaacccgtcggtgtgaagaattctgaatttgtccctcaaatggcctttgtccttcttgcccacctcatttgcttcacaattgtggatttgcccgagtcggcactgcccaaaaggagaattttgaccattttccttctaaatcgttttgtttcccctaattaagcctttgccattgccaacccctcaatccgttctttgttcaagtccaactcaattcgattgtttctgtccatcgcttcgtcggatgcttcttctcctttgcacaattttgagcccatccgacgaatgg

SEQ ID NO: 22909 - DNA, 1100 bp, Heterodera glycines
ttcccggtgggaaaaatgggtttgaaaaagtttatggggaaaaaaaagcctttacaaaataaaacccctgggagaagggagtgggaaacatgatttaaaaatttcaaattttttctagtttaatctactcaaaacggttcagaattcaataaaaataacattcacggtgcgaaaaatggggtttgaaaagtttattggggaaaaaaagactacaaaataatacccctgggagaagggagtgggaaacatgatttcaaaattttcaattttttctagtctaatctactcaaaccggttcagaattcaataaaaataacattcacggtgcgaaaaatggggtatgaaaagtttattggggaaaaaaagactttacaaaataatacccctgggagaagggagtgggaaacatgatttcaaaattttcaattttttctagtctaatctactcaaaacggttcagaattcaataaaaataacattcacggtgcgaaaaatggggtttgacaagtttattggggaaaaaagactttacaaaataatacccctgggagaagggagtgggaaacatgatttcaaaattttcaattttttatagtctaatctactcaaaccggttcagaattcaataaaaataacattcacggtgcgaaaaatggggtttgacaagtttattggggaaaaaaagactttacaaaataatacccctgggagaagggagtgggaaacatgatttcaaaattttcaattttttatagtctaatctactcaaaacggttcagaattcaataaaaataacattcacggtgcgaaaaatggggtttgacaagtttattggggaaaaaaagactttacaaaataatacccctgggagaagggagtgggaaacatgatttcaaaattttcaattttttctagtctaatctactcaaaccggttcagaattcaataaaaataacattcacggtgcgaaaaatggggtttgaaaagtttattggggaaaaaaagactttacaaaataatacccctgggagaagggagtgggaaacatgatttcaaaattatcaattttttctagtctaatctactcaaaccggttcaga

SEQ ID NO: 22910 - DNA, 1592 bp, Heterodera glycines
tgtacgtcgttgcaacaatattcagggagtttttcctcccccccggaaggttggttgtaattattattgtaccatttgccttatttctgttgatcggggattttcatttgatcaggacagtattgttcacgtggaggaagatgggagagaatgttgtcatagtttgatgatttgttgaacatgtgtggaaaatgttgtttatcttttatatgaagcccaaatgatttgatgaggccagataatttaatgggcataaggttgtagctgtcgtgaagaattgtaagcggtccatgttcattttgattaattttgagttcgtagagtcggttcccttgtttgatgatgtccggattgtgaattccttgcgccaaaacctccttgatgatcatcgtcatgtcgtagcgccccccaaagtgtgcaaaggcaaccgtgggaaattttttgttgtggtcgaagagtagccattggacaaagtcgcgtagcgggtgttgagtgatgattttttggtcgactgttgtctccgtgtagtcaaagggtgaaaaggtgattgagcggtgaggaccgcaaatttggcacttttttccctgaagtgatttgttccagtcgcccattgataatgcaatcggtgcagatgatggtagccgctgcaaagtttacctcgtgttcgaatttattacctacttttttatcctgtgtcgcctcaaaatcgtatgcgatgatcctgtatggtttaagtttatggggttttaggggttggatgaagcagcttttgcaggggttctcgccatcttcctcttttaaatgaaactgcttacatagacgacaaaacctttctccgcattggtggcctacatttccgtgaaccttaacattataaattaccccacaatcttcgcaacgctgaaatttggtgcacaaatccttgtggaggtggcgttcatagcagtcgttgttatagaaatagttgttgcagtgcaaacattttttgaagtagccttgttgggcttcgcaggggtagtcgacgcccacctcccggcaaccgtgacagagcgatgtgcagttcattgaatgttgtggtttattgctgaatgccgattcacaggagaggcaatagtagcgtttgttccaaaattttggcagggttttgatgccgtcaaagtggttgttgttgtggtagagaagaatggggaattggtagtcggtgacatcagatttggtgattggtcgtatctggtaatcgttaaatatgaaaattttgtactcaccgggatatttgacgttccataacccttgcacttgatggatgtacggcatcgcggagtaaaagtagtactttttgacaaagaacagttgtttgattatctttgagccatctaaattgtttccttgaaattactcccctgatatataatgagtagtagcgcatcagttccagtgcataaaaaaggcaatagttgtcattgttgttaattttgaagatgtgtgattgggaagagaagattggaggggcacttcctttgatcactcgtcgacaggttagaccatcagtgttcaagacagagaacggtataacaaaatgggggcccataaaa

SEQ ID NO: 22911 - DNA, 1796 bp, Heterodera glycines
acatagttgatgaaaaatttcttggccctccatttgtaataaatctttttccaattttaattttacaccttctttcttaaagaatttcaacaaaaatgatttaaacattaaaaagcgcaatttattaaaacatttaaaataatttcatattatataaaattatattgcattgctaaaaaataatattaaatactcaaaaaattttaaataatatgctattttcagataaaattgaacaatttccaaaataataatggaaataactaatgaaacaatatgaattttaaaaaaaataaaaataaaacatggtttacttataaattttaatttatttctgcgataaagataaaatttaaaaataattttttggtgacaaaatatttttctaagttatcatatttgatattaatgcaaataaagacttttatttaaataattatatttaacaattctttttttatttaatttggttcattttgtaaagttctttccaatattaagataaaagcacccaaatttcgttttcctcttatattataataacacacatgcccagtggaacgagctgaattaggctttgggatcccaaccctcagaattccaatcatttttatgagggggtcctggggtgatcagtcccacttccctccccaactccaactccattttaagaatggctttattcccggaaaagcatggaaaataaatataaataaataaaataattacataaaatggaatcaaatatttaaatacaatcaaataaaaacataaaatacaaaaattaaataaagttacataaagttacataatcatgattaagtgaatatcaatagagagatcgcagattaaatagacataaatggaaaggggaggagtgtcggatcgatcgctaacgggaaaataaataaattaaaatgaaaatgaaaagagagattaaaatgaatgtgaaatgtgcttaaatgcttcggcaatttatgttaattagcttatgtcttacactaatttaaaaatgaagcaaattatttggtttttttattttgttcaatttgtagagaatttggcaaaatatatgtgagcctatcgacatcgatttttgaatcttttaaatcgacttttaaagagaaaaaaattagtggggaaaagaatactcgcagataaatgtgcgagagattctctttaatcggttaaaatgtccttctaaaattttacaatgggagacggacggtgcacgctaaaaagagatttttaaagatacatattatgcattaattaatgctaatgagtgagtgctgctgtttcgatggtttgatgggtcttgactagagaccggacaagagggtcggtcgaacggtttcggttaaaaaccgaaaaaaaccgaaaccgaaaactcaaaaaattctcggtcgaacggtttcggttaaaaaaccgaaaaaaaccgaaccgaaaaactcaaaaaattctcggtcgaacggtttcggttaaaaaaccgaaaaaaaccgaagaaaaattttcggtataccgtttcggtttttttgaatttttttatcttttcccaaaaaaaacaataaaccatttttatcaatagaaaaagcgaaagatcacctccgagtaaaattgtaggctattgaaacctctattgaatggtgtactataggttgtgagaatgatttaaaaaggcagccaaaaaacatgtgtttgctccttgattctaaaaaacaccagattagtattggcgaattggagccttttttgatgttttttaccgaaaaattgcattaataattaattgaaat

SEQ ID NO: 22912 - DNA, 1804 bp, Heterodera glycines
  unsure (1)..(1804): unsure at all n locations
ttttctctattagcccgcaaaataaaaataaaaattgtcccccccccggaaaaagttgtatgaaaataagtactattatctgcctcaacttatgttaaatttggtaacttttttgaaattttccaagctaatagaaaaaaagctgggctatcgaatggtaccaagaatctaaaatttgattgactttaagcaaagttatgccatgttttgtcgaaaaattcctaaaattggctggatttatgaaacgacccagcatggcattcggagataaaagaaatattttaaaatgggataatgcatttttaagagcgatggatcactgctggcggcggcggcggtcgctccatttcgacagagtcacgaaatgagggggatgaagctgcttccgagccggacattgtgcaggacagaatgatcgacttcatgcggcacaaaaaggacagcacaacaacaccgacaccaacaacaacagcgaaaatggaggacggcggcggcagcaggggaagggtactgtagaattgggatgggcttttgtaacagttacatatactgtaagtagctgtctgcaaaatacagtatgggtggccgactctgcaagagcaatttcacacatttcttcctgctggttttataaaaagaatatactgtagctaattggcatacagtaagcggtgggccttttggcaaaagtcgctactggatgtgcgccagtgggaatccagaataataatctgtcagtaaaacaatcagtcggttatggacaatctgtcagtggacaatccgtcaacaaagtatggacgagatgtacttggatgaaacgaattgtccgtcactgatgaattgtccgtcactgatagatattgtcttccgaagattatccactgacggattgtccggaatccggataccgtcagtggttggaccgcaatccgggagtttttgcgccagaattacacattccggcatttatggcttgtaaaatggcatttttaggcgaaagcaaaacattcaactggctcctctgctggtggtggactatcagtgccggcgccaaacaatcggaagaaaacgccaaatcaacaacagcaaaaaggaaacaacgaattgggaggagaaggaagagaaaatggggggaaaagagaggaaaagggaggagaaaaggagcagcagcggaagcagaggaaaaggaaaagaaagttgcagttgaacatcatcaaaaacaacaacaacaaaagcaagaagttcaagcagtacagcagcaacaacaaaagcaaattttggtgggaatggagatgaagatggataacagcaaaaatggagaaacaagggaagaggtggaaaaggaaggaaatagcattggggaaggaggagagacggaagagaaagagaggaaaaggaaaaggaaaaattcggcggaaggaagagaagaaagaggagagaatgaagcagaaaagagagaggaacagcagcaaattgacactttttaaaatattgccggtgctaattgctaacggacgtcgtaaatcccccgtcaaaatcccgaaaattaatgtcacaattttcaagcagagagaaattcatacactcgatagatagcaagccatttttatgcatccgattgatttaccaatcgagaggattttcttcataaattgcatttgatcactgatttaattatgatcagtcggtcattcttctcattnanttcatntcttcttttctctgcgctgatcattgttttttttgtgnttttgtcgtcactcatttcgcccttttgtgatgctttgtcccgcttcttcttctt

SEQ ID NO: 22913 - DNA, 1507 bp, Heterodera glycines
aaaacaaaataaatgttttttttttaaaataatttataagtttttaccattcatttttttgttttcaaaattatgtactaataaccgcgtttgtacacataaatctttgcccaaatctccacaatttataataacacatcttcttctcgctaaccggggcagcagcaaaaagaatgtgtcaaaatttgtgttggtcaaaaacaaattggcacggcacggcgaagaaaaagtgccgatggaaaaggggggagggcggaattggcacgacggatgtgccgttttggacggaccgacccccgggggacaagcaaaagatgatggacgacgacgggaggggggggggggggaaagcgtgccggaagggatttgttgggcgtcggcatttcagggctaatgtaaaaagccaaagtgcgaggaagggggggggaaggagaagcggattttgtgccgaagaggaaaaagcacgcattctaagttcaaattttttatgaagttgaatttgttggggtcagaaaccaaaagggaagagcacaaattatcggtctacgtcagttcgggcccagatagtgttcaatagtccgatatagtgacataattttcatacaaaaattaagcaaaaataatttttattcactgattgcattgcaaatgagtagggctgggatttttaagggcaaaaaaacaaaataggtacataaaaaaataatttttaaaattaaaattcttgccacgaaaatacctttttgagaaaatttcatttcttaggagtgctttttgaaattttttttgtcgattcttaggggtgtattttttttttttttttttttaggtcgattcttaggggtgtattttttggttttattgcatttttgttaaagaattttccaaaaaatgtcgaaatagtgaaaaaatagtgacaaaacgccaaaatagtgatttttaactattttagtgacgaagtcgccaaaatagtgatttctagtgacgaaaagtgacgtccaaatgaaaaaattttaacgcagaaatgcgttttttgagctcctttcttcaaaacaattgagcaaaaaaaaagttttttcactaaaagttgcgaccctaattataagttattatttcttcaaatcgttttttcatgtttattttactaaaataggggtaataatttttatatctttttaatacgaagttcagaactttcctaagagaaggaggagaacatatatcttttgttattttctcatactttttcaatttaaaaacaggttaaaccataaaatatttttatgcttaatttcgagaatttaaatataatatttataaataaaattaataaatctctgactgtttaaattttgacgagaattagggccgtgggtttttccattaattgtaattgttaatgaattttattttattttttccttcggaatggctttttttattaaaaaaaaaatctggcaacggatgggaatattttcaaatttttagtacatttttgtttttaaaa

SEQ ID NO: 22914 - DNA, 1292 bp, Heterodera glycines
gaaaagctaataaaatgccgatttgctccatcggcgacggcacggcactttgttgccaaaagacggtcaactgaggacacggacactggcacccattatttgatggacgaaaattgaattttaaccattaaatgaatggaatggaaatggcgagtgccgaagaccgatgaaaggacaaatgccgttaaatttggcattttaaattggccataaattggggactgtgactaactaattagtaataaaatgataaattgttggcaacggatgtaatttgaattacaattttatgactaaaatgaatgaaatttgatatatcgggccataattagtatagaccggaattttgaaatggccgggacttggaaaatggacccgggcgagatctcgggactgcccggcaaaatcccggcgggccccggtcccgtccggtctctaataattagtattaaataaaaattgaaaataaaaaaatacattaatatcaattattattaatttcaaatttcacaaattaacaatcgaatcaaacaattatttcagctcaaaataaaattaaatttttaaattttaaattaattttatattggattaaaatatttaaatttgatagtcgcaaaaactttccaattgattacaattaatttattttttgaactcaaaattaggagaaaaataacataaatttttttaaatttttatttaatttatttttaattgcattttcattttaattgtaaatatttaatcaaaataaataaatataatttatttaccaaccaaataagttctgtttagggttcggcttagtcagtgaacattgtccagctcatacagtaggctgccgaattcgaattcaagtaaaaaatgggaaattttggagaaattaaaaaaatatatattttttttgccctgcagcgaaatgccgtcactttctacgattatttggacagtaaccaatttgtctgtatgttgaagggcgaatttggggagcagcagggctccggctgtgtacggaaacgttcaggtggaaaaacaaattaattagaaaaattaaaatgttcgaaatccgaaccctaaatcccgaggggtcgattaattttccaaaaatccatttcactaaaatgtgaactcattatttcatctttagcataaggaacaaaaatagtgtaagaaaacatgtaaaaaatggatgaaaaccatggtggaaaaataattagtaaaattaaaatttcattcaaaattcaattgttaatatcggagtaagaaaaatttattcaaaaaaaccaaaa

SEQ ID NO: 22915 - DNA, 1268 bp, Heterodera glycines
  unsure (1)..(1268): unsure at all n locations
aaaatcactttccaggattaaaagcgcacaaatgccgcgaatgctctattgcatttgtgtcctctacctcacttgctgtgtgtaaatataaataataaataataataataaacaaatattaaattcaaaaaatgattggaaataaattaagaaacattttaaacggctccaccacggacttaagccgttcgagtgttggttttgcgaccaggagtttgacaaacttgtaagtttttcaatgtgaaataatgacataattaggcattaaaaaattaagtaaattattttgctttaacgaactgtaatgttcatttttatggaaaaagaagccatcgaagaaaaattactgatactttccttgaataaacattttcatagactttttttaacctctcaaatggtatcatacccctaaaatattttgacataaaaaaacagacttttacacgggcctcctgctaagaaactgatcaaaaaaaagaagtcttcaatgcaaacttgatcagatcactcccccataacggcagggggataattttcaaaaaattctttcggggttaggatttttgtccataaagtataatcagtccatcagaaatggccacataacagcaggaacacccaacacactgaaaatcgggataattttttgtccataaaatataaacagtccatcagacagaacacagaatctgcacccgtgtattgctttttgaatggcggattgatgacttatactcaaatgaatttataagtgatcaaaattgactatcaaataaatgaaaaattttcgaccaattttccctgggaatacatcaattttatggaggccaattttaggcacttgtaaacctcattgattatgagccatcgatccgcctttcaaaaaaagcaatacacgagcgcagattctgcgctttttctgataagtaagcattattacattgaataatgaatgatagtttttaacggccgtaaaaatgacgtaaaatgattaatttttgcttcaatcctaaaaacattagtgttcgcttagctttgtctacatgacaatagctgcaaaataaaataaaaactatgttccattttcaaaatcgaaaatcaaaattttgatgatcaagtcgtctgctttanagttgataatttagctaaaccggcggcatcataatggaaacgttccacatggataaataccagaaaaaaagaatggagattatgtttggaagaagaagaaaaaggaaaagccaaaaaacactaaaaatgattag

SEQ ID NO: 22916 - DNA, 1703 bp, Heterodera glycines
  unsure (1)..(1703): unsure at all n locations
gattgtgcggtattggccgtggcatttcttttgtttatgcggtattgaccgtggcatttcttttgtttatgcggtattgaccgtagcatntcatatgattgtgcggtattggccgtggcatttcttttgtttatgcggtattgaccgtgacattacttttgtttatgcggtattgaccgtggcatctcttttgtttatgcggtattgaccgtagcatttcatatgattgtgcggtattggccgtggcattttttgattgtgcggtattgaccgtggcatttcttttgtttatgcggtattgaccgtggcatttcttttgtttatgcggtattgaccgtggcatttcttttaattatgcggtattgaccgtagcatttcatatgattgtgcggtattggccgtggcattacttttgtttatgcggtattgaccgtagcatttcttttgattgtgcggtattgaccgtgacatttttttgtgggtttacccccagtttgttaacagtctttcgccgcatttttatggcagattttgaaaatcttcgtaaataaataaacgccaggccgtgcaaatagcaaatagacactgatgggaaattttctgaaaaagcatgcaaattgttgaaaatttttattacaaaaattgtatttcggtactttcctgttttgcgaacacaaaattattttttaaatcagcaatgcgcacgtattttttcaaaaattttataattatgctttttctcggaaaaataaaatggattatgactaatttttggtaaaggattagtaaataatagccgtcttctctaaaaaagggagtactggttggttttttttgaattaaatttgtcattgtaccttaaggatagactttcgctttcgcaattatgttttttggcacttttgcttctttcgcgattcacatttggcgcgaaacgcgaatttggtgaaaatatgttaacaaaatgcacttaaattttcaaaattttttccgacggcgattaccgttcccgccagtccccctcttcccaaaaatttttggaaaaaaagcgctcctaaaaagttttattgatttttatattcgggatagaattttacaaactgatgatttttgacgccaaatgctgatttttgtcggacaaatgctgatttttgaaaatttacagtaagcagccctattggttctatgaatttgcgtgtcgctatttcacatttcgcatttattttcatttcgtcttttctattttcataattttgcgtttctcgtttctcgtttctcaatttttcgatttgatgatgatgatataattttgattagtaaaaaacgaaaattaaaatagctatcgactttcttaaagaagaggcccatagttcttcaactgagtctgaagccaagtcacagatgacgacagcgataatgatgatgaagaggaggagggggcaaactaactagatcagaataacgcgcaggagggaataaaggaaaagtgcccatcccaaaataatcatctaaaatcagcacttttgttaacaaacatttatttttcacaataactaacaataaaagtttcggaagatgagtagattaggaggattcgtcagttggacgtgaacatatttcaagcagttctaatggaaaataataatgatggtgatttcccccatactgcgcaacacagggcaggaagggaaatctaagacgaa

SEQ ID NO: 22917 - DNA, 1048 bp, Heterodera glycines
ttttccagtacgggtttgtccgtgaaaatttgaacaatatttccaaaaatcccaatcatttttttcgatccttgtggactgagtcgccccttgaaattatatatcagggaacccaatactttcttggaattttccagaacgggtttgtccgggaaaatttgaacaatatttccaaaaatccctatttcttttttctatccttgtggactgagtcggcccttgaaattatatagcagtgaacctaatacttccttggaattttccagaacgggtttgtccgggaaaatttaaaaaatatttccaaaaatccctatttcttttttctatccttgtggactgagtcggccattgaaattttatatcaggaaacccaatacttccttggaatttttcagaccgggtttgtccgggaaaatttgaacaatatttccaaaaatcccaatcattttttttgatccttgtggacgaatcggcccttgaaattatatatcagtgaacccaatacttccttggagttttccagaacgggtttgtccaggaaaatttgaacaatatttccaaaaatcccaatcatttttttcgatccttgtagactgagtcgacccttgaaattatatatcagagaacccaatactttcttggaattttccagtacgggtttgtccgtgaaaatttgaaaaatatttccaaaaatcccaatctcttttttcgatccttgtggactgagtcggcccttgaaattatatagcagtgaacccaatacttccttggaattttccagaacgggtttgtccgggaaaatttgaacaatatttccaaaaatccctatttcttttttctatccttgtggactgagtcggcccttgaaattatatatcagtgaacccaatacttccttggaattttccagcacgggtttgtccgtgaaaatttgaatttccaaaaaatccctatttcttttttctatccttgtggactgagtcggcccttgcaattatatatcagtgaacccaatgattccttggtagttatcagtacgggtttgtcc

SEQ ID NO: 22918 - DNA, 2301 bp, Heterodera glycines
  unsure (1)..(2301): unsure at all n locations
ccccccccccccccccccccccccccccccctttttttttttttttttttatttttttttttttaaanaannnntttcccccccccccccccccacaaaaaaaaaaaaaattttttttttttttttttttttttgtccccccccccccccccccttttttttttttttttttttttttttttaaaaaaaaaaaaaaaaaacaaaaaaagacaaaattttttttttttttttttttttttttttttttaaaaaaaaatataaaaaaaaaaaaaaaaaagcccctttctttttttttttttttttttttttaaataaaaaaaaaaaaaaaaaaaaacccccccccccccccttttttttttttttttttttttttttttttaaaaaaaaaagaactcccccccccccccccttttcttttttttttttttaaaaaaaaaaaaaaaaaaccccccccccgccggggtttttttttttttttaaaaaaaaaaaaaaaaaacctccctcccccgggttttttttttttttaaaaaaaaaaaaaaaaaacccccagccccgggttgtcttttttttaaaaaaaaaaaacaataaacccctagcccgtgcctttttttttttaagaaaaacaagacactcctggcctggcttgtttttttttaaaaaatccaaaaaaactcctagccctggcttgactgttttttctgaaaacccaagaaaactcctagccctggctggactgttttttctgaaaatccaagaaaactcctagccctggctggacctgttttttctgaaaatcgattaaaactcctagccctggctgggcctattttttctgaaaatccaataaaactcctagccctggctggacctgttttttctgaatatccaagaaaactcctagccctggctggacctatttttttttctgaaaatccaataaaactcctagccctggcttgactgttttttctgaaaacccaagaaaactcctagccctggctggactgttttttctgaaaatccaagaaaactcctacccatggctggacctgttttttctgaatatccaagaaaactcctagccctggctgggccttttttctgaaatcaaagaaaactcctagccctggcttgactgttttttctgaaaacccaagaaaactcctagccctggctggactgttttttctgaaaatccaagaaaactccgagccctggctggacctgttttttctgaaaatccaagaaaactcctagccctggctgggcctattttttctgaaaatccaataaaactcctagccctggctggacctgttttttctgaaaatccaagaaaactcctagccctggctggacctgtttttttctgaaaatcgaagaaaactcctagccctggctggacctatttttttctgaaaatccaagaaaactcctagccctggctggactgttttttctgaaaatccaataaaactcatagccttggctggactgttttttctgaatatccaagaaaactcctagccctggctggacctatttttttcctaaaatccaataaaactcctacccatgggttgactgttttttctgaaaacccaagaaaactcctagccctgggtggactgttttttctgaaaatccaagaaaactcctacccatggctggacctgttttttctgaatatccaagaaaactcctagccctggctgggccttttttctgaaatccaagaaaaaacctagccctggcttgactgttttttctgaaaacccaagaaaactcctagccctggctggactggtttttctgaaaatccaagaaaactcctagccctggctggaccgtgttttttctgaaaatccaagaaaacacctagccctgcctgggcctatgttttttgaaaatccaaaaaaaaacctaaccctcgcgtgggcctgttttttctgaaatacaaaaaaaaaacccaaacctgggtggggcctgttttttttttaaaaataaaaaaaaaaaaccccccccccgggctggggtgttttttttttaaataaaaaaaaaaaacccccaaccccgggggggggttgtttttttttaaaaaaaaaaaaaaaaaccccacccccggggggtggttgtttttttttaaaaaaaaaaaaaaaaacccaaccccgggctgggtggtttttttttaaaaaaaaaaaaaaaccaccccccccggggggggggtttttttttttttaaaaaaaaaaaaaaaacaaccccccctcgcgggcggggtttttttttatttttaaaaaaaaa

SEQ ID NO: 22919 - DNA, 835 bp, Heterodera glycines
  unsure (1)..(835): unsure at all n locations
aattntcggttaaatcttcgtaactttttgaaaaaaacttgagtgagggggagaggaatttgaggaattctctcatctctccaaaatgaaaaaatgaacatttctaaaattaaaaaaatggaaaattgttcccgacgatgtcccaaattccttaaaatttattattttttcgtcaaaatttgatgcaaagcccattcaaaaagcggttttttttcctttcgctaaaattccatttttttgggccacaaattttcttaattttttttttcaaaaatgactcaaaagtcgccttttcaaaactttatgaatacatgccctcatcttcccgtgccataggtgcactgttttacgacccggcaaccgaccaaattgtggccgacggcacgacgacggcacaatttgaggcgcctgcggcggcagcgaacccacggcaaaaccctttggcggcacaccctgtgctaaatgccatcgagcatttgtccgccaaccaacggcagacaacggcacggacagatggacgagaagaggaaggcgaggacgaagtgcccggggcagaattttcggcacaatatttggcaactggtgaaaaaaaatgaaaaatttttaaaatttaaccctcctctttttgttttgccaggattttatgccattttggcgatggaaccgtgcacaatgtgtgagtttattgtttgttttttgcggcggaggtgtaccggggaaagaaatttttgaaaaacaggcttacaaagcaacatcccgaactggtcaccgcccaaatcacttttatctgtagagcataatcaaatttcctattgtaaattttgggtttttggtg

SEQ ID NO: 22920 - DNA, 1606 bp, Heterodera glycines
agtcgatagaataatgtagcgtaagggaagtcggcaaattagattcgtcacttcgggaaaagaattgtctctaaaggtcgggtcagccgggctgttgcgtgaaacaggcggcttttgcccgtggctgcgtgctgttctttcggggatggtgcgtggactagtggtgagagctccctccccccctctcgcaacccaaaaagtaaagacttttcagtcaattcttttgaaattttaggtaactttcttaacataattgcattaaaatgctcaaaaatgttcccgtcggcgcctatcggcaccgccggacccctaaaatacacttctaaaaattgacttaaaaaagaaaaatacacccttaaaaatcgactttttgacttcagccccacccccccccccaaagccaagggtctggctacgcccttgcacataccctctcattgacagtcatgttagtagtggcagcggaagaacagaacaacgtgcaaaacaacaacagggagaactgagaaaaaaccgtttttaatatgtacttgcaacgaatattcacaacaaatttccgtaaattcaatttcgttattcattcttttttcgctcacaaaatttttgcatccaacgcttgtcttcggcccaccaccgcgtgcgaccgtcatgttgtcctcctggcactgcttggactccacctgggccaagctgatacaaatcaggcggtcgccctgtccatcttcgttgtccaacgggaacgaaacgggcacacactgtttgatgtatcggtgatcaaatggttcatagatgaagcgcttgaagcaaatgatctgtggaagaggcaaaaaagggggataactaatcgatgatcaatcaataagtgatcaatgatcaccaaaatgtcgggcaattgagtgaacatcagctgcttgacaagcgttggtggcgcagacggcggtggcgttgcgttgctgcactgtgcacagcgtgagccttcaatgtcttccggtttgatgaaatccgcgagacaatggttgatggagatcagcggcacatccatgggcagttgaccagcgtccgacgctcccataatgtaatgcgattcatcagtgaagcgctaaaaaaagcggcaaagtgtcaaatggggttagggttgtcctcctggtactgcttgaactccacctgggccaggctgatacaaatcatgcggtcgccctgtccatcttcgtccttgtccttgaacaatcgcatgaagcaccaaatgtcaattttgtcgagcggaatgtcgcgcagcgtcttctcgtcggatggttcatcatcgtcgtcctcgtcgaaatcgtcttcatcctcgtcatcattttcttcttcgttttcggaggaatcggcgtttcttgtcgttgcgtcgttgaacatttgtgaaaattcttcctgtaaaaaaaggggtgggaattaattgcatatatcaattaaaaaatgaaaattcgctattttaattgaatttgggtccgcgcttttttcataaattatcatttaaattttccgccttcaaaatggactcaaaaaaacggacaaaatctcaacaaaaatttgtgccgaaaattgaattggtttggtgatggctgta

SEQ ID NO: 22921 - DNA, 1770 bp, Heterodera glycines
cgatgtgttcattcattggtggagcgaatcatacaatcctcccaagcggcagaacaaagaggagggcagaaagggtaaatctttaatttaaaataaataattaacggaccgaaattttgcatactttaaaaaggcgaaaaaattttaacggaccataagcttttacaattttgatcagttacaaattttaaatgaacatatttaattagctgaccaatgccaattattttgaattttcattttctattattcaattggatacatttgtttagcagaggaaaagcagcagaaggaaagtgttggtcaacagaacaaaaacaccgaacagaaattggatggaaaatatgccgtggtggacaaaaacaatgttttgggtgggcacaattggcaaattatttaaaattaaaaattggcgttataaaaaaaatgcattttttgagagaggacaaaaccctcgtattatatcgggattttatacatatttggtacatatttcggacttttttcttacatattttcatttttttacatatttgaggattttttacggaaatttttggaaattctcaaaaaaaatccaaaaatttcggcaaatttttcattttttttacatagctattctgagaatttttgaaaatttttagaaatttcttgtgaaaaaattaaaaaatctttttttaaatgtacccctccaaaaataatttttaaatgttaaaaggtgattttaaacattttggtcattttatggcattttgtgcctatttaacactttatgaaaaaaaattttccaaaaaataacaatttaaaaaaattttatttacatattttcgtacatattttgggcttttatacatatttcttacatatttcgggatttttttttacatatttatgtacatatatgaccactttttgtacatattttttacagccctaattataaatatttaggtgttaaaaaattaatttttctttttaaaatgtatttattgctaatttagttgctttagtgacgtcatcgggcgaccattcgccgccggcggttgtctcagcgaaagttgcaaaggtgggaaggaaaccttaattatttcacaaatgccatttaatttcaggaagtgcctaattcgcagcaacaaaatgattgggatgccaaagtttgccacaaagacatcgaaatcattggggaaaagcaattgacgatcaattgcaagggcaacagatttggtatttaatataaaaattaaaaaatgtaattaattaattactttcttaattaggatggcactctgtttttgcgaaatttccaattacgaacttttgtcgtcccggaattttctacttcgaaatgaaagtgttcaaattgaaaaggtgttcattttgatgatttcttagcgttttatttataattttgaatttattttaacagttttgctgcgattggattcgccacgaaggaagtgccattggacgggtcaattggtcaaattttgaacagttacgggtaccgaagcgatggctcatttggctgtaatggcatcactcggccgtgcaaaatgccaatgtcattatttggttcgtcattttcccccgtggcaatgcaatcggcggacgtggaaatggcatacaaatcatcggagttttccactggtgacgtggtcggatgtggcattttcttggatactcgactgatcttcttgacgaagaatggccaacgaatgggtgggccaaattaaaatgaaaaaacaaattaattaaaatttaatttttaag

SEQ ID NO: 22922 - DNA, 1403 bp, Heterodera glycines
  unsure (1)..(1403): unsure at all n locations
tttattaatttntggttttctatattaattaaatgaaaattaactgagtttccattattttaattttattcatcatggactattatctcattttgacatatagngtaaatattttcttatcttatatatttacataattaataatttaattttatctcgagatttaagaaatatttttaaatatctaacgtaaataaatgtatttcaaaatatcttcaatgattttttattaaatttttgtaatttcatctcaattataaagctcaactaataagtttcagaagtgcaaaattccattttttcatcaataaaaatattttagatggcttaattagtatcagagattaatatcaaatgttaactgttccttttttaatttataagtattaaaattttacatcaattcatgagagatatttttgagatttttttttagaattttgttgaaaagttcaaagattgattccataaatttaaaagattttttaactcgttttcttaaattttttattaaatataagtatacttataaactcttggccatgtacgtccaaattcttaattccgagaatttgtatattataatatttttcatacataatatttaatataatcatttttaaaatattttttattaattttttttttgattttaattttattacttttatattttatgttcaaatttagtattctctcgacgtggtcaaaaaattgaaagcggtctagacttgaattcttaattcagtcgtaatcaagaataaacatttaaatgtattcgataatctgccctctagaatttttttcataaattatttttataattttataccatttaaatgttgacatattggaatataaaggcatatatttattgcttattttttgttttttttataaatttaccattaaattaatttttaactatttatttttcatttttggctttattatgtttaatattaattctttaaatatgaatatatttttatatgttagtaattaaaaatatgttttttctttattttttttacggaatagcctctcttttcgcaaattttcactattcttctattaaatttttataatttacatttaaaatttacggaggcaattggacggagcggcgcaattgaacgagtgcggacaagaacgaaggacgaatggcgaaagtggagagaaatgcagcaacgacgaaatttgtaaccggaggaaatttggcaatttccaaaatgtctcgtctctgatttttgctcattgaattctccatttaaataaaaaattttanaattattttaatataaatataacatttctttttattatcacactttcttcctcatgaacagttttttcatttttatcatctatattacaaatttaaagttttttcaattttttga

SEQ ID NO: 22923 - DNA, 1533 bp, Heterodera glycines
  unsure (1)..(1533): unsure at all n locations
gtaaaaaaagacattaacaaagcgtaagaaataaattttaaaatgcaaaaagngcagggttctgagctgttctgatttatcagaaatgttcagatttgggtaatggccaaattttgttctgatttcatcataactttgaaatttatggcataatgtcattcttttatcaagaaatttcaggtttgacgcaaaatttggaaattttttgtgcaaaaacctgttaaaaaattggccaaaatttcaacaaaaaaaaaatttgacgcgtctattcgcaccgccagaccctaaaatccttttttttattaaaaaatgactcaaaatcacaaaatttgaacaaaaaacgatttttttagctcaattctgctgaaatattctatttgcttatttcctccccaaaattgttaaaaccgataatgggaggcgattacctaatatctaaaacagtaaaaataactaatttgaagcaattttgcaaaatgttttggtttttgaccccaaaatctgattttttgagccctacgttctcatttttaaaaattttcgatccgaacccgaaatgaaaaaattatgtggcctcaaaaatcgaaattttgattgtattttcacttacaaaatttttcatgtttcacaggtcaaaacatttcatttaaataaataactggactgtgctgcgctgcgctgcggatactatccttgaatttggtacattaacgggattaaatttgaatcgaagatcccaaatgggtaaactgtggcttgtgataaagaacttcgcattaatttttaaaacaattatttttaagtcaaaaatgaatttatatatttttttataaattgctgcccgctctttcataaattgtttcatagtttcccaatttgatttaatgggcaaataatattttttaaataaaacgacttcacttgatatttaatataagctcttcgaattaacttaattctgacataattgttaagaagcatataaattcaagtaaaatttagctttttcattatcttatcttatcatataataaattgttttgattattatttttgatcaatgtttttgaatatatgtatttagaaacgattacattaaaatttcttagaagattttttgcttcactatgtaaaattagaaattttctttattggaataatataaaaaatagtttttctaatatgcaaatacttcaaaatcatatatttgccatatatcatttctgttttttaatcttgtaattactagattttatcttgttgatatggtggaaaattttgtcaatttgatcgtgagaaaaaaaattactttattcaagatactgccttatttaattaaagtttatttatttgttttcttttgttattctaatttattgttgattgattgtcattcatttaattgtacaaaaattgccacatttaaaatgatttgtaaaataaaatttagaaagacaaaaaagaattttaaatattattagtttcacttttacattgttgttccaanttaatatatattttactatatatgct

SEQ ID NO: 22924 - DNA, 875 bp, Heterodera glycines
  unsure (1)..(875): unsure at all n locations
ggggggggggatttttagatttttagttattttttctgcggtttataattctatgagaaaagacgaaacacatttttaacacaaaaattcttcatttaacgcccctatcttttctgcaagaaaaacaaacgattttttgctttttattcaaaaaaagatgaaattaatgtatgtatattgtcattaaaattgttgaaaagtttttacatcgattttaattttgaaaaaagcacatattttaattttttaacccctatctcgcgattttgattgaatatcaatcgattctaatttagaaaaattgttgggtcaatcttataaattttttgctgagcggcgcaaatttcgcggcgcaattgtcttttttgctgagcggcgcaagtctcgcggcgcaaatagtgcggcgcaaatgtccgcggcacaaaagtcgngctaacccattcactccctcttcctctcccctcacactcattcattcgttctctctttcagtgcgccaattgtgccatccatcacttttctctcaaattaggtatcatcacaataaaaagtcttcgccccgtcatcacttcactctcacttattctgtctctatttttgatcaaatgaattgcgccgccaccgattaaaaagtgatccgtcttttgtggggtcatctgattgagtgagtcagtgagtgagaacaacagacggacggacagatgggaaagtggtcgaaaattgtggctgaatcgaactcaaactaatgaaaaaataatggtatgaacaataatggtaattaggctcattaaatggtataattagcgaaaataatgaatgactccgaagaggggggaacactctgtggaggtcaaaccagtttaagtggggggggg

SEQ ID NO: 22925 - DNA, 1587 bp, Heterodera glycines
tggtggtggttgcggcggagggtgcggtggtggaggcggttgtggtggagggtgcggtggattcagtggacttggattgtttggcggcggaggtggaggcggttgcggaggagggtgtggcggcggtggtggtggttgcggcggagggtgcggcggtggaggcggttgtggtggtggaggcggtttcggagggtgtagtggtggaggcggatgtgtaggtggctgtggaggcggatgcggttgcggaggcgggtgtggtggtggaggaggatgcagtggagggtgcggtgatggaggcggttgcggaggttgtggcagcggaggtggatgtggcggtgggtgtggtggttgcggatgcggttgcggcggagggtgcggtagtggaggcggctgcggagggggatgtggagacggttgtggagggggatgtgggagcggttgtggaggaggttgtagtggtggctgtgatgttggaagcggctgtagtggtggttgcggtggtgggggagacgtctcaaacattgaaggttgctttttaaataaagctgcttaataaatgcaaaaaaatgctttaggacgcagcgatggaactgagcccaaatacgttgttgtctcaccggaaaaaagttccaattctgctgcaggtggagaaaaggaagcggaaggtgaacaagcacaagtaccagctgagcaacagccattaccaggtatttttgcaaaagcgccatatgaagtttcattaatgtgattaaatcagttgcgccagccgcggcggaagctgcttcagccgaaaacgcaccgaccgaaaatgcagcagctgtaccatcctcaggatattctggtggtgaaccggcacaggctcaagctgtagcagtacaaacagtagaacagcagcaagccgcttcagaatccgaacccactggttaaaattgatgttttctcgcttaaaaacattccgagactttaagccattggcacatccaacggcaacaacgagattaacgatgcaaacagcagcagcactgatcagcaaagcgatactgctgatcagccaaagcaacaacaaatggtggaacaaatacaatcgaagcagcggcaacgggtgcacgcgtcaaaggcactgacgccggcgcccggcacatggggatcaatgtgcaacagtgccgagttgcgacaaatgatggacagtcaaatggtgccgggcaatgccaacgcgtcaaagcgacgcatctatgaactgctcaaccgcaagcagttcacggaaggcgtcggcggtgcgcaacggttgctggacgtgatctgcgcgaacagcatgttcagctaccgaattgcaaccgatctgttttgtgagcacacaaaagcaaacgtcacttgttttgtgtaccaacaacagccgtagggaaagagcaatgagcgatgaaaaaaaataatggagttttattttatttattattgcgtatttaatataaatttgttttttgccaaaaaaatagtcgagaatgttaattgtactttaaagagtttaactcaaatgaattgtattgtcatgattctcccgttaaaaaactcgaaattgtagcatctaca

SEQ ID NO: 22926 - DNA, 1800 bp, Heterodera glycines
  unsure (1)..(1800): unsure at all n locations
gcacggcaaacattaatgccaatccttccttctcaatctgggcataattgttctccgcagcattgagggatttggatgcgtgtgcaatggcctttatcgttccgtctgggaaacgatgtgcaatgactgctccgatcccatgttcagatgcatcggccgaaacgatgatctccaatttcgggtcataatgtgtgagcagcaaattcgatgttaaaatttacttcaatttttcaaatgctttgcggcaattttctacccaattcgattccgcgtccttcttcagcatgtcgtcgagcggttttctgacgaaccgcatgttttgcacaaattgctggtaatggtttaccattcccagaaaggaccgcaatgtagaaagattcgttggcgcaggcatttcagtaattgccttaatctttgatgcgtccggcctgcgtccgtttttgtcgatgacgaatccaaggtacttaatttcctcatggaaaaatgagcacttcgtcattttgacacggaatccgtatgactgcagccggttgaacacatcttttaaatgctgaatgtgatcagtgaatgatcggcttgcgacgataatatcgtccaaataagccgtggcaaaattcaagcctgcgagcattttgtccataatagactgaaaaatgcttggcgccgattttacgccgaacggtaaacgttccatggcgaaattgcctttgtgtgttgaaagtccgcacaatttcttcgagtcctcatccaattccacctggaagtacgcgtctttgaggtcaatctgcgaaaagaattgtcctccatttaacgtcgcaaaaatatcttcaggaattgggagcgggtgttggtagtcgattaatgcatcattcaaccctgttgaataatcgatgcaaaggcgggcattcccatccgcctttttcaccaccaaaatgggtgcggcccaatccaaatgttcgacttttcgaatgattccgaggccttccagccggtccaattcacgttcgatgacttcttttgaatgatgcggcaccggtctggcctttcggtaaattggcgcgactccttccttcagtttgagttgtgccttttctttgatgcaatggcctagtgcatcttcgaaaacacccggaaattctttccttaattccaaaatgtgctttccaatttgatcggtggctctgcaggaatttatcacatgctcgctgatccgctgcttaatgccatccaaaaatccaaatttgtccattgtttggcggctcaacaaattaagcgaaccacgcttggccacgtaaaatggttcattttcgatcaaaattcctccaaattcaaatgtgccgaagccttttccgatgaaccgaattggcgttccatcgaaggctcttccaatttctctgcacttttcgatcggtgggctcccagcctccacatgtgagtcttcatcaatgacattcacatccgatccagtgtcgagtgcaaatgcgattggcttttggttgaaccgaattttggtcctcagcgaatttgcctcgttcttcggatttaccataccgatttgcaaatgtccaattcgtttgtttccaaacctttttcctttgttcttcaaacgccattgctgcacattttcacattgcttctcaatgtgccctgtgaatttgcactttcggcatttcgctccaatgaatcggcattcgctgccccaatgatcggcagctccacaacggcagcaattcttgttcgcctgccgtttctctggcactttggcaacttgcattnttcgcgaattgttttgctttaccg

SEQ ID NO: 22927 - DNA, 2129 bp, Heterodera glycines
tgagggtataaaatggacatgacaaggttaagccagtcaccgatcttccaattccaaatacgaagaaagaattgcattcccttcttggtttcttcacatattacagaaagtttatttttggatttggagccttagctgcaccgctttttcggcttctgaaaaaagacgtaaaatttgagatgggagacattgagttgggggcgattagtacactaaaaaaaagtatagtggaacacgcagtgttgtattttcctgattttaaagcggcggttggggacccgaaacggcaatttgttatgctaaccgatgcaagcaaaattggtttgtcggctattctttgccaatcagacgaattgggtcagctaagaccaatttactttgcgtcaagacagtgcaatcagcatgaatctcgttattgccccaccgagctcgaagcattagcaatccgattcggtaccaaaaaatatgctcagtttatcacaatgataccaacaagagtgataactgatcaccgtgcacttgtccctatgtttaagagcaaaaaagagacgggtaatagccgagttgataagtggctgctagcaatgaattcccgttttattctacaagtcgaataccaaccaggcaaaatgaatataatccggatcttttgtcccggtcaaaaacgctgttaaaatcggagaatgctgaaaactgaagagtctgacaaaatcgcatttataggccaaattagagaaatacagttagcggaacacgccaaagaaattgaaaatgagcatagaaaagactgggcccaaaaatcaaagaaaagtgaattagggtttgtttatgattttttggataaacgtgtcttgccgaatgatattcgtgaccgccaaaaattgatgtcttatctacacaattataccttaatcgagggattgcttttccgaagtggcaaggaggggaaactacaattgttcgtaccacgagaattccgtgaaaagatgataagagagagacactccggtacttgtgctggacacctcagcggaattaaaatttttcgacaactatccgagctttacttttggccaaatatgttcggagattgcataagagcagcacttcgatgtcgagtttgcgcacacgctcgcaaaccacggtcaaatgctccgtcctttaaatgcaattgagacttcagaaccgttagagttggtatgtatcaacattttgtcaattgggccagcaaattcgtcgaaccattatattttggttacgattgaccatttttcaaaatatttggttgtgaatcccattccgaacaaaaacgctgaaaccgtggcacaaaattttgtaaaaaatttcattttagtgctaggggcgccaaaaaagattcatagcgacaaaggcaaggaatttgtaaacgaaacactgactgaaatttcaaaagttcttaaaattgaaaaatcgaccacttcgggttacgaccctcaggctaatggtgttacagaacgtgcaaatcaaacgattttgggaatgcttaggcgttcgacttattctgcctgggagtgggatgaaagacttccattcattgtttttgcttacaattcaaccccatcagaaattacgaaaaaacgactgagagaagtgtttttcaattgagggcaattgattttttaggcggtacggacgaagcaatggaaaccgaacagcagaaaggaaaggcaaacattgaggaggacacaatttatgtgctgggagaagatgaagccgaaacgccaaaagtgatttcctggagcacgtgttgcactggtgatcagcacaaagactgcgcggaccttttaatggctgatctggatgctgttttggaccgttctggaatggggcttctcaaaatcgacaatccgctgaaggccctgctcgccaatttcctgctcaagtcagaagcggtgaaatcaggatcggccggaaagaagctgattttgcaaattttggaggcagaagtcagttgggagttagccacttactgcagttcgagagaagacgacgtaaaaagtggcgcatttccgtcggaatcggacgtggaaaagacattggaagtgtgggcacgagcactgccaaatcgtgaatgaggaattgaaaatgac

SEQ ID NO: 22928 - DNA, 1406 bp, Heterodera glycines
tgttccttcattcattttattttattaccccgttaaattttgtcataaccacatttcaccttgtccggctcggacatctgcaggcatttgtgctcgtgcctgagtcacagcatcccttgcgggaattggattatcggcctctgcgttttcctttagaattttttgggcatctctgacagattcgtgcttaactggatgattgtgatctcttccaacaattcgccccaatttgtaagcacgcccctgattatcgtggtgccaagctgaactgacatgcactctcccagggcaatacggggggcgattgatacagtgccaaaattcgatccctaatttggggtttggacaaaaaattccaaggtttgcaccttcttgaagtccgctgtccgcttcaaaggcatattcaaaaccgccgcttctgattaactctcggccacgcttgctttctgctcgaaaaaattggacaagaccagctggttcctctgcttcttcaaaggcttcatttgcaaagagttcggccccaatttcaccttcttcgggaccactagaaccagaagacatttttcacagcaattcaaaaatattttcagtaatagttatgaatggcatggtcactcttttttgggccggtcgagaaacggaggtcaaacaaataaattatttattattgataagaaattagtgtactgtcgaaaagtccttcactgtcgaaaagtcctttacagtcgaaaagtccgctgtcgaaaagtccttctgtcgaaaggtccgctgtcgaaaagtcctagcgccttaataaggccgtagattattattatagcgaatagactttatttttaaaacagaaaaatacaattaacaacattggaacattgccactgttcgcgtaccctcgaccgaggccgctcggcaccgaacagctttgctgttcctacacaaaaataacaatattacataaaaaaattaataacaacagaacgcataaaatacaaaattacatgatcacagaatattcggcatttgcttgcagccttcgtttggtcacaaacgaaatgcactttcattatcgtcttcttcccctccaacaccctcttcatcttcatcttcttcttcctcatcttcaccatcccaatcggcggcctcatcttcgtaccattattccttgtttgggtgcagttgttcatatttggaaaaaccaaaaatgcttaaaaaacttttgttttaattcctaacatacaataaatggctcggaattttttttaaaccacgttttggggcccggatcgacgaaatttttgtttgtttgattgtttcaaaccacttttttcacggtgcgttttttcttataatttttggatgaacaggaaaaaattgaagtttttcagcgattttaaaaaatttgaaaaaca

SEQ ID NO: 22929 - DNA, 2373 bp, Heterodera glycines
  unsure (1)..(2373): unsure at all n locations
aaatgagccagcccncacattgacatctttggtcaactccttttaattataagatcaaatgtcgataactgacaagtaaacagaagctatcatgtgccaaaaattttgatcaattttaatccgatcgataacccttgatttaaatctttggctttgatcaatgattaagcattttttttgatcactcaccggttgtgcccggcttgtagatggctttgtccgtctgcacaaaaattgacacgctcttttggctgcactgaaatttcaccaattttttaatggttgaatttatatttggcatgacacaatgccaaaatgccattttttttacctgtactcgggcactgtcctcaaagatcattttcgaagtgatctgaacaattttttatgaaattttcaacaataattaatgggtgaaaattatttaattgggcggttaaatttcgccgtgattaaagcataattgattaattagttgaataattaattaattaccgtttcccctttcacataaacactgtagtcttcctcgggcaaaaagctttcttccgacaaattttccaccaccacagtttgcggcattcctgcgcatatgaaaggattggaatttttaaattttaacaaaatttcccccaccctgcttttcattttagaaattgaaaaaaacctagaaattttttatacactataagaaaattgcaagaaattttttttttagtttttcagcaatttttggaaaatctttgaaagaacttagcaatttatcataaaatttgaaaaattggtcaaaattttaaaaaaaaatttcttattaattttctatgattcatagttgaatttttgtttttaaattccgatttctaaaaccgttatgaaaattctaaaatttcgaatttttcaaattgaaggctttatcacctattgggttaggtttttggttgaaaatttatttgaaaattcgaaatttaaaaaaaaaaaattctcaccggtccgaaaattgctgaccacccgcgcggccatcgtctcatttttgctgtccctgatctccacccggacaatgtggtcgggctccgcactgcgcagaatgttcactgacacggcatagggcagcccgggccgcacaatttttggcgcgatcaccaaataggaggcggaactgtttggggaagaaaatgatcggataatggcactaatttttgtgtaaatggcacactgagaggggggggagtagtgtgccactcatacgtgacagcgatcttatacaatttctaatgatttgtcaatcaattaattgtgtagcagtggcatccgtccactaataattaataagctcgccacgcactaattgcatgacggtaacatccatcattaatgatccattcagtggcatttaattactaatgatcaattaaatggcataatattactaattaacaatgaagtggcattcaatcactaatgatcaattagctaatcaggcactcactaattgcgtggcggcggtgctatacattctctaacaatatgttaattaatgaattttcatagtgatgacatccgaccactaatgatcaattaattatgcgcgagaacactcactaattgcgcggcggtggcattggcgttgtgtccatgggaaacaatggcggcagaccaattgactccttcggtaacagcagctgttgatcagccgttgtggcggcagcggacgattgatcagctgctggcgatggcgcggacgccgctgccgcggttgggctgccgtcgtccgcaagcgttggcaacgcgggcgtcttcgttttgccgtcattattttgtgccaacaaaaatccaccgggagaatagcttatgaagaggaggagaagcggcggcaaaaagtgccaacaaattttgggacggttatactgatgccctgcgggcattttgaagaaaatttttgagacgaaaacttagggcaataaaatgaatgcgctgatctgaataattaatttacaaaagatttgtggttgatgaaaataatcagataattaaacagggaaattagtcaaaattgatagactaattaagaaaaatttaatgattattgatcggcaaattggtggtgatcaatcatcgtcaatcacttttggggctaatcgggcggggctgctgattttggaatgtgaagcgaaagagcattgaaaattctttggaatttaaaattttactctgtcccccatacccattacttatgccgaagtgttctgccccccatgcctaattaggcaaatgtatggcacaaaattatccggcacggggacggaagcggacggaagaaacatttggagaaaatggcaaattatggccgagagcaaatgagaatgaattgcacaa

SEQ ID NO: 22930 - DNA, 1541 bp, Heterodera glycines
ccctccccctccactttccgagcgccgcgaatgccgctgctgcctcctccttatgaggaacgctaccggattggcgaaacacgtcagtgcgtctggacggaccccggctggagtccgatttaaaaaatatataaaataaataaaagcaaaaagaaaaaaaaaaaaaaaaaaaaaaaaaaaaaaccttttagttaagtgccttgttttgcttttatttattatttttatgtgctcacttacattttttttatgtatgtttctacaatgttgttttgcgctttcttttgatttttctctctctccctcttcatctttctttttctatttataatttttgataacctatttccacatttatccctttagttaattctgttatggcttatttaatcgttttattttttatctttctatttgttctctatttttattcattttgtcatatcctttttaattgtttttctttttattttattttttttggccaaaaagaagaaaagaccagggacggtcttctggtcggccgggaggtgtaacgtacagtacccctgtccccccccttacacacagtaacaaaagaaggcggggattaaggatcagcatttcgctgatccttttccccgtagggaaacggaagatcagttagctcccccggtcaattacgagcaaaactccggagaaggattttcttctccgtccccgttttaactctccccagtcccttctccaccttcaggacacatttgtaacgtacagtacccctgtccccccccttacacacagtaacaaaagaaggcggggattaaggatcagcatttcgctgatccttttccccgtagggaaacggaagatcagttagctcccccggtcaattacgagcaaaactccggagaaggattttcttctccgtccccgttttaactctccccagtcccttctccaccttcaggacacatttacgattcaatttccgcaaaaaccattcccataccctccgggcactaaaggaaccgaaatccgttattcctcggtccttccttcctttttggcatcatatttatttcggaattattcagacgatcgatcaattctatttaatcaaacttcgcacactttcatttcacatttaatatttttcttttcaacaaataaattagttatggaatttggacgatttgagagagagagaggaaatggaggattaaacgaggaattaaagaatgaattaaatattaattggaaggggcaaattgggaccaaactccattccacgggacaagtttaaactcggcaattttcgtattcctatttttcgggcccacaccaacttccctttctggtagcaccggatggttgcaaattgcaacctttccatcgtctctctgaggatcggcatttcttccgttttcgccccaattttttttttctccccataattcacatttttctctccctcttctcttccatttctctctctcctcttctccttccgtcttcgtccattttctccctgtttttctctgctaattcaattccgcccg

SEQ ID NO: 22931 - DNA, 1574 bp, Heterodera glycines
  unsure (1)..(1574): unsure at all n locations
ggtcatttcctctttcgacgaacaaggcaaaacaaaacaacctttaaaagggatncattttttgnnctgctttcagtttgccatttggtgttcggctcgtggacggtgaaaatgacaaaattaaattattcaaaaattcatttcttttttcattttagtacaacgaaaatgaaattaaaatggaatttgaacaggccgagtgagttgaaacatcgttttacatatttctctattttatacgttattttccatgttttttcagtcaattaattaaatttcccgatcccaatttgccattctctttaaaatcacaatgtttttctgcaattaatctccatttaataattcagctcgatggatctcagcgaatatgccaaaagtgtcagctcaatttgggatgtgatcggtgagcattggtcagaaattgtcaaaacattcattaattgtgcccaatttgattgtccatttttacccttttaaactttgtttcgataacttcattacagtagcaaacgatattttgaactgtagcgataccgtattcccttcagatgctcccgcttcgttggtcaaccgacggtaattcttttctttctttcactttttgccaattttcgccttttctttttgcccatttctttttgctcagttcccgcattgaataccaacttcgaattcgtcgtaaaacgttgttctacaccgttgtgctgatcattcccacgggtttgtccgatttaattggtgcaaaatgccaaaaactgaaaatacaaaaaactaaaattgaaaattccttttatttttgacagttctaatggcctttctcagcatggccgtgttctttctgccgaccgactcgggcgagaaaatgacattggtcaaatctatttgattaaatagtcaattggagggtccttagttggccaattgtcctttcccttgtccttagttggccaattgtccttgctggtgtccttagttggccaattgtccttgcaggtgtccttagttggccaattgtccttgcaggtgtccttagttggccaattgtccttgcaggtgtccttagttggccaattgtcctttcccttgtccttagttggccaattgtccttgcccttgtccttagttggccaattgtccttgcccttgtccttagttggcaaattgtccttgctggtgtccttagttggccaattgtccttgcaggtgtccttagttggtcaattgtccttgctggtgtccttagttggccaattgtccttgctggtgtccttagttggctaattgtctttgctggtgtccttagttggccaattgtccttgctggtgtccttagttggccaattgtccttgcaggtgtccttagttggccaattgtccttgcaggtgtccttagttggccaattgtccttgctggtgtccttagttggccaattgtccttgctggtgtccttagttggctaattgtctttgctggtgtccttagttggccaattgtccttgctggtgtccttagttggccaattgtccttgcangtgtccttagttggccaattgtccttgctggtgtcctt

SEQ ID NO: 22932 - DNA, 993 bp, Heterodera glycines
ttatgcttgcgcggcacattagtgtcgcttgagggcatgttggacaacagaagcatcatcaacagcagcatgggatgaagtgccgatgtgtgatggtggttcttctgccgccgatgaatgcttctcctcctgcgacggcaacgcttatggagaagccaacaaaaaatgctggacgatattgggggcaacattgatggagttgtgaagtttttcgcttgcacaaaaaaatggtagaaatattttaaataattggcgtttcgttccgttgaatttgtcgttgtaaaaatttgaagaggagaggagcgtagtgttgctggaactgtttcggcactgtgccagaagggacgaaagaacataaaagtggtttttttgttggcaattcttttgcgcgtgtgctggctgatttgatgatgaactattttttgacgtcgtttacacgttatgctggtgatgactgtgctcggcttcttgctgctgctgctgctgccagccggtgatcgttgagttttctaccagccgccgttgctttttccgcctctgcttcttcgtcttcttaagtggtgatggtagggggggggggggggttcgccaccactgctgctgagggcacaaaaaggctgatgatgaagcgacgagcgaagaggctaactgcttcttctgctgctggataggcaaacaaaaaatcttgcagaatggagtttgaatggctgatgatgaagctgcatattgacttggggacgaccggggacagggggggcaggggagacgggaaaagcggcgttgagtttttggagagattgaattttgaagaaatttgacggaacgggacgaagagagggggaagcggtgggggagggggtgaagagctgaggatgaagtgcaaaaatttaggacgagacgaacaccaaattgttgttgtgtgtcccgcgtccgcgttgttcttccttccccctcccacgacggcgtcgtcctcttatttaggggggggggggg

SEQ ID NO: 22933 - DNA, 1180 bp, Heterodera glycines
  unsure (1)..(1180): unsure at all n locations
gcagcagttgaccatttttacccactatttttctctcactcatcgtctgctcgtctctcctttattataagctattttcctaagccaacgcccttttctccctcttttctgttagtcatttctcattggtgttgacgatccaacattcagtgtacaaatttgttaaacctctcaacattttaaatcaaaatcctaataaaaatttcgttgaatttctccgcctcttatttgtgcaaaattttcgaaaaagtaattttctatttaaaattaaaaaattcagaagcaaattcaagaatttttttatttttaaatgcattttttaccacatgaattatgattaaatttttgcgtttcgaattcattttggaattaagaaaaataaaaattgataatcatttgatcatttttagcgcactttaagcaccgccgttaggcagcgcagttccaaaatttattccatgccacagatattatgggcaggacacgccaagtacctcaaacttgggtaattaaaccgaagaaagaagtgcagtggggaagaatgacgcccaaaatgaaggaaatattcgatgctgtgcgaactctttgtgacccctctctgactctgccaatgcagcagttgaccatttttaccactatttttctctcactcatcgtctgctcgtctctcctttattataagctattttcctaagccaacgcccttttctccctcttttctgttagtcatttctcattggtgttgacgatccaacattcagtgtacaaatttgttaaacctctcaacattttaaatcaaaatcctaataaaaatttcgttgaatttcttcgcctcttatttgtgcaaaattttcgaaaaagtaattttctatttaaaattaaaaaattcagaagcaaattcaagaatttttttatttttaaatgcattttttaccacatgaattatgattaaatttttgcgtttcgaattcattttggaattaagaaaaataaaaattgataatcatttgatcatttttagcgcactttaagcaccgccgttaggcagcgcagttccaaaatttattccatgccacagatattatgggcaggacacgccaagtacctcaaacttgggtaattaaaccgaagaaagaagtgcagtggggaagaatgacgcctnaaaatgaaggaaatattc

SEQ ID NO: 22934 - DNA, 1060 bp, Heterodera glycines
gaaatttttccgaaaaaaaatcccaatcgatagagctcggaaaaactatgttttggaaagtgttctccgtttctgtgggaaaaaatggttaaaaaatcctaaaattcaaaaacccgaaaaccgttttttaggcctaactcgaaaatttttgaaaattttcgaaatttttaaattttgaaaaatcgagctttcaaagctctacaataagttcgctgggcacttttctctcagatcaaacgccgacgcggtattcgcctggtactgaagtgtactttttgagcacgcttcagttgccattttctgcaggccagggggtggctctattaaaaaaataaaaaataccagcatgtagaggaccctttggcggggtgccctcgcagcgggcattttttgatcagagttttagaaaaaaagttatgggccttcaaacgcaagcaaaagtgagaaattagccgccgggactcagttggccaccggagagaaaaacccgtatttttcccagatgcgcctcaaaaagttgtaagacccttccacaactttcagggcgctcccggccttcggccgggagattttgtttttgaagacgaactgcaacgtttctctatagtaatataaactagcgtgttgtggcgcagcaattgctcggtgtagacagtatgcttttggtatatatgggcgggcgctgacatgagcgcttcgcgcaaaggacttcgttgctagtgcatgcgcggttttgaaatgaatttatggatgtgataagggattttggtatataggtatcgcgaggacgcattcataattttgtggaggactttcggccgcttcgcggcctcaaagggcgctccgcaccatttttatatttaaggtttaattcggccgcttcgcggcttcaaagggcgctccgcgcctgacgcattcataattttgtggaggacattcggccgcttcgcggcctcaggacgggcgcttcgcgccattttcataattttatgtgatcattcggccgcttcgcggccggctgttaagcctcaggacgggcgcttcgcgcccgttttttaat

SEQ ID NO: 22935 - DNA, 1331 bp, Heterodera glycines
gctccaatgagcaacatacctgcttctgcacataaaaaactgagctatttcggactttttgcatctatttttacctcttagggtgataaaatttgttcgaaattatataaaaaacatttgactttatagggaagaaagaatttggagtgtacgaacaaaataccaatgataaaataatttgtcaaaatgggaatcaataatacataatatgtcagtgagatttcctgatggatttttcttttggctccgccttcaaacacccgtctttcatcgtccgcttctccgagaccgtcttggccgaacccttacaagtgaaatcatcgagcacaaggctaaaaatggtggacataggacaaataaatgcttattttatcatgaaaaacctaatacaggagcataattcttccttcgagcccttttgatattggcggcatatcatatttcccgactttactcggacaaacaagcacagtcaagatcaaagcaacgcaccccattcttaagcggaactcgctgctctcctcctccaccgtcgttcgctgcttggccaacaacaattcatgcggagcagcagcagttccgtcgtcgttgccctccctcgcgtcgtcctgcgccttcaacgccatgaacaaccgcgtcgactcggactggggctggttggcacattgcgtgtccaatttgttggcatgaagcagcggcaggaaggtgttcagccagtcgtgcatcgcttcgcgcttttcgctcgtcgtctccgcactgttcgccagagtttgcgcttcgtctccggcgttgttgtcattcgccgcttgctccactcgcttctgctccaacggtgtgccgtcgccaatgtgtcggagaccgaacagttcggcctcgcgctgcccctgtgttttttgcacatattttgttgttgataagatttaaatgatgagaaacccagcgtcttgactaaacttggaaggaatgtcttgggaactcctttcaccagggacggctgaaaatttttgattttctttgctgataccccctccaaggcctacctcacccctaatttccaaaaataccgctaaattgtcccgaaaatccacaaaattagcaattttttataggaaaatctgctgaaagtatggaaaaattctcaatttttcccaagacagggccctttttcttataaaattggctcaaaattgcaaaatttgatcattttttggactaaacctttaacaaatcgcattaaattacaaaattcggcggcccctcttgctctccaaaagtttttttggaaaaagcgccgaaaaaagtggtgtgaaaaaaaaggtcgaaagcccggg

SEQ ID NO: 22936 - DNA, 1193 bp, Heterodera glycines
  unsure (1)..(1193): unsure at all n locations
gaaaattaatatttccgctccggtgaagaattgcgctgggccaaaagtacgggaccggaaatcttaaaaatctcactccggtaaagaattgcgctgggccaaaagtacgggaccggaaaattaatatttccgctccggtgaagaattgcgctgggccaaaagtacgggaccggaaattaatatttccgctccggtgaagaattgcgctgggccaaaagtacgggaccggaaatcttaaaaatcccgctccggtaaagaattgcgctgggccaaaagtacgggaccggaaatcttaaaaattccgctccggtgaagaattgcgctgggccaaaagtacgggaccggaaatcttaaaaattccgctctggtgaagaattgcgctgggccaaaagtacgggaccggaaatcttaaaaatcccgctccggtaaagaattgcgctgggccaaaagtacgggaccggaaatcttaaaaatcccgctccggtaaagaattgcgctgggccaaaagtacgggaccggaaatcttaaaaatcccgctccggtaaagaattgcgctgggccaaaagtacgggaccggaaaattaatatttccgctccggtgaagaattgcgctgggccaaaagtacgggaccggaaatcttaaaaattccgctctggtgaagaattgcgctgggccaaaagtacgggaccggaaatcttaaaaattccgctctggtgaagaattgcgctgggccaaaagtacgggaccggaaatcttaaaaatcccgctccggtgaagaattgcgctgggccaaaagtacgggaccgaaaatcttaaaaatcccgctctggtgaagaattgcgctgggccaaaagtacgggaccgaaaatcttaaaaatcccgctccgataaagaattgcgctgggccaaaagtacgggaccggaaaattaatatttccgctccggtgaagaattgcgctgggccaaaagtacgggaccggaaaattaatatttccgctccggtgaagaattgcgctgggccaaaagtacgggaccggaaatcttaaaaattccgttctggtgaagaattgcgctgggccaaaagtacgggaccggaaatcttaaaaattccgctctggtgaagaattgcgctgggccnaaagtacgggaccggaaatcttaaaatcccgctccggtgaagaattgcgctggg

SEQ ID NO: 22937 - DNA, 1971 bp, Heterodera glycines
  unsure (1)..(1971): unsure at all n locations
ggctgcaccatttccagtcacntgctaacatcagacattnggatcccaattcggcagcttactcctgacaccatcacacaatttctaaaccgatttaacgacgttgcgcaaagcaaaaagcaggatggagtgacactttggggcgagccctttactgtgtcagtaactacagtcaaccggaatgggctgccagagaaaagacaattaaaagggggagcagcacgtaaactggcaccagttaatcacaaaatacaccaacaatgccttattaaggtgtataattttaggtttttttttttgaaaaaatatttaagatacaaaatgccgataattactgcttgttttacgcgatgcaagcaacaatggttcgcacagtcggtgccatgacacgtcaacatttttacgattatctgcatggaatcaagacaatgatagggaagctgcagagagaaacaacagaaatgatgaatgctgtaaatgcgccgctcaacctcctcaattatgatgcagaaatttatgttccgcgaatcatcgattggtggaatgacgaaaaatttgcgaggcagtggaaattcaaggcgtttattttcggatcagcagggcattacaagccattgtttaaatatggggcggatgactacgatgtgtcaattctgttgtactttgatgagggacactttaatggcgtgcagaaaaatggcaatttgtttggaaagccgtattgcttgagttgtgaagggacttatgatcgaccaaaacggcactccaaaagttgcaaagcccgctgcataaaatggtataaaaaatgtaataacaaaaaatccctattttattagctcacaaatgggaccaattttcccatgtaagccaatcgatgggtttcgtcaaaaatgcagcgactgcaacaaaatgttcttcaaccaagcctgctaccaacaccatctttcgttaaacttttgtaaaacgagcaaggaatgcaaacattgcggtgtggtgtgggacttgaacaacaatacaaaaaatggaagagaggtaggttttgttttttcatcaaatttttttgctttaaggaattgttttttttaagggtcacaaatgcaacgaaagatggtgtgaaaattgtcaaatttttcatgaatttgagcgaggctgctttataagaccgcttgaaccgaaccacaagaaggaaacaatgggatggcgtctggttacttttgacttggaaacacacaacacacgcctatcgacccggattttccgaaaaaaacggaagcatcaagtcaatttcatgaccgcaaaagtcgcgtgtccggattgtatttcatcagggagatggaaagagagtttgcgtggcaaattctgcaacgtttgtggctatcaccgaacagtcacattcagccagatgccttttcatgagacaacagtcgacaaacaaaatattgaccgtcaccctttggttgcatttgtgaaatggatactttacaagctgccaaaacaatacgacactattgcttactcacattttggagggcgattcgacatggtcttggtctttcgagaattattattggaaggattcaacccttcaatgattaaaaagggaaatcgattgttttagataaaacaagttttttttttattgattaacgtaaataatcgtgtatttgtaggtgaaaagcaggaaaaagatgaacccaaatgtgactttccgagactcatggaacttgattccggggccctgggcatcgatggtcccaattggtcgggttttgaatgtgcaggacaagcccttttttcctcacctggcaaaccggcctgaaaaattacggatgcgatctcttccctacaaagctgactacttggcagacggaatgaacatcgcaaagagaaaagaattcgacaaatggtatccagagaacagaaatgcaccctttctgcttgatgaatcattggccaggtaaaaaaagtaaa

SEQ ID NO: 22938 - DNA, 1101 bp, Heterodera glycines
  unsure (1)..(1101): unsure at all n locations
aaaaaaagtaaaaatttttaaaataaacaccattttagctactgcaaaaatgatgtcgatattttgatggctggtntaattgctttccgctctgaatttttggagatgacaaaaagatccgccggggcagatggaaaagctgatcgggctgcatacaccactccacacaacggaattgatccaatacggcactgtattactatcgcttcagcatgtatgcggcattttcggacaaaccacttgaaaccagcacacttggctctcgtaccagaaaagggatatgacagtttcggggataatcaaagcgatttggcactcaattttatggagtggtatgcggaaaagtttgatgttcaaattcaaaatgcatattcagccaatggcgaaaaaaggtagaatttgtcgaaaatacaaaaaatgggcactaattttaagggttggaaatttccgtcttgatggatggattgaatctcagcaaaaggggctcgagatccatgggtgcatttggcacgcatgttccaactgttatccggatgataacgaagtgctgccttgcggcaaaacagcagggcgaattcgcgagaaaaacaaacgacgaatggaaatcattttggaacaagtcccaaacgttgagattttttggcaatgcgagattgagacaatgttggcaaaggacaagcaaatgaggaaaaaattcgacgaatataccggtgacgggggaccaatcgatatccgggcatcattcatgggaggaagaactggggctctgaagctttttcacgaggcagcggaagggcagaaaatcagctattatgacgtcacaagcctctaccctttcataaagtctattaattttcgttttttcctttatcaattttttcagttttacaacggattacccaattggtcatcccactcttcacgtcccgtgtgaagaagttgattggcgacggccagaggacaatccatacccattggccattctcaaagtgttcgtcattccgccccgaaaaattgatgtgccagttttgccggtcaaagttgatgatcgattattaatgacgctgtgtatgaaatgctgcaaaaaattccccgaatggt

SEQ ID NO: 22939 - DNA, 1948 bp, Heterodera glycines
cggcaaatggtgaactcggccaaagagcggagagattcttttgtcagctgatttgacatggcttttaacgaagtgttcgctgccggaagacggtgaataagccagcggagcaaatttgttgacgatttgcacaaagtcgaaaggtgaaggaccaaaaagcgacgaacaagggcaagaaattttgagcggccgtggagaacaaagagcaaatgaaagagcagggcagggaccagcaatagatgattggccatcgacaagggcaacagagaatagggcaaaaagaagggcaccagcatagatccgtagaacgagggggccagagatcgtgagttcgcggccaacaccgatgcggtattcctccgcggcacctcgactcgttgaatcaccatggggcataacgttgatcaccaattctcgggaccggggcggatggtcagttctgtcccagagctcgaagtgagacgggcgggggcggggaagagggcgtgtggacaagccccgtggtgtagaaacttggtcaggggccacgactcggatcatttcgatggggaaaaaatcatggtgtccattcccgccgggctccatcaggcatggagcagaggggtggcgaagagtgatgccatgtcgagagcggtacagctcggagacagttgggccacgggcacttccattgtaggcaccgagacgattcgcaccacttcggctcagctcagatccgtgaagtcgcacatttcgctcacgtgggtgcagatgcctcgtcttgagttcgtagccgcgttcatgcagtccttcaacgattgttcgggcctcgttccaacggctcagcgatgtggtcacggcaagaccaaagcgttccacctcgatgttcattgtgttggcgaggaaagagagcagtgtggccattggaaaaggagggaattgggcttgggtttgaatgtggaaggccgattcgggaatttgtaggaatggtgaatggactggcacagagacggcttttatagcgaagtcaattggcgatttttggtttttggcgagatgaatggtcccgatttgtgcatcaaaaatgtcgagagtctcagtcacacgtcttgacaccgaagaatggccttaaaactgcagctttggtgctgaattttgaatgctgagtagatggctcagccctcccgctgcagaagaatcagtcgtaggccaaagagcaaggaacaaaaggacgattcggcttatggctctccaagatcgaagggcagggttgcaacgcaaaaggacatagacgatgaagagggccagagtgatgattccaatggttcgaagagcattttgtagcccgaagaagtaccaaaagacatcggaaaagtcgaagttccaatctgggcaccaaattaggcatgagttgctgggtttggccttcgaggcaaatgagcttccttcattaggtgtttggaagtgttttggcacatagcggagatgaccattaatcacgaatgggttccgtcctccactgcattcaatggtacaattgatgtcgacctcggcacggttgaatgacaggctggcattcaaaacttctggtgttttgtggcagagggctgtgaattctgtgccatccgaacaacgaacgtagccaagtgcggagccaaagtcggtgtggcattgcaaatggagataagctccattgtggcacgaatagcatccgaaaagacccttggacatggcatggcattttgttaggtcctcttccgtggcgattcgaagcccctcgaattgaatggacaactgaattggcgcgtaggtgatttcggcaaaaatatcccgcttttcgtttcgaataagcaagtttttgagctgaattggcaggcgcttctcaggatcggcgagtgctggttcaagtttgatatctcggcattggcaatagatttttgctgaatcgtggtcaggcaggcacatcgga

SEQ ID NO: 22940 - DNA, 1191 bp, Heterodera glycines
  unsure (1)..(1191): unsure at all n locations
cgtgtcacgacatttgcgcctttgtacaaaatcgggtttaaaattaagtttttttcaatccctaatcgcctaaacagctttaaataagcgattgaaaatgattgtatccgatcatttgatcgtcaatgaatttttgaaaaaataataaattttcaaataacaaaataatgcccttaataaactagaagactaggttttcttaattatgatgctgcttaggctatcagtggcttgaataaattcatctttgaatccgattttggacattggcgcaaaagtcgaaatttcaatgaatatcgaaaaaaatgttctaataacccttaaaatttgcaatattggtggttttaacatctatcaaagaatcagctgagtttttgattatttttcaaaaattgtttgaatttttaaggcactaaaaaactacagaactttatgtataaaaaattcggaactttaatattgtataatcagctccatccctgtcgtaaatcataaaatactaaaaataattatttatttttttcttttttttaccgtcataaagcacatcgatggcattgtttccgttcactgcgttcaaattgtccgtataaataaagttcaacatcgttttaaacgcttcaatgtccacgtccgggatttcaatagggttttcatcctcttctgacaatattaaaaatttatattaaaaaataaaattattataaattattttttcaacttttttgctcatcaaatcgaaacattgcgtcgaacacatcggatgaaaccctcaaaatcggtttatgcgctggcaaaagctttaaaataaattataaaattaaaacaaaagatataattaatgcattaaaattagagaccgaaatttcaaatttgcaggtccaactcaaatttttttacgggacggattcccgcgggattaaccccgcattttacaaaaaatgcgggattacgaactgggatcccgcaaaatcacgcgtttctctaaaaatttgtttaatttgaaaatttccttataaatttaaattttttggaaaattagaggtggatttttttccgcatttttttggtaattgcgcgattaatccacaaatccgtccggcaaaaattttgaattccccaatccacctgattcgattttttccgacttgacttttcggtcttatgtatanaattttcagtatccgaact

SEQ ID NO: 22941 - DNA, 753 bp, Heterodera glycines
caatattctgagtgttaaaataatgtaaattattaaaaaaaaaaactcactactccaacaccagaaccacctcgttggggttctcaaagagttcaacgagttcgaccactccgtcatggccagacaccgaccgaagaatgtccacctgaaaggtataatattaagtgatttaaatttattattcgataaaaataggaaaaagcaattaaaaattgcaaatggacgacaaaattatttcatataaattaaaagaaaatatttgtaaaaaatattttcatgtttctattcgttcaaataatctttaattttgttatcatttgtgtcattcatctcagttgcctcccaattcttccatacatctttaatggaaattaataaaaaaaattggttcgatcgatttcttctcgacaaaaattggaatggctacgatacccctaagtaccgtatccaaaccgatctgtgttaagaggaatttatcgttctcgatgttcagactaaatgcttaaaggaactgatcgcaaaacacctcgcgttcgatgtgtgccctgagcacgccctgccgacgtctgctttggttccgaaattttttgatgaatttggcggcgtaaagagtgtccgtggcgatgtgccgaactcggcggacaacggcgaattggccactgccaatttcatccaaaatttcgtagtgctgctcaaacggcgtttcgttgatggacaatgagtgcatctgctgctaatgggttctaaaagaag

SEQ ID NO: 22942 - DNA, 965 bp, Heterodera glycines
  unsure (1)..(965): unsure at all n locations
gggacggtgacagagaaaaaagggagagggagggggcaatggggggctgatcagacaaaatgagagtgatcagaaaaaggaggagggaaaagggctgactagacaaaaaggtgatcagcaaaataaggatgagtgggggagctgatcagaccaaatgagagtgatcagtagcaaaagtgggagggcaataggggagatgatcagacaaaaaaaatgatcagcaaaaggaggaggatgagtggggggggggagttgatcacaaaagaggcgatgggggacagctgctgaccagactaaactgagacagcaacagcaatagcagattggaagaatttatgtgatgagtgaaaataatacgtcaccaataattggaattaaaaatggagccaaacagacgaaataagtgattagagaaaaaatgtcctcattagaatggtcaaagatttaaacacaaaaaagaaagaaaggaaaaatggagttaaagttaattcaatttgacttaattggtgatcaaaaagaattgatccaattaatgtcagtttaaaaatttttggaatattttacataacaaaattaaaaaaattaaatccaaacgttaattaattagtgttgaattcaaaatatgatgggattaaaaacaaaattagctttatgtgcaaatcgatttttgttgggtaaatacacacgaaatttcgccgaaaactccgcggctttcttctgtgggaccaaaatccagagatgacgaaagttggacgctcaaaaataaatattcgtttgacgtgaattgaattcgcaattttcttctttttgttacgggattaatttttgcgccaaaacgaatcccataaaattttgtttttttcaatcaaacaataaaatgatgattaggatagaaaataaaatgcaaaaaagtgccaagatttacaaacattttttaagccgatgnaattgagcagattagtgat

SEQ ID NO: 22943 - DNA, 2696 bp, Heterodera glycines
tgatatatatattatttatccagaaaactattaacaacctcctatgtgtgttcttgagtgaacgaattcatattaatactctattaacattaagttaatatcagttatttttattaaattaaatattatttatcttcatttaatctttaatttcctatcaaaaaataataagaatttctcggacatgatttatcgaaaaattaaattaaaatagatcaaaaaggaaataaataataatatatttatagatcttcaaataaattaatagcccttcctttttaagtaaatgcctgaaactctgggcacactccggcatttattgtattacgaaatttaaagtatttttatttattaaaataattatttttattttctgaaaaataaaatcaacattttttaataatctctaagtaaccattaaatagctagcataatttattgttagcaccttttaaaaaataaaatatgttatttattttgacttggatgagaaattaaattaaataccttcaaagaataaataaattaattacaatttttttcataaattaatagtaaaatttaaattataaaatctttaaatctttaaaaaatagatatatattttaattttaatactttaattaatttgttaaggataaattcttccatgaatttctttattattatattttatttataaaaatataattcttataaagcttaatttcaaaaaacttttttgtatatcattttttaataatctatgtattttaagctttaatgttttattgtggcgtaaagtctctcgatggagagggagcggacgaagctcagagagacgatcagagccaaggaatagagcgagagacggcacagagagggagagggcaggagggatgtgaaagtacaggtgatcagaggggggggggggcgacaaagaaaagggatttgtttcggtacttgctggttatatgtgggcagattttcaaaaaaaaatttatgtttttggctataacttttttttgcatccaaatccaacattgttggtatcattcgaaagttctttagatgctctgttagatttataaaaaacaaaaaaaaattatttagcctgtaaaaattttattatgaaaaaacttctgaatttcgattttttcgcaattttcatgtataacttttttgtaattgtctgatcgcgaagcgataactagaaatagcttcgaaacatgttaagctttccataacccgcggatttttaaaaggagggtatcgagggtgctgatcacgaatatggggttatcgagggtactgatcacgaatctgacatctcattcgaaatattttaattgtatctattattttcgcagtacctaacatgctaattctttaggtatgataacaatgatattgttaagttaacatttaaatataaattaaaaatgcaatagttgttgattatggatctttttgggacaggaagaagcggacagcagtgccagcgacggcggaagcgggggaggaggaggaagagggggctccgattcgggcactgtggaagacatacgacaaaacgaacggggacacgggggagcgattcgggtgggaattaacacagctaattaggggaaaacgaaaaccctaattaatagtcggaagagaagcgaggaaaagtaaggcgagcacccggacaattagtcaacgaaggtcatttggaacggaagcagcgcaagacatggaaacgatggtgatgagacacagaaacgagacgaggcggctgagaatgagagtgatggaattggagaggaggaacagaataagagatatgcgagagacatagagaaagggagagatagagtggaaatgaagagagagagagaaagagggaagagagaataggagtaagagagataaagagaaagggaaatgggagagatagggaagagagagaaagagggaaggagtaagagaaagaaaaaagtctttttgatcagaaaaaatgcaaaggaggatattagactgatcaaaaagagaaggaaacgaaaagagacacgagctatttaactaagactcacaaccccaaaggaatgtcgagccagtacgcttcctcgcgaaatgtctcggtggcaatgcgtccacgctcaacgccttccgccgccgccggagggacagacgccgcggtcgatgccctacggcgagagaatgagcgacttaaaagagaaaacacaaatttgaacaagtcgctggaaaagcaacgtgaagaagcggaacgaacggcggtacggctgagacggatggaaacccaaagccgcgctaacgcagaagcgtgggaagagcgcaaaagaaacgaacgaagcgcggcacttttgcggaaacggttcgaagaaggcgcggagcgagaacgactgcttcaagagcgattggagaggcgggagagacacattgaacagctgagctgggaacagcagggccgacttggggacacagagcgagttcaggcgacgatggcacagtggcgagcgaaagtggcactattggagcaacgagagggcacattgagccaagagcgagtggtgttgggtgaacggtgcaacgaactgatgcggagactcgaagcaatggcactcgagcacggaaatggcaagaagcgattagccgaattgacaaaggcacaacggggagagaaagcggatgagaagcatagggaggaagaaaaa

SEQ ID NO: 22944 - DNA, 902 bp, Heterodera glycines
tgttcctccaggcaaaattctaagaaaattttaagcatttgtagggttctcagcagtttccctgcaaaatttggtgagcttccgatcagtctagaatgttgggtgataaaatgaaaaaaataattttcgaaaaataatgctggactggtaagtgtgaagaactgtgttcctccaggcaaaaaatttatgaaaatttatatgcatttgtagggttttcagcagtttccctgcaaaattgggttagctttcgatcagtctagaacgttgggtgataaaatgaaaaaaataatttaaaaaaaataatgctggactggtaagtgtgaagaactgtgtacctccaggcaaaaaatttatgaaaatttatatgcatttgtagggttttcagcagtttccctgcaaaattgggttagctttcgatcagtctagaatgttgggtgataaaatgaaaaaaataattttcgaaaaataatgctggactggtaagtgtgaagaactgtgtacctccaggcaaaaaattctatgaaaatttatatgcatttgtagtgttctcagcagtttccctgcaaaatttggtgagctttcgatcagtctagaacgttgggtgataaaatgaaaaaaataattttcgaaaaataatacttgtgtggtaagtgtgaagaactgtgtacctccaggcaaaaaatttatgaaaatttatatgcatttgtagtgttctcagcagtttccctgcaaaattgggttagctttcgatcagtctagaacgttgggtgataaaatgaaaaaaataattaaaaaaaaataatgctggtgtggtaagtgtgaagaactgtgttcctccaggcaaaaaattctgagaaaatttataagcatttgtagtgttctcagcagttcccctgcaaaat

SEQ ID NO: 22945 - DNA, 968 bp, Heterodera glycines
gtgtggtaagtgtgaagaactgtgttcctccaggcaaaaaattctgagaaaatttataagcatttgtagtgttctcagcagtttccctgcaaaattgggttagctttcgatcagtctagaacgttgggtgataaaatgaaaaaaataatttaaaaaaaataatgctggtgtggtaagtgtgaagaactgtgttcctccatgcaaaaaatttatgaaaatttatatgcatttgtagggttttcagcagtttccctgcaaaattgggttagctttcgatcagtctagaacgttgggtgataaaatgaaaaaaacaatttaaaaaaaataatgctggtgtggtaagtgtgaagaactgtgttcctccaggcaaaaaattctgagaaaatttatatgcatttgtagggttttcagcagttcccctgcaaaattgggtgagctttcgatcagtctagaacgttgggtgataaaatgaaaaaaataatttaaaaaaaataatgctggtgtggtaagtgtgaagaactgtgtacctccaggcaaaaaattctatgaaaatttatatgcatttgtagtgttctcagcagtttccctgcaaaatttggtgagctttcgatcagtctagaacgttgggtgataaaatgaaaaaaacaattttcgaaaaataatgctggactggtaagtgtgaagaactgtgtacctccaggcaaaaaattctatgaaaatttatatgcatttgtagtgttctcagcagtttccctgcaaaatttggtgagctttcgatcagtctagaacgttgggtgataaaatgaaaaaaataattttcgaaaaataatacttgtgtggtaagtgtgaagaactgtgtacctccaggcaaaaaatttatgaaaatttatatgcatttgtagtgttctcagcagtttccctgcaaaattgggtgagctttcgatcagtctagaatgttgggtgataaa

SEQ ID NO: 22946 - DNA, 752 bp, Heterodera glycines
  unsure (1)..(752): unsure at all n locations
gacacaacataatttgccattccttggaatgcccaattaacctaacaaccgggcacacttccaaattaatctcatttttatagacacaaaaacagagaatgatgagagagaaagtgacccagtaccgcatcatttctatgatgctttaggccaatcccgagattcgagaccaaacccgagaattcttgagttgtctctagaccgactcttgtacatctctaattgttaccattattgccatggcaaaacattataaaatttgaccagtctttctcaatgggtttgatattggcaagaaaaatgaatgcctatggatactcaaccaattttaggaaatgaaagtacattttatcacatattcattttatagttctttgtttgaaatttatacagaaaattcatttgttttctgtaaatgttcacaattttatacattttccaatttgacaagcggcaaaaggccaatttaattgtttaattctctcaatttttccaaaagatgattttcgattcgatattattcaacttttcccttccccgcttttccccgttaaattctttccccgccatttgctccccgccttccccaaaatccagcggttaaatggacctaattttcccattttctctttagctacacgattctttgtaatttctcgcactttctttgctccgatcacgacaacgaaaaggtgacaagannagcatcgctgatcagtgatcgcaattctcctccctcgatcacattctct

SEQ ID NO: 22947 - DNA, 830 bp, Heterodera glycines
  unsure (1)..(830): unsure at all n locations
ttccgcgcattttcaaaaattttttgcttttgtgagcggaagaaaacacagagatttaaaaaaataaagaaatcttcatttttggcataagcatctctgccaaagattgtggattaataaatatattataaggtatgatcatttgtaccgagactctcgagcatcgtcaattgtaaattattaggcacttcgttataaaacgctctaattttgttttcattttcatcgtaatgaatggaagtgattgcttcgataaataattaaattaccaacgctttcaactccatttcttcagctgtttgtcgttttttcgacgacatttccacccgatcattttccattgcttctccccccgcccatcctcaccttttcaccaccttttctttcattcatttcaaaaaacatacacacgcttttttccattttatttatttccattttctcattttatttatttttgtcacccatttcatctgtcctctctcttttttacgcttttactccgtcaaagacaacaaaaaagtgaggggaggggggggcgtgggagttgaagccgcttttcccctcccatccccggtgggagagggagaacgatctgtgatgggcacaaatgtgtgagtgtgtgcatcagcggggtgagacttttgccccgcagggcgacaaactcatcattcccccccccccgctcccctcctcttgcttcacgccccctcccccccaattcccccggcttcattccctcccgcgtccatttgggctcgtaaaccatgtacgagtttgtgttatgtgtgtgctcaacacccattccattcgacctgnncnaggcatgc

SEQ ID NO: 22948 - DNA, 1892 bp, Heterodera glycines
  unsure (1)..(1892): unsure at all n locations
cttgaaacgacgcgtaatttcgcagcaattagcaaaactgcctagcataatttaaaaaaattaattatcaattgttttggatccctttatgtatgtattgtgtataatgtccaaagtttggatgtgttaaaatttacacattttgttaggacattcatttggtgaacagtttttgtaagcgacatttgcgcttggtttggtggtttttaaatggacaaaaagcatcatgcgcaaataaataccgattgatcagtcatttcgatgcacaaggaaaaaaagagtgatcagtcgcgcgaccatttccgtctgttggggggggggaatgatgaacaaaacttctcgcgcgagaaaacaagtaaatgttcaatcaatgaaaaggatacttgagcaaaattttgtccaattttggaggaaagaaatatttttttatgattgacggaaaaagaaaattttaaaaaacaattacctaattacttttactttagtattttttcaaaattcagcaagcaattgacatcatcaaaaccggacatttgtatatttggacagacatcacgacaacagatgaaattttcttaccaattaaattttttttccaaatttcttagaacttttgcgactcctccagtgaattaggtttttgttggcttatttcgaaacaattacttctcaaacacaagatctagctttgctaatattcattcaatttacctcagtaacctaagaataaataaataatttagaatttgactagcaaagttatctatttaattatctatgaataaataaaaaaataaaataaaaacttcttttttatcttttaaaaaaaaatctcacacagaaattaagtgtcatttttagttattgagcccatcattagcggtgtatttttcttttgaaaacttgttttaaaggtgctttttcccgaaacttcgccttaaattacccgaagctgaagttcgaggctccctgctccgggagaccaatattcacacataaatcatttatactttggttttcctgattttttcaagattattcatagagagtttcaattcgatccctaattacaattgtttgggttggattcccgaattggccaggaagggccatcaaagtggcatcgcgatacaaagagcagatcaacggatttttggcttgttttttctttgcttttcaatatattttcaagactttgccaatagttttttattttaatcaattgcttttttaattatttggtgataatttttttttttgttaattgctgcattttatttaaatcaacattttcgatattttattattaattatttgatattatcggcgagttgtccccgggacggtgccttcccaaacgccgttttctcaccccgggacaaacttcggctggcaacaaaaatggaaataaattataattaaataaacattgttccaaatgtttcttctaagtttttttttgagaatatagtattatttttttgtaatatttgctatttttacattttcttcttcactttattaatttaacgcttgctaatttgaaggctttcttcagaaaaatctttattttactgaatccaacgaattatccatgcccatgtgtttgattttcttggcatttgcccttttcttcattattatttttttttgattcccatttgatcaagagtttcactcgttggctttttttagctttttattcatttttataataaaatttacattttttatttttactgtaaagtaacaaattttagaagcaatgaaattcgggctttttttccttttgatttgtttcttttttgaaattttcgaggtgaagccaaaccaactcgaactgaatgatcaaaacccgttagtttttatataaaatttanaaaatttatatt

SEQ ID NO: 22949 - DNA, 897 bp, Heterodera glycines
tacctcttctaatcaatcacgttgtacctcttctaatcaaagttgtacctcttctaatcaatcacagttgtacctcttctaatcactgtttacctcttctaatcactgtttacctcttttaatcactgttgtacctcttctgatcactgttgtacctcttctatttacttttgtacctcttttaatcactgttgtaccttaacgggcgcgaagcgcccgtccgactcaacacaatttaaaaaacggccgcgaagcggccgaaaagaacaacaaaaattagaaacgggcgcgaagcgcccgttcgaggccgcaaatcggcctaaaaaggccacaaaaaagggcgcgaagcgcccgtccgactcagcacaatttaaaaaacggcgcgaagcggccgaaaagcacaacaaaaattagaaacgggcgcgaagtgcccgttcgaggacgcaaagcggcctaaaaatcgctaataatttttaaaaattccaaatcttttcacaacccgatagttttttaaaaattcaaaaaaaatctccaaccaattcgatcaatttgaatcgcttcacagcctaggtagcgaagctcccaaagcgcgaagcgctttttcccagctaaatagtcgacggttcacgcacccgctagttactatatatgttatattgacaaggagtttcgtttcaaaaaacaaaatctcccggccgaaggccgggagcgccctgaaagtggtggaagggtcttacaactttttgaggagaatccgggaaaactatagaaaaaaattcagcgcggacgactgagtcccgagaagcgatttctcactttttcttgcagtttttcttctacgaaattttttatttggaccgggatcgcttagctcttgctggtaggattttaagtcag

SEQ ID NO: 22950 - DNA, 1089 bp, Heterodera glycines
  unsure (1)..(1089): unsure at all n locations
ttaaaaaggaataaaaatttttaaaaatttattttcatctccctnttcgatagaaaaagcatcagagtgcctaaactaacatgtaaataaaatntggtgcgtttcagagcatnttctgaaaaaatatttatgaaataaaaaaatcgattttttcaagtgtccgtttggggtactcaaacaattatggggagcaaaaatccaacgcagaattaaagtacagactatagggaagctattcccgaaggattcggtctccccataaatctgggcgcatcggttcggggggactgccccgaaaacaaaaaaatcgattttttcaagtgtccgtttggggtactcaaacaattatggggagcaaaaatccaacgcagaattaaagtacaggctatagggaagctattcccgaaggattcggtctccccataaatctgggcgcatcggttcggggggactgccccgaaaacaaaaaaatcgattttttcaagtgtccgtttggggtactcaaacatttatggggagcaaaaatccaacgcagaattaaagtacagactatagggaagctattcccgaaggattcggtctccccataaatctgggcgcatcggttcagggggactgccccgaaaacccaaaaaaaaatttttttgaataaaaattatttaaatgaactgactagataatatttaaaataggttatttctcttcctttcagtatccctgcaaagtttgctgcgcttctgatcagtttctgaaaaaaagttaagcctaacatcggttcagggggactgccccgaaaacccaaaaaaaaattttttattgaataaattatttaaatgaactgactagataatatttaaaataggttatttctcttcctttcagtatccctgcaaagtttggtgcgcttctgataagtttctgaaaaaaaagttaagcctaaactttttggcttgtttaaaaaggaattaaaaattttttaaaatttattcatctccctttttgatagaaaaagcatcagagtgcctaaactaacatgtaaataaaatttggtgcgtttcagagcattttctgaaaaaaaatatttatgaa

SEQ ID NO: 22951 - DNA, 1008 bp, Heterodera glycines
ataaatgtttttccaggtgaccatggacaccatcatcgacgcaatttgcgcctccaaattgcccgtgtcgcgcattctgtgcgaccagatccgctcggtgggcaagtcgatgctgctggtcgggccggtcgagtcgtccaaatcgcggacaaagtgagtggttttgtgtggcataatggttcatttggttgtctaatgtgaaaaattaagggtgagggttagcaaaaaaaatcaaaaaatgatgcattttgctggatttttgaaccataaaatttgaatgttttgtaagctagtcgtgccaggccgttaaaaaaaataaaattttgtcggttggttaaaagttttgaattttggcggtgaattgggagtagtccggcggtaccaacaaacgggagcagctcgtttcccccccccccccccccccgccgttaaatcttagtaattcaccataaaaatttctcaaaaaattttttcttagaattttcctatgaaaaaactttctaagatttttttcttgaaaaatttctaagttagcaaatttttttttacaaaatttctcgggggggggggggaaacgtagtgcacccccaacaagctgccttcagatatttgctatcctattatgcataaatcgtgttctaatttttgcgccttttttcattgaaaatagcataagaagcaggtttaaaaaactgacaggaaatggatttttgaaaaaatcacaattcttcaaatagtgctttataatattaattttggtttgggttaagccccgctccccaataatttattatctgcggggtcgtcacttaaacctaatttcaattaaattgcccaattttttaggttcaacaattcattggtgattgccgaagtgttgggcattgaggcggcacggggctcaatcatttccgaaattttggccataatgggaaaacacggcatcgagttggacagacagcacgtgttggccgatttgatgatttatcggtgagcacgaggagcatt

SEQ ID NO: 22952 - DNA, 2411 bp, Heterodera glycines
tcagtaaatataaaaattatacaaataaaaacaattattatttaaaaatgaataatgactaaaaaatctaatgaaattatcaattatctagcaggtatgtatgtataaaacaaatgacaataataagcatttaattttttggggggaaaattttttttttttgggggggggggctatattataggaaatatgatatccttataaaaagaataaatagagtgattattcaattgaacaataaaaaataataattgaaataataatgaacacaataggaaatttgctgaattctcacgacgtgaaaaaatattaataacaaaatgatatcaaattaagaaaaaatatagcaaataattttaaattaaaaactatatttaaaagattcaagtttaagcaataattaaaaattttttatcaaatgaaaaaaggtactaacgaattattaaataatagtccatactgataaataattgttgtgactgagccgtagaacatttagccaaatggtctacggctcatgctggtatgcacaatgctaaggataattatccgcagctatagataagcggatagggtagctgcagataaaaaaatctgcagataaaattcgcatgcacaatgctaaggatacttatctgcagctaacgatttttttatctacagctaccaagctgcggataatctctctccattgtctttttttctatatttcttatattatttggtttatttgtaaattgttgatcaaaaatgagattttggattagataaaaataaaatgaataaataatgatgaaaggaataatgacgaaaattgttggcagctaataatgttgttgttattttggtgggtggtgtaaagttatgttgaatgatgaaaatatgtgtgacgatttgttgatggctaatgttgcaatcacaacataaattctcaccacatctccttcggacattattattatttttcgtgcccccccccccaaaaaaatggtatttactccggaaatgacttctcgactgcttgagcttgttcaagcacgaaaagacaacttgtttcctggttctcgtcatgccgaagctggacgaatccaaaaagaggcttggtcgactgttactgaaactttgaattccgaatttccgatcgacgttcccgcgggtggtctgaaggtacaacaagtgcaaacaagatggaaaaatcttcgtcaggccggaaaagaagaagcgcaaaaaataaaaaagtaaaatcattttgaattattcttatgtgcatcggaacactaggcaccgccttggaacgggtggaggaccgcaatcatcggtttctgacacttcgaaaaaagttattgacatgtttggcacatctgctgcttttgccggagtgccaggcggcggggagactagcactgcccgtggtgatattttgcaaatggaaagtgattacctcggtgccgacccatttgttcccggaaaaattttcgaggaagacgacaaggaaattattgaaatgtcgagaatgccaattacgccgttaatcatcaaaaaggcattaaaaacacttcatttataaaaatttagaagagaaaattgataattaattacatttgtcaatttattttattatataataaaaaggcacccgacaggcacgctatgactctccagcttttggccgtggaacaccgatttctcgtgggtcgtcacgccctccttcttcccgtccatcatcatctgacattgcggagcttcaattgaaagtgcttcaaggcgatctcgaacgaattgagcttcaaaaacagctgtgcgaagatgcaaaacaatttttgaaggaaggaagagacttttttgcaaaaggagcaaaattttatgacgagaaaaagggggaaggggaggggtaatgagcgatcagtatttttgatcagaatttatggtgcattttaaacaccaataataattatttttgataattttttatcatctataataacataaattgagatgtcgtttgcctgttttattccacccgcagggcaagattttgaaagcaggcggttgcgtggtgtcttgctgggtaataaaattatttcaattttcttctatcgtcaaatattttttaggtgatagtggttatccctgtaaaaaatggcttttaaccccatttgctaatcccatcaataattcacaacaacagtataacaatgcccacagcaaaacgcgtgtgattattgaacaaacatttggcaggtggaaacgaagatttcattcgcttcaaacaccaataagaattaaattggaaaacattggcatgttcataattgccgcggccattttacataatattgcactcatgaaagggattcccgaatttgatcaagaagaatttgttgatgatcagccggaaaacgatgatcgtg

SEQ ID NO: 22953 - DNA, 1923 bp, Heterodera glycines
atttttgatgcaatggatgtattcgctagcgttcacaatcaaatggacaatgtttatggcgaaaaggcaactgaaattcgcaaaaaattctcgggcattgtggccaagaaccatggaattgaaaaaatatcccaattttgccaaattctgtccggaaaaaacactgaatcagatgttcccccaaatcttatcccattttataaatttgctcctttgacatcttgcgacgtggaacgctctttttccgtttacaaatcaattttggccgataatcgtatgcgttttacccccgaaaattttgaaatgtatcttatttgtaattgcaatcagtgaataaaatttttgccttaattttaaattattttcatataaaaaacagcaattttaataatttcacccctacatttcaaactttttcgcccctatttcgcgaattttttgcccctatttaggtccctattttggacttttcaccaataaaatcctcgccctactgataaatagcgatcgtgtactacctaccccctagtttttacctgcaaaaaaatgcctttgcttttacagtaatcaagtagatcttctcgctgaagaaatgggtgcatttcgcattggacaaccgctggcacatctgtgtccttccttgatcagatgttccacatggtcaggctcaaaattggctgcaccaacagatgcgaatgataccaatttctggacaatgaatttttattagttaattaatcttataatttttagaccaaaattttcttctaagacaccatacacagccgctcggtcttctctgtttttcgagcataagtctgagacttctttaaaaacgtcctttggatagtgaaccatgcacaaatctatgtagctgaaaatttgaaacaatatttgtatagttaataaattgatgaacttctgaaagaaagcaccaacccatggtagggggccggaatattggacgggtgcacttcattcccccccccgtcgtttcccccccgcccccgaaaaattttttttttttaattttcaaacctagaaatttttcataaaaaaattcttaggaaattttttagtcagaaaatttcaagaaaaaaagttttataaaaaaatttcagcgattttttggaaaatttttgaaaaaacttagtagttcatcatgaaatttcgaaaaaatcgctgaaaagccttttaaaaaatttgtttttcttgaaattttcttaataagaaatttcctaagaagttttttatgaggaatgaaaatataaattgggcaacaacaatgggtttatttaaaattacacaacacacaccctcccctccccgggggcgtgccgaaaaaatgacttcattcatcccttctataacaagcaaaacgatgttcatgctcaaatgaaaagctaaattatcatcaccatcaccatcatttagtgttttccacccccgggcacactgtttgtgtgtatgggagggggaggggggggggggggtgggttgacttgaagtcggctggtggcacgtctcaatctgcaaatttgttggatttagaggacgaatgcaccagtccattggaagagccgatgtgtaaggtggcgataattcaccattttcggaaaccagctagagcccagactggatcccgaccctaaaatatgaaccaagagaccaagacttccaaaaaattggaatttgaatcccggtaattatatcccagcctaattcccagtcccggcatttttaaaagtctgggttctaaaacaaacatggattttttttgggtatgaaaacccatcaatttttagaaatgtgccaatgcagtgactgcggagctgaaaagcaattgggtcatttggagaaggaatgcatcccatacaaaaagtcgttggagcatttgtttgcgccggcgtgcggactgtccat

SEQ ID NO: 22954 - DNA, 1526 bp, Heterodera glycines
  unsure (1)..(1526): unsure at all n locations
tttcttaacaaattcattaaaaagtccaaaaattttccccggcggcgcctggcggcaccgccgaaccccnaaaattcctatttttcttaaaaaattggctcaaaatcgcaaaaattggccattttttggtgcaaatctgttaacaaattacacccaaagatcaaaaaaattttcccggcggcgcctatcggcaccgccggcccccctgttcccgaaaaattttttggaaaaacgcaccgaaaaaaacggtttttgaaaagcaaaaaaaaaaaaaaaagtcatcggcggccgaccccccttcgcaaatattttttccgacccacccacctttttaatgtatgattttgcaggagaagaagccaaaaacgaaaatggttgagcgtacggtatgggaatggcagaaggtgaacacaatgaagcccatttggatgcgaaagccggcggaagtggaggaagatgagtacaaggagttctacaagtcaatcaccaaggactttgacgagccattggtcagtcagtcacagttttcgaaaaaccgggaaaataatttttgtcacaaatttatttgttgcccgttttttaaggcccatgtgcacttcattgccgaaggtgaggtctccttcaagtccctgctgtacgtgccgaaaacactggccactgacgcattccaaaactatggcaaaacggaggacaacatcaaggtgggttgaagggggggacggggaaacccaaatgaaatttcaattttaaatacaaacctattttaaaatgattattttaattaaaattctatcaatagcacacggcaaaaataaaatttttatgcccaaaaatccacattttgtctaaattttacattttttcccatgattctatttcctggcttggttttcatgcatttgtccttgaatccgtataaactgggtccatggtgtccttaactttatcaatttttaacaccccccccccccaaattttcagctgtacgttcgccgtgtgttcatcaccgacgacttccaagacatgttgcccaagtatttggcattcattcgtggtctcgtcgactcggacgatttgccgctgaatgtgtcgcgtgaaatgttgcagcagcacaaactgttgaaagtgatcaagaagaagttggtgcgcaaggtgttggacatgctgaagaagatttcgcccgaaaagttcgacgagttttggaaggttcgaaatttttttttaaatttttatgcaaattttatacaaaatcatccaaaatgttggcatttcattgatataaaacatatataccaagtttgtaaccggaataggacaaaatttcgctgctgaaacaacgccgggacaaaatttcaccaccaaaatttaaaaaaaatttaaatttcagccggcgaaatttaggggtgaacccatttgtaatcatgtctcctcgggtttggaattttgcataattgngtcatttattttcttgtcaacattttcaggagtactcgaccaacctgaagctgggcgtcatggaggacccg

SEQ ID NO: 22955 - DNA, 1652 bp, Heterodera glycines
ttataataaagattggattttgtttatttattttcaaccataatctgtacacaaattatcaaatgatttttttaatttgtcgtttgattttgtttatatttttgttcaacaacagaatatttttgtgcttttccattaatctcatgactatcagacgtttatccgccatcaagttcaaatcatttattttttaaaactattacaatatttttaaaaaattaattttcaacttattattaagtttcatcataatatgttaaaaactttccattagtttatttagtttattttattctgtttcattaattgacataaatatttgttttttataaaagattatttgaaattcaacaatatttgtacatataatttgagtttttgtcagtttaagggttcgaaaacaaaaaatgggtaataaataaaaatttatatcttggctcaaattgaaccaaattaaaatttcatattatcattcattagctttaattgttctctatcagaatatgattttccaatattttttacttaagtataaaaaagttattgtcataacatttcaaaaaatgttaagtcagcattttttttcagaactttttgaaactcaatgaaattttctaaaatttataaaagtaaatagagaattcttagggctatcgaatatataaattcatttttactctattgcattttaaagactttaaaattttaaatatttatacttatatatgcatgaccattgcaaaaaacataacatgttcaattctctataactctttttatacttaactaaaaaattttgggaaattatatcctgaaagagaacaataaaagctaattgatgataatatgaaattttaatttggttcaatttgagacaagctataatttatatatattacccatttcttgtttttaaacccattggcggatttaagaaacgcgcatgggtggaggaacttaaattgtatttttcgaattaataatatttaagtgcatgttttcatgttcataatctattgcacttagtaaatctgtttcttgctgctctatgtaattacaacataatgtctatttttagtaaatgtaattatatttatcatttaatgatactattttttatgtatctttcgtacacttaagatatttgtaattaaataaatattaataaaagaaaaaattaaatttgattttctttattataattgctttggtttttaatgtttgccttatttaaagccatcagatgacaattgttattttacatggtaagtaccaggggtgtgacttgtctcagaaaagacgagagcgagagtttggcgagaggcgagagtccccaaaaagacgagagcgagagtttggcgagaggcgagagtccccaaaaagacgagagcgagagtttggcgagaggcgagagtccccaaaaacacgagagttggcgagaggacgagaggcgagagtttttcaattttttctgtagccttatttttaatttaaaaaacttcaaaatcgtatattaaattaggggtacgggcctgggtatttgggcaaataccgggtcagggtattgccgggtacagaaagccgggtcagagtcctagtttttaaaccgagtccaagtcatgaaaaatccaaacaaaaaaccttttaaattt

SEQ ID NO: 22956 - DNA, 1188 bp, Heterodera glycines
  unsure (1)..(1188): unsure at all n locations
cacttagaggtnatttggtgaagattcggtgatcgcttttgatgaatgggctgagtggtttactgattatgttggagctgtaggacgaaattggaatgaggatgagaaagttgctcgatttaaaatgtcattaattgggacaccaagacaactttttaaacaattaatccaagcggaggcagctgcccttaactcagcgattactgggattaggcaaaaattggactcaccccaaagacgggaacttactaaaaggacattggcactttgcaaacagagagaaaacgaaactgtttcagaattccttaagcgccttaccccgcttgttgaaatgacaaacccaacattgaatgataatcaaagaaaagagaggacttgtgaagaatttttggatagaattaaacccaatattggatttttgcttcgtttagtcggtctcaattcgaccaaagacttagaccgaataaaggcacaggccgaggagcttgaggctctactcttaactgaaaaaggacaaatctcggataatttggcacacactgttcatgcacttagtggacaacggttcggaaaccgacagactgaacaaaacagagaatccaattatcggggaccaccttttgtttcggaagctaatgcgacaccactcaatgaccgttttgccccgcgtaatttcgacaataacaacagaaataacaacggcaataataataaccgaacacaattcaggcgtaaccagagaccgaacgacagaaggccaaacttttgtcgcaacagacggtctcaatttatcaacaatagacctgacccacaaccaaacagaggcagaaatgggcgcaatgctaattatggcactgtcaattcagttgatgctatcccatcaaatgtttctgtcctcgattccgaccaattaattcgcgccattgctaatttaggcataatgaaccaacagccgcccttgggcaattcagtcaaaagagaagatgctaatgcattgaatgcaattacaactgttaaaagtaaaccaaaaatcgagaccaaaggaattatgaatgactcaaaaaactgcgaaattccagtcattgattcaaaaaatattaaaccaccttcaccccaattgaaagcttcaagctgggagggtattggaccaaaactcacgaaatttttaatgctccttttctttattgt

SEQ ID NO: 22957 - DNA, 1360 bp, Heterodera glycines
  unsure (1)..(1360): unsure at all n locations
cagtagaggcatcatttgatgtcccaattccaaaaaacncaatgatgtgccaaactcaattgaaaggaacagtttgtctcttccatcacctactcaatgtcncactctcttttcaatcaaccgcagggctcacgaaaacaaaccatttggcttgcatcatttntaattaaataataataaattatntaagtaaaaaatagattgggataattccactgatgatcaatcgcgatttttaaatattgcatcataatttaataataataatatatacaaattatatgaagaaaatttataaagtaaaaaattgacttggataattctactgatgattcaattccaatttttaaaaatatataaattatattaagcaaacaaattttgctacgtttataaggctgtatgatttccatctccgttgttcatatttattaaaaacatttttaaattcacttctacgtaaataaattgaaaaaataattaatgggctttaattttatttaagaaaaataatgttttattctttttccataatttcttttattattattatgaatcattttttaattcacattacaactgcaaatccatcggttagataatcaatcagggtaattaattttgtctaatcattttaattagggagacgataaaatgctaattgcatttatgagaaatggtcagcaaatgcaaatcagtgagtattcaaaacaaaaatatgagatacaccttggctttatatattatatgagaatgaattggaaatgtgacaaaattgtgggtgaatttgaagaatttgaacggacagaatgccaaaaatatcgaaaatatttggacattttgtacgaatatttgttcagagaatatctcggaatccccacagtgaagccaatttttgtatttaaagacaaaattgaaattaatgggccaataatttatgcggtgaattgtttggccagaatttcgcaattttattttataaaatgggagggacgactttatgaatataaattaaacgaattgttcaattatcaatttgaaccaaaattattgaataatgagaagagattgaattatgatgaacaaaaattgtcaattaatgaaatgattttggaattggcaattgacacagcgaatgattggcaaacaaatgaaagtttggacgaaataattaaacaaaattgtggagataaatttgaagtgaatttggaggaaatgctcaaaaaagcggatgaatgggaagaagaaaatgaagaaggatggagtgccaatgaaataaattatggcaagcataggataattgtgggatcgaaattcgatgataaatggaaatgggtgagacttaaaattcaatgaaaat

SEQ ID NO: 22958 - DNA, 1485 bp, Heterodera glycines
ctctctctctctccaaatatgtgtctccccctttctgctgtgcctatgtttcggggcttctgacgctctgtttattgtcaataccaatatttgagactcatttgtgtgctaattttcactttcaactgcctctctctctcaatcgctctctgttactctctctctcttagtctctgtctccccctctctctctatcacccttcggtgccttctcgaatgtcctcactctcctcgctgtccgttctgcgcccctagcccctcctccaagagcatccatctcaactggacataacggtgatcacctggacaaacaatacaaaatgaaaattaaattctttggaaggggggaaggatgtggcacctggaacaggtcgttccccaaaaattttttttaaaaatttcaaacagaaattttccaaaaaaaatttttagcaaatttcttaataagaaaattcaagttaaaactttgaaacattttcagcgatttttaaaataatttttttgaaaaaacttagtagttcatcaaaaaaaaatcgctgaagtttttcaaaacacaaaattttcgagggaggaaataacggggagggagggggttggttgaacggctcgcccccgtcgtgccacccacctcggtcatagtagtggcactgggagtggaagttgagcatgtcccgctgtttgttgcgcgtccgcgggtacaccaccgagccggcaagtgtgtccgtcacgtcccattggtacggcgcgcccgacgcattggcggcgccggaggcgttcagtcccggcactttgcaccagtggtccggctacacaactcaacaatgattttgttggaggatctgtttttgtttgggttttataaaatagcaacaatcagtgttcgtttgatcagcagaaagggagcggaagggtagccaacaaattttcaaatccgaaaattttgagatacgctaaatttcgatggaaccagaaaaaaatttaaattttgaaattaaaaaaaaagaatttttttggaaagaaatcgggtttgtaaaaatcttaattgcattttttatttgaaaaaaagcaccaagtaatttaaaaaataaaaaataattcagttttttaaatttttcgggagggaggaataagcgaccatggaattcccaccccaaaaatggaaaaaaatttgttgaagattaattttaggagtaattttttggttcggctaacaggcgtagtcttccttttgtcgaccggtttataaagagcaaaacctcaaaaattaaaataaattgaaaagggaaacacaaatttggcgttttttccaagtttttgttgtgctgctgccccaattggtcccacctggtacatcatgtacaccacgctgaggttgaacatggcgtgcggaatctgctgcaggctgaccaacaggtacacccaaatttgccaccagctgcaaccgccgatgatgttcagaatgcctgaacaaatattggccagtag

SEQ ID NO: 22959 - DNA, 1394 bp, Heterodera glycines
tgggaacacaatcgcttgggttggccatctttgctcggagtgtgcaaccatttgaacacggattgcccagcatttggatttggcccatccaaattgtcatagccccaaatgggcaaaagcaaacgagcatcgattgagttcagccgagtgaaatccggcaaaattgtcggccaagcactgtggcatttgataaagatatcaacgttgagaaattgcaaacgttgaatggttggcgcaaaaatgggcaaaatttctcggatcaaaacatccacaaagggttggaggccgaatttaaaagaaagagtaaaaatgcgcaaattggtgccccttttgtcccaaatttggttgttggcacggagaaaagcgatcacggaatgatcaatgtacctgacaaaattgggctgcttttagccggcgggcggagcaggacaaaacgtcgccggacgaatttttggacttttttatttctcaaccaaattaaacattctcagtattgttcgaaaatagggttgcgccccgacattttcgaggttttacgaaagtcgtcaattgcacttgaaatgggatggaagtgtctttaaatgagtttttaagacttttttgttctggaattttttcttttatctttttcgactttttatagaaatttcggcgctactttgaaagtggccctttttgaaaattttttcaaaaggggggacccttttgttttgcaaaattttttttgtgatagtcataaaaatttattctctggggtttttggggtccccgatcacgaatctttcaattattttgatcaattccaatttcctaaattcaaaatttcgatttttattcgagttcgggttagggattagaaattagtcaaaatacatgtcagattcgtgattagcgacctttaaaaccccggataacaaattatcatggttttttatcttaaaaaatttttgcaaaacaaaaggttccccccccccccttttgtttcaaaaacggccatgtttagaatattcctactataaacatggtcaatggaagattggaatgatgaagggacacagcaaaatgtggagagaacgccgtgaagaaatcttacgctgggacccaaatgccgacctgtggaaatattagagaggaggacgaattggacagacttttcgatcggacttttaggcgccactgatttgatttgttctttaaaaatgataaaaacaattgtttgtgcttttggatacaatgtcctcatcgaaattttggcgattttctttgatttcttaaataaatttgctgactgattccatttctattttttgttcaccaatgcttccgctgacaccagcaaaaagattcgtctccaaaaagcattgtgtcgattcaattcgatggctctctctcca

SEQ ID NO: 22960 - DNA, 1127 bp, Heterodera glycines
cagcttgatgctgaggtcaatcactttttactgttctaaaccataagttttaaacctgatacacggtggagattaatctcccaaaaaagaaaacacacgaatgaaaccaatgaaagtaactcaatttcctaacagaccgaaatcgtttcctttgagccactgtcatgcagccggtcaattagtttctcaaacgcggcaatgttgagcccaacttgcttaataaggtcggcaatccgtttgtcttctttggctgtccacaacgcttcaacttttgcctgaaatttgttggcaaaaacttcctcaaattgttgctacttgtttctgcgaattcagtgccaattcgtgtgccttcaggtttgactcggattctgttatttggttccttagagagtttatttgttcctcaattcgttgtatttccatttcgtgggtttgctgatttggtacaaagggaggaggcccttgcattccaacgggcggaggcggcataaaagggacagtcgccgattgtcgcactaaaacaggcagaatcaaattttaaataggaagaaatcgcacaattttgtatctcgtagagtaaccgatatttgtagaaatcggagccttcgcctgcgaataaaaaagcgaacttcgggttatccctatgttgctgacgagacacttcttcggaagctggtccatttctggccacataagcagcaaatttttcaatcgagtcgcgcaattcagtatcttaatttgtccttattgcaagtcccagtgaaaagttccaaaccggcaggtggacatggaacagcagatgacattgttgaatacaaaaaaaacgctcaattcaaaatggtcagtgattggtgatcacaacaagcaaaaacaacaaatttaaattgcaaaattgtccttatctaaattggaaaattctgcaattcaattttattgtagggattttttatatcagctgattggttgtatttaatccagagctgcgatctttcagccataaaaaatcctcatttgccactaaaatacctcaaaaaatcctcatttgggtaatccttccgaattggtgtccgaaaaaaaaaataataaatattttcttacaaatcactttttctatggtaaaaaattct

SEQ ID NO: 22961 - DNA, 1450 bp, Heterodera glycines
tgtttatcaataaggaaaattttcaacctaaaattatttatcaagaaaaaaaatgaattttgcgttcaattcataaaagtatattctctgaatctccctttataaaagtttggggtgcggccgcatatagtaattcaatttaaaaattttcttgaaatttgttatgaaaatttcgtaaattgaagaaaacaaagcctttatagttttttcactccgtctcccctcccttcaaagtttttatcggttctcaaaatggtaaattactcaatttttaggtcgggttttcatcattttttaatatttttatttgaaattttcaggtttattaaaaaattttatttattttttttttgcatttaccagtagaagaacgcgccgacgagaagaaaagcagcgattggtcagcaaatcgcagtacaaaaggacagcaggtaaacgccgtgctcaattgttcggggggggggggggaaattaatttaagaatatttattccatttaagaaaattttgacagttccgtttttgtcaagttcttgtctcattgtcagtggttatgaacggaaaatattttggaggagattcggctcctttccacgccaacttttaattttttttaagaaaaataattctatttcattaaaaaataaataaattttgaaagatgctttacagaaccctcccaatccctcttctaaaaattgaactttttacacccaatttccgaccgaggaacacgtgggtgttttgattaaattaaatattgattgcttggttgtcaattaataatggttctaattctttattttatattttcacaaattaaacaaacaaaattacgcgcgcacccaaaaaaataatttagtatagaaatgtgtccagcagaatgtcacgaccagaaggcatgctgataaccagaaaaaactcggaggtgaaatcaagaaactcctttttttgctcttacaattaggcgccaaattattttttttaattttagtttttcaaaaaaattctggaacggacttttgtccgtgccatggccacccattgggtggaggccaaagcggcaacgccgctgtccccacttttcctctgctttctgtcctcaacaatgttggtaaaacagaccaacgggggcgaacagcatcatctataaaataacaaaaataaattcaacaaataattaataatattttttcaaaaaataaattatttagggagatggatttgtaattgttatctttccagcggtaattgctctctgtatttttgtttattgaaaagccaaatttgttaatttggctctaaaattttaatgtttaagcgataaatatgggacaattttgaggggaaattctgcaccaaaaacggcgctaatgcactttatgaatccaatcgacttttatgagtccaatcaattgacaatacctgctttttatacaataactttgttc

SEQ ID NO: 22962 - DNA, 1375 bp, Heterodera glycines
tgctttggtggtccccacaaatttttatgaaagagcggggtcattgagatcaatgttgagggcagaaagcccatcaaatgaattgtcattgcgaaatatggggatttgggtcttcaacaacacatgaaaggtggcgtaaacgacaaaagtcccacgaacagagaacctcgggtttttgttgagcagtgagcacagcttaatcgcatcacttcgcttcttcagttcttctcctgtcaacgattcgcgaaggaagacatttggcatttgcgttctcagtgcagagtcctttttgcgcgccatgaggagacatttccgaacatgagcacgggtcggaagaaccaacttcatcggacgtgggcgggtgcccagttttcccattcggtactgtgtaataggaagcgcttcaacatcgcaaaggtccaggatttgcatggccgtacctttgtcggcgctggcacgaccggtgggcgttttctcctgactctccggcaagccaatcaccacgagtgaatgttggcgcctgtcttcctccacagcatcagctgctgcacactgttgttggagaagtgtggtcgtcgaaccgagcagagctgtgagttgtctgatgaacagctttgcatatgccggaatggcgttgtcggcttcgatttcgggaggaatttccagatttgagacgtcgtgaagaagttttttggcggtgactgctgcgataggcgaaaaatgggtcgatggctgcttgcgatatgtgtcgtttgtttgaagtgctccccaacatttttttgtataaatacggccacttttttgactttgccatcattccaattctcatcgtttttttgcattcttcactccctatttttttattccgactattaaaaaataacttcttttatttttagctgtcttttgtttgtcacatacaaattccgtctccgtccaaaaatgcctgagttacttttcaagaccatcacgcagcaatcgttcacaattgaagttgaggaaactgcaacggtgagatgtttagacatccttttcttgtgcctaaatacctaacgatccattccttttcagatcggcgaagtcaaacgaaagatccaacaggtcaaaggcgcagaatacccagcggagaaccaaaagctgatcttcaacgggaggatgctcgaggatgccatgttggtctctgagctgaactttgcggcgccgaaattcattgtcatcatggtcatgcgagtgcgtttttgcctttcgtctgagtcaaatgtaaaagtgccattctcttcagaaacccgcgcaggcatcgtcaactgttcggtcagcaacatcctccgcatcgccacaaaagaacacatcgacagcggacggacaggcgccgaag

SEQ ID NO: 22963 - DNA, 2375 bp, Heterodera glycines
tcaaaaaacgagacatgtgtcaataaatagagagtgcagagaaaaaaaggcgctatttaaaaagagtaaccttttgaaattatcaaaaagcaaaaacaaaagggggcaataacaactgaatgaggggaatgggagggggaagatggcgaagtggcgtggggtcatacacctaatcaataattacttccttctctaacacctcccctcttaaattcgaaacccgtggtttaagcctaaatttttcatctcgatggagagtaaaattgtgtgggtttcttgatacggctcgatcggcggactttcaacgggtaattggctggctgaatttgttggggctgacgaggcggttcgacaaccggcggcggctgttcgacttgaggtgcctcttcttcggcttcgtcttccaaaagatgtcgtcgccttagctgatttgcgtgccgatgaacgagtcgacgcagaacaggcacataaacacgatatgtgggcgatttgtgaagcctctcaacaacttttccttggagccattccgtcttgttgttccgataattgatcagaaggacatgatcgtttggggaaaaattgatcacttttgtcccatgtttccgatcaaaatttcgcgccattttgtcggtgtattttgtctgtccctttttgaatgagttttgatcaaaattttcggctttttctcctttcggatggacgagcgacaattttgtgcgtaattttctgccgaaaaataattgatcgggcgaaaatccattcaaggcgacgtgtggagtggttctgtaggagaatagcatcttttcgatccaatccttttcgctttttgacattttcttcatcgaacgcttgaaggtgtcaacgaagcgttcgacttggccattcgattgaggatgaaatggcggagtgaaagtatgcttaattccaaattctttacaaaatgtggcgaattcggcagatcgaaattgggtcccattgtcggaaacaatttcttctgggattccgagccgaaaaatgattgatcggagtacaaatacggtggcataggcagaaattgtgttcattcggtaaacttctggccactttgaaaatgagtcgatcagaattaaatattggtgaccatctgagcaggggcctgcaaaatcgatgtggacacgctgaaagactttgtccgtcgttggccatggtgaaagaggtgctttggtggggtttttctggcccaattgacactcttcgcaagtgctcacaactttttcgatcgctgagtccattcccggccaatacacgtggcatcgagcaagtgctttcatgcgcacaatgcctgggtgagcgatgtgcaatgcctttaggatccgactgcggagcgatgttgggatgatcactcgatcctcatacaataggcaattgtccacttcaaaaattttgtcccgttttggaaaatatggactaatttcagaatcagcgacttttgctggccatccatttctcaaaaattgaagaaccgtttgaagtggttgatcattggccatttctgctgtaatttcgactgttgtcacggggagctgatccattctgttttcgaaaacagaattaatgtagcaatctgtatcggcacagatgtttgctatcaggatgtcttcctctggacgcgaataattggcaataagccgtgacagaacgtcggcttggccaaatgatgtggtgtttacgtagcgaatttcaaaatcgtaattcgccaaaaccatggaccagcgctggaggcggctcgcggcatagatcggaatgccctttttggagccaaaaattgccaataaaggcttgtggtccgtttgcaaaataaattttctgccgtacaccatgcggtgaaatttctgaacggcgaacacaatggccaatgcctctttttcaatttggctgtaattttgctgcgctgctgttagagtgcaggctgcgtgttccaccgctttttcctttttgtcggggaatgtgtggcttaatgtggcaccgattccatctttggacgcatctgctgatacgacgattgggcgtgccgggtcgtagtgggtcagcaataaatcggatgtcatcatttcttttgctttttcaaaagcattttgctgttcagaagtccaattccaagctacgtccttttggaggagtcggtcgagcggtgcacgcaactcacgcatgcatttgacaaatctgccataataattcaaagcgcctaaaaatgatcggagggtgcttttgtcgatcggtgcgggcattttccgaattgcgtctgaacgcgacgggtcaggacgaattccgtttgctgacacaatatgcccaaggaacaaaagttcgggctgcaaaaatttgcatttgtcgagttg

SEQ ID NO: 22964 - DNA, 2009 bp, Heterodera glycines
  unsure (1)..(2009): unsure at all n locations
tagagtagagcgggaccgggacctggtactgaaaaaactggacaactgagtacctaagtcccggttttgaccgggaccgggactagtcccggttttttcccggttttcccagccaaaaattcccgggttttcaacccgaaaaggtcccggacccggttttgcccaaaattcccggtcccgctctactctacctttttccttttaaatttttcctttgtttattttcctatttttgttgactttttgttaaagagtggctccaatttgagcatttgtgtattgtccagtccatataaattcgtttattcacttccaaatagcgacagagaaatgggctccaatttggtcaattaaattggttggagagaagaagatccaatttctgtcaaaattaaaaaacctccagcaatttcagctccaatcaaagcttcggtgctcccctcaattcaatctggcaaaattttaatgaaaaagaaaaagcctttattggtattccaatttattcgctcttccatttcaggcaataaatttaaaatttaaaaatttgtaagcaaaatttccaaatttcactcattccattcgattccaatcaaatcaaaaaaacatgtgagcattattcattcacatttctgctggacacagctgcagccaaaggacaacggaagccgaagaaatgacgcggggaattcctaattctgtcgaatgggaaagaaatgtgtgtgtgctgagattctgagactaccccccccccccccctcggctcaacagatgaccaaacagcggaaaagaattctcgaccgattgtaattagcattgagtgaaggaatttgggtaaatccccaaaattttgttgagtgagagagacctcatatttagaaatattaaatattttcatccatttctgattttgacatgagcaaagacggattgcctcgaaaggacatctcaaccatttcccggcagaacggaaaatgggataatggaaaagggaagaagaaaaatgactaaagaagcaaagggagggatggggggggggaagttggnnggaaatgacncgtttagtgtttttgaaaaaacattaaaaaaccgataacggtaaaaaccctttcnccagagttttaacatcgataaactcgaaaaaatgtaatttggtcaattaaactgttcaacaagttgaagcatgagcgaatggcattgatgaataaaaaatgcggaataattcatccgattcagcaccttcccattacataacttaaaatccaatgccaattttacgagcggagggggagaattggttggagccgatttgacgaccattcgctggtcacccgactaattgctcctccgtctcccattattcccttcgaaaaccatgccattatttgaaaaacaatttcggcactcacaacaattactaggaatacatgtgtatatgatgatttcttcaattttcaggtgatcaatgactgtttgatcatctgttgttgtcggggggggggggggcgtcggatggaatcgcttacccaacgcaccattcactcattctttcccattactgcccatcctaatcaaaagcacattttcccatgcctttaatttgcgccaaatgaacgacgaggacaaaataagcaatgtttgaacagggaaagggagaaagagaagaaggaggcgaattatggccaaatggaaaaagtgatcgaagataaaaactgacaatttataagctaataaattaaaatgtaaaatttcattttcattttccccctctctccccttctctccttccgttctctctctgtcccctcactcttctttctccgcccctcccccttcccttcccttcccccctcttccttttccccctcttccttttccaatccctccgcctaattccgtcctccccccccccctcagtgctcattcacaacatcctttcgacaggcgatgaccatcaccgatgagcgagcacattcccccgagtgccctgtcatgtccgccccccccctccc

SEQ ID NO: 22965 - DNA, 1869 bp, Heterodera glycines
  unsure (1)..(1869): unsure at all n locations
acactgtcactgcagagacctcgacattgacggggtgtgaaatacccgggaacacgatttgccattggacgtggcacgatgcaccnttcacaatcacggctcttcgatcctagctgaatttcagtattcacccgttcaggtacatatccaactcaagggcctggagctgatcagcgagtacagcaggcagctcacgccgcagtcagcggcgcaaacaactgaagggagtgcttccctggcgtggaggagaggtccacgtcgattgggtcccaactgaacaattggtgtggcgacgacagtccgatctcgacctggaggcatttgaagaaatggacgggccaccggtggaattgggggactcgatcaaaccccgggagcaatcgcccaaatcggactcaacggacacaaaagccgggactcgcccgaacggacccgacccgggggcctagggggaacggtgactcgaattggggccccctctcgtccctctccctcaaatcgtcgaggtcaaatgggagcgttcgccgaagggagtgcctcctccctacaagaacagtgggcaatggctgataacggatgggaaagcaattcaaattttggcgaaatccgatgggaaccgaaaaggaggaagaaaacaatttgcagaacgataacgccgacgaggggacagagggagaggggggaaagacgaaaaaaggagacaaaacaaacaaagatgagtccaaaagtgcaaaaagacagatgtctccctcctcgtttgcaaacgggggattcgatcaaagggagggggaaaacgacgataaacagcataattttgggcgtcattttcaattgacccgcccctccccccaaggaaagggggcattccaccttcattcatctccgcacagcattcagtggccgcacaattcgccaccatcaattgggagattctcccatcttttctcatccactttttcttctagcacatccccaactgatttgtcttcccaatcttcaggaatggcaaaagtcgcaaaccgaaaacgaaatgagcgccgaattcgtgccgtccaagacttggcgcggcacctcaaccaccgaatgaaccgccaccgccgttggcagcgcgacggaaaacgggacccatcggaggaacggcacatccgaatgaccgccgaacgttatgctgatcagctctctcgcctgggagatgaccacattcaccgactgcagcaccaattcccgcaactccccaacccccgccggcgacgatcagaggtggggggcaatctgaaagggggaaagtcccagccaaaattggcatcgatggtggtacgcctgccccagggagagttgctcccttcaaaggatgtcggcggcgcagcaccgggcgcatcggactcccatggccgaaacgagaacgaagaggaaggccgtgagaaggccgagaaggaaagaggcagccgcccgcgggtgctccctccgcctggggacagttttggagaattgctggagaaagaggcgaaagctcgggccgaagtggccgagctcgaagcccgggcaaagaaggcaaaaatggagagggaggaggaggaacagaaactgaaatcggcgaaggaagcgcgccttcgggacttggaaacccaagccgacgacttgcgccaaatgttgggcgatgcgagctggccgtggtcgagaggcaaagacgggaaaaatgggggaggcggtggctccccgcgctgggaaagcggtgggcatgccagcagtgccgatggaggatgatggagtgtcacttgccgattcggaaatggaggtggtgccggccgggggcagtgtcgcagaagcgacgagatgacaaaacgggcgggagggctgctcccgccaaag

SEQ ID NO: 22966 - DNA, 1697 bp, Heterodera glycines
tttgcctttccgtttaccttttttctgtattcgtccactgagaaatccctttgtcggctccgcgtgtgcaaatgcagaaatgtgttggaccgattggtgctcaaattggacggtcgcctgattttgttggccattcccgcccccctaaaattgtcggtcccaaaatccgaaaattgaaaatggaaaaaatcataatttttgtttcaaaactcaaacaatttaacgatattgaattgcatttcgtgaaaatttttatgaaaaaatttcttaagattgttctctgcggggtacatgtcccggcgacgtttcggctggcgacgttttgtcctgctcccttctctgcggcccctatcggcaccgccgggcctcccccaaacaaaaaattttttttttttggggaaaagacgccgcgaaaaaaggggtgaaaagtcgtcagaaaattttgatcgttttttgaatttgggaaacattcagaggtaaaagtcgtcgtcctccaggccccagccccaaaattcgttggacattccgtccacctaaaaatgagaaaatatgcgttcgttcaacaaaaatgccacgaaacaaattaaacctttttaaaatcggccaaagtgatcacgagcacactgccgatgaaatttttgtagtcatacctaaaaaatggggaaattttttaatttatttctcgaattcgtatatttttcatttaaaaattggtatttcgtttcgaattttgacggtgtgtaaatgttttaagttctgaaacattttcccggattttctggggtcccccatttgtcacacaaatctgacaacatccatttcaaccaactcaggcccgttaccagatcagaaaaattttttttggaggtttttttttttttttgctctcccggcccaaaattttttttaagctccgtggaaaaaatgggaatttttagcccaatttcgccaacttttagtcattcccccccccccccccccccccatggttataaataggcctgtggaccaactcagaaaccctaacccaactcggacaaaaaagtcaaaaaacaatttaaaaaagcagttttttaaagggagtcgaaattttttgtcatatttaattggtgaaaatgacaaagtaaaatttgaaactccaccttcggatgggatggtattgaccagctgcaacgtgcattatgtgcccatcctccgggtaatggtagctcaagttcggattaagcggaacttaaattggaaaaatttcggaatcatttggtgacttttttttcaaaactgatccattccccttattcattgtacaaaggtggttcggttcatacatattcccaattgtaagagccccgaaaacccgtatcgaaacaaaaaaattttcagaaaaaagaaattaaaaaaaaaaaaaatttttttggcgtaatcaaatttgctaaaaaatgggtaatttacaatttcaattccattttcactcaattttttgcccaattttctgccgtccatccccatccaaatgcaacaccaatgtccacgtcgtggattgccatgtaatcgcaaccgacgcgttccgcctccaacgctccgatgtttatcgacgcggcgcggttgaagcgcggcgcgtcctcctccgattggttgaccgaagatgtaacggggtggtgggacgatggcctgggtggtgaccaagaaattgtgcaaaa

SEQ ID NO: 22967 - DNA, 2506 bp, Heterodera glycines
actaaaacactcgttgaattcgtttttcagacagacacccggactgggacaatcggactttgctcgaatggttctccgaaaagagatggaccgacgaagataattttccacccttttctgagaagcacttgcaaattattgaccaagccgttgccgaaatgaaactgctcattcgatatgcgcaactttttggcagtgatccgtcgcgcattgtcttccagccgtcgctggcacgcggcttggattactacacgggcatcatttttgaagttgtgatgaaaggtcacattatataactttaacggaaaggacaactgggcgttgaatgcacttcactttccccaagtcgtttctctactgaaaatgatctaatccgtgtttttggctataactcatttcaatgcccaaaatgaacgaatttagtatcatttgaaatctgagctttttcggccatcaaaatttcaattgtaaattatgttaaaaaataaaacctattattcacggaacaggacaaaattgcgccgccggaatttcgccggccgaattttaccgccaacatttttttaattcttgaaaattttcaagaaaaaatcttattgtaaggaaattttttagattttttctagaaaattcgtttaaaacttttttcctaagattttttttttcttgaaaaattgctattttaagtccaatatatctttttaagaattcggtggcgaaatttggggtgcgtccatttttcaatggtagtaaaaaatattgtttaaattggtatgttttagacagtgccggttcgttggcagttggttcagttgcggcagggggacgatatgacaaattggttggcatgttcacggacatgggcagaaataaggacgatggaggggtggcgacagccccaaagaagcggccggaagtgccatgtgttggcatttcgtttgggattgaacgacttttcaccataatggagctgaaggcacgcgcggattcggtaattaaggacgaacagtgcattttatcatgttccgacaattgcgccttggatatttgcgtccatcccaaaaatcggttacaaatgcatgtttttttcaatccgacatagcataataagccgaagtaacaggaaaaaattaatcataatttaaagctttttacaccactttttggattggtgtgttggtgcaaatgcggttaacccatttattccatcccccgaatgtcgttaattgttgcagaatgcggtgaaagtttcgcccactcaagtgtatgtggcatcggtttcggtagcaaaggaagagacagacaaaatgttggaacaacgaatgcgactgtgtgctcagctttggaatgcagagatccgtgcagaaactggttaaaattagctgttatatcggcagggtgatcatttttccatctatcgttagcatttccatggtatttcggcagcgccaactttgaaatgctataacttttctctctgttagtcgtctttagcaaactcatttaaatgtctgtcaattttccttttagttcggactttgcctttgaaatggccaccctgattgtcttacataaatcattttggttatttaggttataaggccaacgtaaaatttttacaacaaattaaattttgtgagactcaacaaatccggtggatgcttatcctcgggccggaagaaattgctaaaaattcggtaaaattgcgttacatcccggccaaagacaaaggagaggaggttcgattgggaattggaaagtaaacaatgtgtttttaattaagcttgtcacaatggacaaactgatcgatgttttgcgtgaaaaactggaaaacgatgatgaaaattaagaaaatgtgaagagtgaaaggcgcatttcccatttatatatgattgttgaattggatgttctatgttttcatttatattgtctcattgacgaacaaattgagcttgtttatatcatttgatagtattaaaaaacctttaaacgttcggttggctaattatgagccgtatttagtttctctattagcagaaaaaataatagtactatgaatttcgatcatgacgattaccatatgagctcatttttgtgtggaaaggttgtccttgaaaacgcaaaatcgtgatggtacgtcaaaaacaaatgcgttttaaaacgaatcctttttgtgctaaaattaatttcaaaataactggattaaatataaatgcaactctggatggtgcagggtcgttacttaaaaaccatcataatggaaatttaaaaattccctgtagaatagaatggccattgctctccgcgcccctctgcccatgctgggaacatttgtatggtacaaaatttctcgcaaaagagagatagccatttttctggcatagagaataaatttaaaaattccctgtacaatagaatggccattgctctctgcgcccctctgcccatgctgagaacattagtatggtacaaaatttctcgcaaaaaagagatagccatttttctg

SEQ ID NO: 22968 - DNA, 2071 bp, Heterodera glycines
acacccctattttcccagcgtcgctggtatgagcaaaaaaaaaaggtcgttcgggcgaagaattttcaaaaatacacccctaagaattgacttttcggatcggtacgggcgaagaattttcaaaaatacacccctaagaatcgggcgaaaaattttcaaaaatacaccccctaagaatcgggcgaaaaattttaaaaaatacacccctaagaattgacttttcggatcggtaccccccccaaagcccaaatcctggatacgtccctgggaacacgggaatttttcgacgattccttatttttactgacattttaaattaaataatattttttgttaatttgataaaatctacgaaacattaaattttgcttttcccaaatttttgtgctgattttactttttttttgtacttctttcatgcttattttataaaaatttcgtgcttaactaataaattaatttttattaaaaaattattcatgacagaattcaaagaaattctaaatttattaatcacagcaatgccgcaaatttgcataatatgatacaaattgtatttgagtcgattgctgtgtgccaaggaggcagaaaccgaaaaccccgctgatttagccttacagggtagtccgaattcaactagatctaaaataagcgaaaattatctagctttattaattcatattaattaatatcatctttaattcataattaaataaaaatagaaatttaatacatttacaaataattatcctttccgatttaccaattgcctttcgaagaacaacgacaagcctttttttcaacgagttttgttgccgtttgaacagtttttttcatttctgtggtattgcaaaaaagtttccaaatcactttgttgacacactgttcgctcgtataataatgcttatctttgtctaaaaggtgatttaatagaattcgatgctattaatcgaaaattcacttcttgtttcccaaaaatatttatcataaatcaattataaaattaccaaaaataatgagtaaaccctaaattccctccaattttagatttccgttcaattcacacaacagctccgcagctgtctggaaaatgcttgctctcagtagaattggagcagtattccacaatactttcatcagcaaaactttgcccatcaattgattcactattccgacatttaagtgctgaattaaaaaaaacaatttattaatgtaagatattctaataaattttcactgaactttcaaaccttttaaattggtagaaagtgcgaggatgtttataatataaaagtaatcatttgaccaaaaaaaaagaatattaggaagtttcttaagattaacaagctttacagaaaattagtcgtattttttatattaagtaacaaatttatgtccctagcacattgaaagtaaaagtaaatttttatctatacccaaatttttaaatgattttgaataatttattatgttaaattggtggtgaaatggaataaaagttaatcggaagtcggtgattcattgggaaagtgctagaattgtgtaataattaaaaaaacaaattaaaatttttcatttgttaatatttaataaatccatattactttttttttaaatttgtgaatggagatttaaaataaacaggaacagaatttaaaaaaccaagaatcaaaagataatgtcaagaataaggcttattacaggtctaatctgggttttattaattcagatattttaaacataataaaattatgacacaaaacagtaattacaacaaaaatttgacacataaaaaacaaacgtgttgccgtttgttttgtcaataaagcccatttttaattaattcaagaaaatttgattatctaatatactagtgtttgctccccgcccccgagctccccgaccccgatcccccgacttaaaaagttaatttcacaacaaaggggagaaaggttgaaaaatttttaaaattttaacaattttctttatattaattaattaaaaatccaaaaaacttttgggccggctcctatcggcacccccggcccccaaaaccccaaatttttttttt

SEQ ID NO: 22969 - DNA, 1348 bp, Heterodera glycines
  unsure (1)..(1348): unsure at all n locations
tagatttttggttccgatggttttcagaaaaaatccgtgtgcgaaaacaatatttcacatttcacttcataacttttttgagttcggcagggatcgagacagggataagaccattggaaagaacagctcgagctttacaagaagctatggaaagaaaaaatcgacatttcagggactttttcagaaatcatgtttaattccccaatggggccccattttgggtcctcatccacagccccatgcttctcccaattttaagtcttggatttgtcaaataaattaacgatttcgaattaataataaaaaattctattataaattttttttgtagaggggaaaattctgaaccaaactactatttgaaaacccaatcaaaactgggaaaaatttgaagtcaaaaaattattcgaatttctccaattttgtttccataatttccgaatgttattcggtatcataatgccaaaccaaaacgaattcgttttaaaatattcttttctggacttgacttggtttctcaatatcgaagcttttttctccgcaatttctaaaacgcttataccaaaccctagatttttggttccgatgggtttcagaaaaaatcccgtgtggtgaaaacatatttcacatttcacttcataactttttgagttctgcacggatcgagaccgggataagaccattggaaagagcagctcgagctctacaagaagctatggaaagaaaaaatcgacatttcagggactttttcagaaatcatatttaattccccaatggggccccattttgggtccccagccacagccccatgcttctcccaattgtggcgaaaacaatatttcacatttcacttcataactttttgagttcggcagggatcgagaccgggataagaccattggaaagaacagctcgagctttacaagaagatatggaaagaaaaaatcgacatttcagggactttttcagaaatcatgtttaattccccaatggggccccattttggttcctcagccacagccccatgcttctcccaattttaagtcttggatttgtcaaataaattaacgatttcgaattaataataaaaaattctattataaattttttttgtagaggggaaaattctgaaccaaactactatttgaaaacccaatcaaaactgggaaaaatttgaagtcaaaaaattattcgaatttctccaattttgtttccataatttccgaatgttattcggtatcataatgccaaaccaaaacgaattcgttttaaaatattcttttctggacttgacttggtttctcaatatcgaagcttttttctccgcaatttctanaacgcttatacc

SEQ ID NO: 22970 - DNA, 1568 bp, Heterodera glycines
  unsure (1)..(1568): unsure at all n locations
ttcctcaacaggaattgcgaatgcctttctctcatcctcgattcttcttccttgtttcgtcctcgagatctcttccnatctcttcacaatcaagagacacggcatcgaagtctctgttcatttctgaaatacatgtcacattagttatatcatttattattttcggtggttgttttgcccatttgtagtgatttggggaatttgccttaacaagcgccttattttgaggaagtccctttgcccaattataatgaatttgtttcacaaaactgtgttcctgttgtttaatgccagagtcagaattattggcattttcggctaactctaagggatataagtgcttaatagcacgttcaataattgatttttccgaaattctgactcttgcggttcgttgtgataaaatttcttctattttccccaatttccaacaatttcttggagtttgtggttcagaaatgatcaccacgtccccaagttttggtgcttttcctggcgtgtgtttgttcccttgatgacgttcccttagacccaataaataggaatctttccaattttgccaaaatttttcagccatattcattgccttctggtatctttgcactacattagcagtgtttgaattttccaaaatataatcattgtctgagttctcaacagatctagtgtttatttccaatctattgttaccaatgttgggtaaaattagatcaataggtcttaggggctgaataacttcagattgggaagtgtaagtgattggtctctcattgactattctctccacctctgaaaacaaagtccataattcctcaaaactgaggagtttatttcttatttccctttttaagtggtacttaacagtcccaatcatacgctcatattgccctcctctccaaggggcaaaaggcgaaataaaaacccattcaattttttgttgattcgaaaaattctgcacttcctcgtcctttaaaactttgagccaatgctccttctctttaatgctttgttgaacaatttcggttaaggctttgttgcctaacacgaagttagtgccattgtcagacacaattctctgaggaatcttccatcgtctgacaaatctcgtgaaggccaacaaaaatcttttcgcagtcatatccgtgactaattccaaatgaatcatcctcgtgagagcacatacgaatatcgcaccccaaactttatgtttgccttttccgtctgatgacttaacagtcattgggccgaaataatctaaaccaattgtttcccaaattaaattgccacttaccctgtatgacggcagcggaggagcttcaggatatacgtaagctttggcgtgaaaacgcgcgcagatccaacaacgagtattcggattgattctcagaactgagttcactttgcttcggactgaaggaatccaaaatttgcttctcaatgaagcaaccatattttccattcctgtatgtttcctttctcgatgaatgtccatgataattaaatccacaattggacaatttttattcaaatatagaggatgaatagcataatggtccatgccactattt

SEQ ID NO: 22971 - DNA, 496 bp, Heterodera glycines
aaaagcagggcagccaagtttttttttcaaaaaaaggacaaacgaggctaaaacaaagattttgaccccaaaaaaaagatttttttctaaaaccgatagtagcgcgaaggaaacgcaataaaaacatgaaaaatcgacttaaaacaacattttattagcgtaaaaacatggcctgtcaactgaaaattttcaaaatcagcattttgccgacaaaaaatcatcattctgtaaaatttattcaaaatttaaaaaatcgataaaaatgttttttttttgcggcgcgctttttacaaaaaaaaatttagagtatatgaggccggcggtgccgataggcgagaaatttttgtaatatttaaatgcgatttgctaacagattttgtctaaaaaatgacaaattttgcgatttttagccaggagacgcctttttttgttttaaaaaaacgctttttttgaggcgcgcttttttaaaaaaatttggagataggggggggggggg

SEQ ID NO: 22972 - DNA, 718 bp, Heterodera glycines
aaaaacacaaccttgatcaatgggatggaaatgcgcgccttggccaacttcggaacgcccttgcaaatggctcggtaacggtaaagcagggcgtcattttgcagttgggcctttatctccaactgcttgacctggctcctggttttgggtgtggcaccaaaaattattcgaattctcaaccgccccccccccgggcacttctcagtgacattaaatttgtttttgttcaaaactggcatttgctattcagtcaaatttcgactcacttggcgaaaacgatgacgccactgcagtttttgtccaacgaactgacgagaaacagccggtcaattttgggcgcaatgtgcttctttaggtcctgtgaaaattcaatagattttcttgttagaatacccgatgaaagggttcaattttccgaggtgtcagagtttcaaggccatagcctgacccttggatttgggggggggaaataaaaaatttggcgctatatggaaagtgggcctttttgaaaattttttcaaaaggagggacccttttgttttgcaaaattttttttgtgatagtcataaaaatttattctctggggtttttggggtccccgatcacgaatacttcaattattttgatcaattccgatttcctaatctaaatttgaacaaaaaatcataattttaaaaattcaaaatttcgatttttattcgagttcgggttagggatt

SEQ ID NO: 22973 - DNA, 2610 bp, Heterodera glycines
  unsure (1)..(2610): unsure at all n locations
aagttttattttaatatttaaattttcatttaatttatatatatatttttttttgtatttggaatacattgtcacntcactcgagttcgcgtgtccgcaggtcattagtcgtattttggccacttttcattacttgctgaacaacattgtcagataaaagaacagcttgaaattcctctggcatttccgttcgattaattcgtacaatattttcgtttggttcgccgttgttttgtttaggcaattttcgaggccgttcttctctggactgactttgttcattacccattctctgcataagtataagaaaattgagaaaaacagaaacttctgtaaaaacaatcacttataatgtcaaacattcggctatcaacggataaattttaagtgtttttttgcactcttttaggtactttcctgttttgaaggcacaccccaattttaaaaaatgttttaaaaaatggggtgtgcctaaacaggaaagtaccctcttttagaataaggggtcgaaaaacaaaacgttctaagttttgagttacaatcccgcagcgggatccgcaaatttgaacttacatctgaaagaattctttttttaaataatttttggcgaactgaaaaaaagggcagaggaattaattaagaactagcgcaggcgcgctcgcttcgctcgcgcacctcgcgctagccgagctttgaaaaaatttattatcttctctctctctctcacctctctttctttctccctctcctctttttctctctctctctcttcctcctcttttctatctctctcctcttctctccctccttttttctctctctctccttttttctttctctctctctctctcctcttctctccctcctcttttctctctctctctcctcttttctatctctctcctcttgtctctccttttttctttctctctctcctcttctctccctcctcttctctctctctctctctccattctctcctctctttctttctccctcttctctttttctctcttcctttctctcctcttctctctctctctcctctttctatctctctccttttttctttctctctctctctcctcttctctccctcctcttttctctctctccttttttctttctctctcctctgttctatctctctctctctctcctcttttctatctctctcccccctctctctcgcttctcttatttttatctctctctctcttatttgtctctgtctcattcactcccatactttctctctcttttttcctgtttctctaatcatttctctcctttactctccgctctttgttcctaactgtcttcatctctctctcttcttcactctttcttacaatacaacttatctctattatctctgttttttcacttcatttcttccatccaaataaaaacaatcgcgtcaaaactttatttaaattttttgtttactttgtgacacacacggcaaaattaatatatagaagattaaaaatgaaacgagagctcatggaagcgggtgacacaacgacaacggactcctcacaatcatcaatgagttataagcggcaaagaattgtaaaatttatttattttttaatttgtaactaattgtgccaatttatttttagcaacactcggaaagaatgccaataaaagcggaacagttggatgggatggccgccacaaatgcgcaaccacaaaattttgcagtccgacaacaaagtgccggaaaacggcgggcattagtacttttcaagattttttaaatttctttcaaaaaaggcgaggaaaactcaaagcaaatcaaaaaaagaaatacatgaatatttttctattacttcgataaaagaacgactaattttgaggatttttggcatttaaaaaatgcgataatttcgggtccagcgctgctgaagacaggcgacgtcatggaaaatattgaaattttaacacatggttcagttcatttcaaaattctgttctctaaaatccggggagtatagtgcaatgaaaatgccaaaaacttttggaatttttaattatgacatgaaaatttgcctttaaaatttaattttcacttaaatcctttatatattttttgaaattttatgagttgtaagttcagaaatttaataaaatctttgcgggtgggggggggggaggagaaacgacctgctccgttggaaagaattgaaaatttaacaaaaaaaagggtcacttttagtcccattaacccaattcctggtccatagtcaactcacgggaattaatcaaaattaacaaatttatctttaaaataataaactttttctaatttttccctaaaaaaaattttttttgtcaaagccctcggtttttaaaccaaaatgaaactaaaaatttatattttttaaattgtgtgataagttgtcctatttttagaatcgcgattttgctaccaaattggcatcaattacgctgaccagcggcgagctgtgccggttggacgcgctgttcggcggtgcggttggcacggaccagctggagcagttcaaacgtgccgtgtccggctgtctctgtcgcctgggacggcacaagaagaccaacgtaatgacgtggtcagaggttttt

SEQ ID NO: 22974 - DNA, 2400 bp, Heterodera glycines
gagagagagagcgagaaaaaaagcagaaaggagaggtgaatgagggagagggggagggggagcgagaagaaaagagagagaaaaatgagagagagagaggaggagggaaaaggtggagagagagagcgagagagaaaaaaagcagatagcagagacgaatgagggagagggggagggaaaaagaaaagagagagataaaatgagagagagaggagggggaaaagggtggagagagagagagcgagagagagggagagagagaaaaaaaagcagaaagtagagatgaatgaggcatagggggaaggggagcgagaaaaaaaagatagagacgaatgagagaaagagagagagtaaatatcggggctaggggcaggaaatccaacgcaacatttacccactctatcggcgccccccccgccctgcccctctcaacggcgaggcgtttctgcggcgattaagccccaccactccccttacatgttacatctgttggttggttggttgtacatgtacatttttggtgctatgacgaagcgaaaaaagtatgagtgtgggcgaagcgaaaaaagtatgagtatggggtgatcggagggggcgggtcatttcagtacggaagagttgttctaatgatcaattaattatttaaatttttaatctattaattagctttgttaccataattataatttcgattattattttaatatttcccaaacaaattgcatttttgtgagagaaatacagtgccacaaaaaattcttgactcaaacctgaaaaactatcttatagttcatttaaaaacttgaaataattcatgcatgtataacttttgatgctgatcaaaaaagtctcttacaccaatttgaccagatcactccttcctagtgaccgggacacccaaaatacactgaaaattggggaaattttcgaaatccatagtgggttaggaaattttttctagagaaaatgggcaattttggaaatatttttcaaattttcacggacaaacccgtactggaaaattccaatgaagtataagcacaccgtaataaaataaaattttcacaatttaatttctgacatatgtcattttttggcacttcaaagcaaaatttaacaggatgacaaaaatttggcaaaggctcgtccccgtaataaccggcttttctccaggcaaaattaatccatccattaaaacgttcggcttgaaactggttatggattaacgattgtaatttaataatgttatccctgtcgtgcaaatttattttcacatcataaatcattacaaattccgttatttttctggtaaattgcttccaaattctaaaactattttttattttatttttggcaacaaaactaccggaaaatgtaaacatccaatggttggcatattccagttgcatgttttgggatttgctttacttttaattaacattatccgggagtcgaaaatcattccaaccattccaactatccaccaacaataatgattgttctccagggcgtaaaactgggaccaaaacattgtgaacccaatcgatcattaaatttttggtcataatatcgtccgataaatggaattcttcatcaaatttattgcaattttcaatagttgcggcaaaatttttcgaaatattgatttcgacagaatttattggagtttcatcattattagggttgtaaattatatggattaacatattttttctgcgcatatgctatgaagaaaggggcttaaaaatagcattttttttttgatttggtgaaggtttttagtccatataaatccatattttgggggttttcgggaataaatccatatttcgccatttttgggtttttagtccatattttggccattttttggaaattttcacaagaaaaatgaaaaaaaaacgaaaaatacacccctaaagatcaactttttggaaatttttaaaaattacaccccacaaaacacgaaaaatttgagttttcgtcgtcattttggcattttcaataaatattttcgtcatttttttgcgaacatttctttttttttaatgagaattttttcgaaatttggcaaacttggaggtgtttttgatacaacgaacaacaataaaaaatatgcatttttatgttttaaaccccattttttggttgtttattgtactttttaggtttatttaagcaaatattaaatatgcacacctttttttgggatttttgggggtttacaacatatattttggcattttttatccatattttggtccatatttggccatttttggcctttttagtccatatttcgggcttttttagtccatatttaatgtccatatttcgcgttttttagtccatataatttacaaccctaatcattatatttgtaaaaatatttttttaaaa

SEQ ID NO: 22975 - DNA, 2388 bp, Heterodera glycines
  unsure (1)..(2388): unsure at all n locations
ttttcagaaaatacacccttaagaaatgaaaaattttctcaaaaattgatcgcctaatttcattttttttcttggataaaaaaatttctcggtnttaaaaattttcctttattcgaaaaaccattataaaaatatttaatacccatttaaatgaccaaaaattaagttttttggttaagttttacgtgttttgctcccctaaaaccttagaaaaaatttttttaaatgcctttttcgggattttcgtgctttttttcaattttttcgtgcctattatagtgtctttttcgcgatttttggtgcctttttttgcggtctctaataataatttcatttacaattgaaaatttttatgtgttttgctacctaaagtgttaacaaaaaattttatttgcctatttgaggatttttgtgcctattttgtggctttgttttcccagcctttttaggtgcttatttcgcgattttttgtgcctaaaaatggagtccctatttattatttcattgtatttaagaaacgagtcaattttaattaaaatgagataatattataatactaaagtaaattagtttctttattgcgctttttaaattttcaaaaagttgactcctaacagtttgtgtcatttgtattatttttatggcattgttttataatttcatttttctcataagagatctgaattgatgtaaggctatttttcaattaataaatagaaatgtcagagtaaaaagtggcaagaaaggcgaaataaagtttagatgatcaatcaaaacatatattaatgtgtggaaaatgtttgtgtgcggtgtatctttcatcatcgtcggtgttctttgattttcggttcaaaaatccaattaaaaaaatatttatttgctcggtacaccactcacttcctattcacggaaaaaaacaaaaatggagagggttttcgaaattggagaatgagattcaatagaaattagattgttgtccggaatcaaaagaaaagaaattgagtttgatgttgcattaaatggcgcataaagcaaagcgctccctaattatgttccagtgctttgtggtaaggcggcaaagtgaaacttccattcatcatgccaggttgcgtaacaggcaaaggcggagtggatggcattggcattatgggtggaggcggtcggcgtggtaggacttccagcacttgaatgtcttaaaaattacaatattatacctaattggaattataaagaaaaatgtgaataatcaaaggccatgaaatgcaattagcattgaatttcaattcaaaaaacaataaaaatttttgaaaaattttcagcgatttttttctaaaaatgttctaataatttttttttgaaaaaaaattcgaggggggaactgaagtgcacccaaatgttcatggcaacaacaaaccaaccatcatcatcgtcctcgtccatcgggatggtattatagttgtcattgctgtcgttgtactgattgttgacgaaaggagtagcagctgaagtgttgacaatgggaggagtcggtgccattgctgggtacagcaattggagatgaggcgccgggtcttcaataggggacgacacggtgcgggatgacctcttggacgggggctcgccgttgcacaaagccatgtcgcccttctcccgctcgacagcagcggaactcggcctaaatgaatgaacgcaacaattattatactattgttagcagactcgtatccaggaaaaagtttcgaggagctttttttttgctcttcgggccaaattttttttttgcaccagtgttatttttcttcaacgctggacggagccaaaaagcaggaaatagtagcggttttgcccgaaaaagcacaaattttgcatttttgggttcatgttttcaaaaaaaaaaattttactctccgggccaaacaatttttttttcaggaacaagttttccggacttttttccaaaattttgagccttgaacgaaaaacagtaatttctcgcaccaaaaaaatacattgttttgccatttttgggtctaattttttttattaaataatgattctatagagtccggtgatgccgataggcgacgccgggaaaattttttggaaatttcaatggattggcaaaaattaacccttctttctaatttatttaaagttgcaatttacactgtctgcaaagcccgttgttccagttggacagacagtttgttgatgtgttcgaccgcttccgaaagttcagtgtgtttatgtgcaatacgtttgacctgaaaattcatgattcagtgaggcttctatttctaactatataggtgtgttataactaagttatttttttaatatatatattaaaaaataatatttaaaaatgttaaattggttaaaagatct

SEQ ID NO: 22976 - DNA, 2302 bp, Heterodera glycines
  unsure (1)..(2302): unsure at all n locations
agtcgttgaagataaaaatcttatatnntcgcccgggtgttttatattccataatccttgcacttgatggatgtaaatttccgcgtcatattcagtttctgttgtgggaatccctgcttctcgaagaagaagatggactttttgcctcaaaactgtagtttgtctgtcactaatccaacgccatttgtctctagaaataatattacgtttatacaatgaataatagcgcattaattcaatggcataaaataggcaaaagttgtcattgttgttgattttaaaaatatgggcatatgatgaagaaggagggtgccctttgcctttgattgttcgttggcggtgaattcctccagcgttctccacgacgtaccacgaattggttgagcatcaagatcatgataactgcaaaagcatctaatccctgttctccttcatttttggcgctatcgctattctatcatccacggaattgtgacgtcaacttcaaaacatggacctttccggaacgagaatcatttttgacctagaccagagcatagagctagaatcttcttgactggatgaatcgtcgttagataccgagaccttcttaatgatgtcacgtctgctggaactcgttccggcccctgtccttcgtatcccattctgatcctttcgagttatgtgcctctcgattatatttaccaccttctttgaaaaattgctaccgcctctatgcaattcacttggctgcttcaaatgaaaaatcccatgaaaaattgagccctgagataataaacctcaaaacggagtaatctgttgctgttgctttcctcttcatccaattcgtcatattttgatgcaatgtctgggtccaaagccgcaaagcgcatcgtcctcgccttgacatcttgtcgtaaatcgcgatggtggctcatttggcacgaatatgaatggcaaattcaaattgaaacacgctgctaaaatgaaaaagaatacatgcgataattaaacacaccgtttcaaaaaacgagagatgaaccaataaatagagtgcagataaaaaacctctcattttggcgtactatttcgttatctctgttaatagaaaatcctaattcacttcgtgaactttttttcttggtgttaaaacagggttcggatctgtccttatttataagatttgtccttatttcgggctattgttcttattttgttcttatttcttaaatatattcataatttggaaatttatggccaaatgttcttattttacctataaatttaaaaaaattttccccggcggcgcctatcggcgccaccggacgccccagtccaacctccaaaatttcttggaaaaatgcgccgtaaaaaatttattaaaagtttcattttttttagataaaaattgcactaaagttgctatttttctcaccaaaattgttaaaaataatcatgggaggtgaaaaatataatatttgatacatttttgatcgaataaattgtaaaaatatctgatttgaagcaattttgcgaaatgttcttatttttgaccataaaatcttattttttggccttaatgttcttattttgaaaaaatttcgatccgaaccctgtgttaaaagcgcttcaaattttgcatgccagtagagaaaaatataacacattcagtaatacagtcattttatgttttatacactttttcatgagttattcaaaaacaaaattagaaaaagcttctcctcttcaagagctttcaaatgatgccaaatttgtccaatttggggcaatcgcctagatcattggtcccgaaattttttatttaaattttttctgaaaattcttataacacatttctaggggtgttttgaggcgctgacaatgagcacgaatccggcttccatttcgacctatttgtaaaatcagatccgaattcgaacagagtcgaaatttagaatttttcgatttcgatttaagccgctgaatgaccatcggttccttacttaatcatggctttatagcaaattcaattaaaatgccaaagaaaggcgttttgtgccgcgtacgggcggcggcctgtgcgggacacgttggacggccgcggaggaggcttttcttaaagtttgtgcgcgaagaagcatcggttccttacttaatttgcacagaggtcgattgccggggagttcgggcaggacaaggcgcggctggccaagttggcggcggtcttcacggccgagggcaagaagaaggggtggtccccccggagcctgtagagcattaagaagaaggcgcagcgcctgatttgccatgtgcggtatgagag

SEQ ID NO: 22977 - DNA, 1109 bp, Heterodera glycines
ccccctctgtgccgttgccatgctgtgcgcatggctttgctcacgatgactgtgatccaattgacgtgtcaaacaccgacccaaattatgggtacaaatacggacttatgctttgtcaacatgtctaaataaatttaaaattaatttttaagttaattttatttagttttattgaattttatttttttatttaaaatcttttaattatttttttattttaaaagttcttttttaattattattttttatttcctcacctttcagtccgtttcgtatcagctgcgtccctttcgcgcgtagtttggctgcaccgcatgaaaactgcgcattgggcccacgagagcaggcaaatttggtgtcaagctttttggacgccagtcaaatttacggtaattggagaaaaaagaataaaattattattttaattacttaattaaaaagccttataaatttttgttccaccataacaattataaattaacttaaaggaaagtgtaaagttctgttctcattttctttattttaggatcttttccggaaactctcggcaaattgctggccacgggcgattcgggaaaattgttgaactcaaaagtggccggagagaacgactatttaccattggcaagttttttcaaattacgaaaacttatatatgtatggcctaaagggtccaaaaatgttttatttgcaaaatcccctgggttcgactccgtcattaattaaattttaaattattttcttaacccccccccccccgcccaattttaggacccgcaaggtgaccactactgccaatcggagaatgggcggcgtaaatgctttcttagcggcagtgccgacgtgaatttgttgcccggcatcgcccttttgcacaccgtttggaaccgacagcacaacacagtgacggagaagctcacagtgagtcagaagaggggccggacagctcgagaacaaattcggacaaggattccatcgcactaaaaccagctttttggggacaaaaaacatacctttgccatttgtgacttacaaatggacaaattcaaaagtttgcttttcaaaaacaacgttgttggaatttaacaccaaaagagcaattatctttt

SEQ ID NO: 22978 - DNA, 1085 bp, Heterodera glycines
  unsure (1)..(1085): unsure at all n locations
gaatcgctgatcaggtgactaaanataattgtttaatgatttgaaaatttaaattatcactgacactttcgcctgccctttcagagaattggtcaaccaacccgttgaacggcccgggctgaagctgaacgaacagttccgaggcggctttttgcgctcaaaggtgtcgggcagcaacactttgctgggcttggatttggcagcgattgtactgaagcgcgagagggagcacggcttggcaccgtacaacgcaatgcggggacagtgcggattggccaaggtgatcagagcagtaatgatcagtcaaataatcgaaattaaacgtcgtccttaatttattggccttggtttgattttggcttgacataaaaccgaatgggaagattctcaacacagaatgccaaaaagagaatatctttctcccacttattttaagtcatggcttttgctttttgaattcaatggctttatgtcctttcgttgtatccgatttaagtgatcggatggattccacttctaatcactctcggggaaatgccttgcaaaagggtctgaaaaataaatttaaaaaatatttgcagttcaattcgttctccgatctgcgcaccgaactcatcaacaaaacagtagctgatcggctggcgacactttacgagcacgtggacgacattgacctgctggtcggagtgctggcagaacagcctcgcaaaggcgcttttgtggtacagacaaaacaagccaagcaattagcaaatgcggatttaataattaatgaccccgtcattttcaatttagcatttggcaattattcaattttagtaatacaaagtgtagcggttagtttttttaaaaagtaaaattaattagaaaatgagcaaatgggaatttaaccgagagtgtctgcccggattagagttccgttctcaattccttagaattttcgatctgagcacccatccgtgacagattttgcttgatcagagccaaaatctttacgaatttaaacattaatgcgctttttgctttccagggaccgaccctggcttgtataatcggtcgacaatttcaaaaggttttccaaagtt

SEQ ID NO: 22979 - DNA, 1658 bp, Heterodera glycines
  unsure (1)..(1658): unsure at all n locations
atcatcacaaaaattgccatttttgacgaaagtctgtcaataaatcacacccaaattttcaaaattacccggcaccggaccctcctgttcccaaaaattaacattacaacctttcaatctttggactcttctgccaaatgaagacgcttccagcttcatgaaagacttgattagtgctaaatttatgcaaatagttaatagggctttgcccatttttaatttttcatcagatgtttttccgcccttcaaattttgagttgctgcccccaccctttgttggatgagaaacgatctttatttttaaaaaattgaaaattcagtttaatctttttccattacgactacgtatttttccattttagccattatttatttaaattttcgattttttcccgccattattcggtagattccagacgtaatattttttttatagaccgattttcgtgttggtccattccatgctgccaatttcaccatgggttgatgctcgctgttcgaattcacccaacgagtgaagcaaaatggcgattttttcgacggtgttctcttcgtacggttcacatttggccatcatttgattgatgtactatgtataatttaaaaaaaaatttagcaaaaatcgaaaatacctacagtatgccaaggggttcaaaatttctccagtgtgtaaaaaacaataaattaatatattgattaaaactaaaagttctattaaaaatttttattttgtaatttttgacccatggaattttggaaaaattgtagattaaaaaattacagatcctcaaaaaaataacaattgattttttctgatttaacatcaaaatgatcttagggctcatattcaatttaataaacataccttaatgccatctattggttttgacacctcggatttacagtactttgtaaacgttttccagtcagcttcagcacagcagccgtgtggatcaagaatatagatgaagtatggcttgattctgtcgataatcatttgtacattctaaaataaaataactattcttagctatgaataatttaaatgactttcaagtagagtgcagcgggaccgtggctggtacggtaaatacgaggtttctaggttcggatcccggaaattttgaaaagcccggtttttgaattacgtataaaaatgaatttctcgaaatatttcagtttattgaaatttaaaaataactaaaatgacacattttagtaaaaataaaaaaaatcattcatttacatctgactcaaaatatttatattttctaaatttggataaaatcagagttttattttgtaaaaatacatgaaaaaggtaaaggccaacatccaaatcaaaaaatttagtatattagaatatatctattaacaatttcggagtaagcttccaaaaattttgcgcaattttccaataaatttctttttacaaaaattcccggtaccgctgccctctacttttacgtaagtcctaagctagaatttttcaaaataaaaatacttaatatattttttattaaataaaaaacattctacttctaaataagccaggtcaagtgtcagagcagcaatcttttcagcagctttttgaacatgcacatccatctgaatcaaangcggttgttcatcgaattgttcagcagggcgattgcttg

SEQ ID NO: 22980 - DNA, 973 bp, Heterodera glycines
  unsure (1)..(973): unsure at all n locations
aaaaaaatagtgaaaaactttaaatcttgccctactcatgatatttatcaataaatcaatcttgtacnntcacaggaaaacccaatttttaaccgatgtggcaatcaatgacccgatcggggcccggtgagttttagcattgtcgcagttaacgctgcgactttgttgaactccttcagcaggtncaacgcatggtcccgacgcagtcgccagtgccgccgacaagtcctttacttgcgatataactaaaaaacacaaanaatttgcttaaagatatttaatttttatttattttaaatattccatcgatgaaaagcccccacataaatggactgccaaaaagagaaatttaagaaaattgagtgccaaaagggaaaagccaagaaaaaggaaggcaagcaaaacgtgcaaaataagctaaaactagggcaaaataattaagtttattttgcttaattttgaatttcaacgcaagagccaaccaaaaacagtgagaattaataaattaatattaccatccagacgcccaaaatgtacggtaattagcaggagcaatgcagcgaagatgatctggaaagtttacaaattgaggagaaggttcttggccctggcagaatcatttttgaaaatctctggtaaaaactattttcccctgattttgaatgccactcaaaaaatcctacaggtttcatgctgatggagctgcgcacagccaaacagcagcagatcaaccttttcgcgattaaggaataaatgcccttaaacggatttaaattaaatttaaaacattattaaattcccgattaaatatttttatcattacacatactgagatttggcattaaatagaaaatattttgtgaatctgaatcatttggggaaaatgcgagtaagaagatattcttggaatcacaggactaatgatcgacagggggagcttctacaaagccgtcactcttctacaaatcggcga

SEQ ID NO: 22981 - DNA, 1630 bp, Heterodera glycines
aaacataacaaaacattatcatcatcatcatgatttgtgcagaatgagccacatttggaaaataatcttgtgatagcgcacaaagtaattaattaataattcactgaattattaggtgttttatgaatttcatcatcattatcttgtaaatcatccttacggaaaataatcttgtgatttttgtgcattttttatttttatgattaaaaataattaaatgggccggaaattgtttgaaattgcaaaattagttgttaaaatttgtttaaatttgcaaaacacaccttacatcatccacacttaatccatgacgaaattattaagggcaaacaataaaatggcatatttaagctgagaattttgtaatcatttcatttcaattaaaaaactattaaaaatattttattttgaataaaacaactattatatatttcacaaaaaatcagtccaatccattttattatatagagcaaacatttttattggttttgcattatttattttggaaacaaaatatattttttgcaaatccactttaataaaattaaaagaattcaattaataatttattccttagaaatttcaaaattttccgttccctcaattctcttttacggatttaaatgcttcccatggcgcgctacccattttcaccagcaatggcatctcgctccaggctaacacttttaagctggtgaattgactccaattttggttgagacggcaaatttttcataaagccagggtcccggtagtcgtgttgggtcgtttctaagtgcattttcttaatacctgctggttggactcgatacccggaaccgagaaatttatttttttgcggattttttcaaataaattaaagctgagctttttaaacgatcaattctatctctttctttttgggatataagagagagagagagagaggaagagatagagaatgaaaaaaaaagaaaagaaggagaaagagccagcgataaaaaaaaagtgagagagagagactgcgagagactgagactgtgataaagagagggagaaaaagggaaacaaaaagacagagttatatcgattaaaagaaagaatagagaaaggttattaaagcatatatcatcattttgacaaaaattacaaaaaaccccactaatttaaaaattttgccgagattttcccttgtaaaaactgaagagccgatctcgagttaaaaacttaagttccataaaataaacttggaatcgctagagggggtcaaaatataggcctatacaaaatttcaagaaatttaaacaataggaaaaaattttttacaaggctaaaaattttacaaaattacattcattttcaaggtgcaaatggtactaacacgcaaaaaactgaaaaaataataaattgagtaattctggagtagaagcaagaagaaagcggaaggaatggcgccaggatcgggctcaaaaaggcggttcaacaccaaaaagtgatgaaattttgataaaaatttcatttcaattaaaaatcaagtttttacaggtcctcgacaaaccacagaagctccatcaacaaccggagagggaacatcgaccgagacaatgccatcgacttcgaatgctgagccccgtaagtgcaaaaatcacaa

SEQ ID NO: 22982 - DNA, 1259 bp, Heterodera glycines
aacaattttcgctaagagaaaaatggtgatttgcctttctctacccgggacaatcgcatcgattgcacagcgatccccttgccaaattcatgcgataaaacatgcaaaaatgataaaaaccccaattaaaaataatattttgattttaaatttatactattttaacaaaatattataaaaaaagaatgaaaacacaaaatttaaaaaaaaacaatttttcgttaatttaattcatttgatttgatcataaataagcaaaattatgcataaagtgattataatatattttttaattaaaatccaatttaaatagtccaggaattaacaatgcctctaatggtcgtacaaattttgacacaaattggtccatcaccttcttctgttgttgaaaatcagatgaaaatgattcaatagacatatttacgaaaatgcttaaagagatgaaattaaaaaaacggaaattacaaaattaataattaaataaagcattataataaaaaaatttaaatataactttttatgataggaaaagagaaagaaatatgatgaattcattaaattcacaaatctttctattaaaatatcaaataaaaatatatactttttgaaacgtaaaataataaattattttaattaaatataattattaaaatgctaaaaaaattgtttttaaattattttccaaatggatttgtgtggtggtgtgaataacagaagttcaatcaaactcataaaattggcgacgatttgaatggacgacaaaacgataagaatcgacgactcttcaagaatggagagagaacaaataaacattgagaacaaataaatatacacattaatattataatttgtacgcacaaaatcttgtacataatgtaacaataataaggaataaattataatttttttaaattaattaataattaaatgaaaatctttttataagaaaaaatgaatatttattgtatcaatttactaaattaaatattcaaaaaaggaaattttattttctttgtttaatagatggttgctttcattaaaaattattaattacggatatgcggaaagaaaggattcatttgttttaaaccggctttgactgaggcggcgacaattttataaattgatagccatgggaaaacaaaactttatttttatttttaaattttaaatatgtgtaatgcactgtaaacaaaaactactaaacaaagcctacacattaattgatgatgactcactcccaattttcattatttcat

SEQ ID NO: 22983 - DNA, 1671 bp, Heterodera glycines
  unsure (1)..(1671): unsure at all n locations
tagacttagtttttcataatactntgctaaattttctttgcattttcatactgtttttcctttttttctcaaattccctaaaaggaaaatttctgaccgcaaaacaaaaataacaaagaaaagaatatttattttttattatttagcttgtttttaagtaggggtacgatttctagtgatttaactatttttttgcgcaattattgtgaagaaaggagctcaaaaaaacgtatttctgctttaaaatttttcgtttgaacgtcagttctcgtcacgaatttaatttaatattgtgaattttttaattaatttctattgaaaattcatctgcaaaaaaaacatgagaaaaaatcaaatgattgatttgatggttttttgtgtaatttcctttcttttgaatttttgtcccgtttcgaggtttcaatattgaataatttcgttaaaaaatgacattcgttttgcccaatatcgaattattaaccccaaatcgaacaatttgaaattttaattattcattcctatactgggttcttcaaaattccaaggtgaatgtaagattatattgtctcttttttaaataaggtcggcgtttctgaagcggtgaatctgggaaaaatatttgaatttttatgcaaccttaacagctttttgtgccggtgtctaaagcaaatggttttgcagcttcgtcgtttctcagtttcagttccggttcttctctatcttcacgttcgaatattctaacttggtatattgagatggctcgcattggccaatccgtctatccggatactgtacattcggattccaatagcataaattgatgtcatttttttttaatttttcacattcttcccgtgttgtgagtttgttacattttgcagccgctttattgtattctttcagtttgttttcctttctttgcccatcatcatcgccaccagcgccatgggaagaagaacccttttttcggttgtcatcatttttgtctgtcattaagcaaaatcaattaagcattgaataaaaaatgatcatgaattacatgcacattttcacaatttagttatgattagagaccgcattttgaggcataggctttttttctgtgcactagttcctaatagagaccggcgcgggaccggatcccgcgcgggattttgcgggatcccagtccgcaatcccgcattttttggaaaatgcgggatttgcgggattaatcccgccggatccgctaccgcaaaaaattttgagtcccagtcccgcagcgggatccgctaatttgactttttgtgcgggattctgcgggattttattgattttaaaacgcagtttacacttggttttaggcttctacgttgacttttattacatatgctttttttgcctttttcgggattttcgtgccttaaatgccttttttggcattttgccgttttggtgcattttttttgcgttttcccgaaaaattccattaaaaatgcaataaaatcgggaaaatacaccccttagaaatgagctaaaaattttcagaaaatacatccctaagaatttaaaaattctgccaaaaattgattgccaaaatttcatttttttgataaaaaatttaggtttaaaatttttcttattcgaaaaaaattatataaaacaatttgggggtaataatcaaatgggggg

SEQ ID NO: 22984 - DNA, 2410 bp, Heterodera glycines
  unsure (1)..(2410): unsure at all n locations
ggaaaactgctggctggcacgggaccatgttttttactgcttctttcacaaattctcactttcctcanngttgattttctgagttgaaatttcgatggatgtaccgtcccatccacttttgttttttcggttgattgcttctaataatctattggattaaaatattttccatcttttttctttggcggaatttcgaatcattttggcttaggccgaattttgacgggcaaagaacgcattttattatcatattgaaaaaaagaaaaccttcgaatgcgtgcgacacgcgacttttcaattcacctgccttttttaattgccttttcttttttgtactttaaaaactgaacacctgggcccggtcaataagaaggtggttaaatgaccgggtcaaatgaccatggttacttgacctggtcgaatgaccacgaagttggtgctaaaccgcatcaataagaaaatgaccacgaagtgccgttttgactaccaacactatcttcttattgacccgggtcatttaactacatgcaattttggggcagattcacataaaaattttgttttttttcttctatttatgtgataatgagggatacgtggtcctattagagggataaaattaatttataattagtttattttaaagaattttaaaaaatgtttaaattggctcaaaaattaccactattgattatcgagaaaaattattttatggaggtgtttttggttaattctttgttattttcgtaaaaattatttgtctctcgaaattttttttgtcgagttttgactacctttgtaaaaagtggttttaaaaatacttaacattaagataaattttttattttggtatcagaagaaagagcacacttcaatctataagaatcttatttttgtttatttttatctcacaattttccgtgtcaaaaggctcatggtaaatatggcaaccatgggtaggatggtggtagcatttctaaccaccaactcccgtcaaatgaccatgaactacgttcttattgacagggtaaaaaagagggtcatggtcatggttaaataaccaccaacttcgtggttgtttgaccaaagttcgtggtagctcttgttgaccgaggtttaccaccaacttcatggttatttaaccattaccaccttcttattgaccgggccctgatttttcactattttaaacaaatgcccccccggcctttttttaaattaaaaattgtgcttttaggcatcgctaaattaaattggactaaaatggctgtccggaatttgtaatgaactgagatggaaccaattttgaatttaaaaaaccgaatcggtttcatctcacaaaatttgtatatttctttaattatcgaaacccttctctgaatagcgctcatttccgagacgatgacgccaaactgtctgtgattcatttgcgagtcgaaaaacagtttagcggcgaagatcaaaataatgcccgggcttaggactgccacccaaatgttatgcgccacatgcaaccnccggtcatactgtaattggtacagtaacttgaatcaaaagctttttttctccctgtccctgtcgatggaagaagacctgtgcttctcgtcagtacggtagcccgcgaatgggttgtaaaaagaaccaaaataaacgctactgtaaacagccggacgaaggaaaaaagcncaatagaaagcgtagagggaacaagccaaattccacaacaatgttctgtggccagcgaacaaaaagtttgaaaaacggggcgagaagaagtcgagacatcggttgaacgccaaaatctatcaacaaaatgacaaaatatgtcttatttatttgtaattttaaatataaaaaatataatgaaaattattgtatttttttgtttttaatttattttatttgaaaagataaatttgattaaaatttagcctaccaaatcagcagtgctttcagccatccaaagggctaaaataattataaaaataaaggagaaaacattattaaataaaatattactaaatttaaatccacttaattttcgatagaaatccctgaccccgagctctcatccccaattcccgacctttttcggtaccttggttcaaaaaactgataatttacttagattttcaacttgtccgaaaattccttaattttggtgagagtttagaaatttaaaaaaagttttgtgcaaaagagggttaggaaaaccaataccaagaccggtagcaaaaactttcatcagtggaaaaggggttaatcagaaaaaacgaactggataaatacgcattttggtgtttattgtcagaaaagctttttttagggtttttagtcaaaatttaaattttaacctaataatggcaaattttcccgagctccctgttattctacctgggaccgcggaccg

SEQ ID NO: 22985 - DNA, 1635 bp, Heterodera glycines
aatatgtgttccataaaattgatggaaaattatttttggatcttaaaaaagtcatgataatatgcataagcggaagttcagaatgcttgcgaatcgtaaatccttcaggcatgccgcgtttcatttgtgtaataaggggcggcgttgcttcggaagtgagggtatgcatacaaacgtggaaacgtcgctaaatagaaatgagtgctgcaattaatagatattttaatatgcaaaaatattttttttatttataaccgagttatttgcacgtgtccatgcgactccccaattgctctggtggtgccttctggccatgtgttgatgtgaaggtgaaagttatgacggctgttgatgaaaaaggacccaaatcactgactatttaacaacttaaaaaatctatatatataaagatgaatgaggctatgtatgtgtctggcgttttgtaattgttttgcgttataaatgaatttgaaaaaaagaaatgtttggttttcgtttttacatatttgtttgtcagtttttgatttttgcaaaagcacagttaaaaatttctttttttttgtttcttatattcatagtttctattgttttgttattagcatatgaaaagtttttgtttctgtttatgtaaaagattaaggaaaagaacagcgtagctttttgttttagtttttctaattttcggatatgattgtatggttgttatttttagtcttcgtttgtttggttttttagttttgtattctttgcatgaaagaagaagttgatgttgttatttgtctatttacatgcattgttttctgttgttgtataatttttgtaatttagctattctgccgcttcggcaatatttttttttgtgatgactgcaggtcagccatcattcaacagcatgctcagactgagtctaaatgcttcatgaaagtttgctgggatgacattgtttgggatttttttttggctttgctgtttctattaagaatatttaatttagaaaagaaatccaatagatgaagaaaggacttattgtatgaacgtgttggattacaattggatgtgatttcattgcgtagttttggaagccattgacttttttcttactctcgaggaatgcactatttcagctttggatggtcgatcatttgtaagtgggttgggaagcgttatgatcagaatttgtttaatattttagcgaattagtgtctgttctgtgactttagtgtgtcatgtctttgataaaacattagtgtttgttgtttgagtttagtgtgacacaattatgtgtgtcatgtctttgataaaacattagtggtttgttctgtgattttcgtgtgagacactaatgtgtgtcatgcttttgataaaacattagtggtttgttctgtgattttcgtgtgagacactaatgtgtgtcgtgcttttgataaaacattagtggtttgttctgtgattttcgtgtgagacactaatgtgtgtcgtgcttttgataaaacattagtggtttgttctgtgactttagtgtgagacactaatgggtgtcatggttttgataaaacattagtggtttggtctgtggctttagtgggagacactaatgggtggcatggttttgataaaacattagtggtttggtct

SEQ ID NO: 22986 - DNA, 1917 bp, Heterodera glycines
  unsure (1)..(1917): unsure at all n locations
tccccccccccccgactgactctcaatgggccgggagagagaggaaaggaggaggggggagagttgttgtcgagactctcgagctttttttcagtcgctttctggccttttcacgcctttctcatgcaaaaaaattctggacataagccaattttgtggccttggcagggatgagagggggatgaaactaaaaatatcgacggaatggatgcttaatggcatagccaaggccaagaaaatttacgccaagaaatttcccagagtcgagaccggacgatggatggagcttggggatcggatctttttgagcggggctgaggctaaaatttccgcgaaaaattctaaaaaatttatctaagtcaaaggggtgagccttaaaatgcccccccccccccgaggtttgaaagcgtcagagttaaattgagtgggggctaagaacttacattttgcgctaaaattttttttgtttggccaagtgccctcatggaacccgcttaaataatgccacccgtctccatcgtttttgcctgccgattgttttgccgttcgtttaacggaaaattgagcaaataaaatcttttcctcctcacgggacacggacggcttaaaatttgatcacttttaagcttttgttcgtgggcggaaaatggcagcgaaaaacgctgatttaattttagtttgcttctgcttaaatgcagcaaaatgttatggcaaaattataaataagtttgtagtgttttatatgttgttgttgctgtttgcatttgagatcagttaaattgcttttgatttgatcaaaaaaatagaaaaaatattttatgtttattaatatgttgggaatttttagtggcaaaaaatcccaaaaaattaaataaaaatgctaaaaaaggcaaaaatagtggcgaaaaattgcttaataataaaaagttttaaatccatgcttttttctcaaggaaatgtacaaaaaaaacgcaaaaaattatcaaacggatgagattggatgcgacaacaatgtcgccaaagcgactaagaaagtggagaaaaagaagaaatgatggaaatgagggaaaaagagagagagagagagagagaaatagaaggaaattgaggaagagaaatttaattgagttaatttggataattttgaataattgtgatcaattttatatttctgtgatatttccgtgtttaatatgtgatttctgtgcttagtattagtcactctttcttgttgtttgtcgctctgctaaaattgctccacctacgctttctctctccatataagcatccgcgttttctcacatctcactcacatctttatattatatttattaaataaacttcttttatttattcggaatttattccccccttaattcctcccgcactctctcccattttgcccttgccaaattgccccccctttgccgtccgagccaacgccatattaccaattttttgttgttgaattagagtctttttaaaattttcatggcattttctaagtctaagtcttacctcaaaactcggcgacacgtacagctccaattgttgccggtagtaattgcattggcgtgctgccctattttcatctaccagatggccaagtgcgacttcgttgcgcaaccaatggaaaaatttgacaagcgcagccgagtcgcggatctaataaaaacgaaaatttttaaaatgagggtaagtcatttcatcccaaactcattaaaaaattttctcaccgaatttttaaaaaaatttcaaatgaagattttcgaaaaattgaaatattttgagcgattttttcaaaattatgatggatttacttagtttttttcataaaactttcagaaaaaatgatanagacatttttttgattttttcttangaattntctttttttanaaaaaaattatttttttt

SEQ ID NO: 22987 - DNA, 1881 bp, Heterodera glycines
  unsure (1)..(1881): unsure at all n locations
agtaggattttccattttgccatattaccactatatttttatcacctgtgaatttttaccatttgattgattattttntaatcatttttttattacgatattcattttgtattttttatttgaccaactttatttgttgttttctttttggcaccatataagagcactcatgtgcctttggtttgctcgataaataaataaataaaaaaataaagaacgtaaaaaaaggcccaaaaatcccgaaaaaggcacgaaaaaaaggatttcaaatttttttataaggattttaaggagcaaaatatgtaaaacttaatcaaaaaacttaatttggcatatgtctcaaaatacgttctgtaattatgagtaatttcaatttaattattcaaaatttatatttttcaagttgatttttactcaaaaaaattatttcaaaaaaacccgtgtacgggcccgtgttattcttgaacacgggtttcacgggcacacgggttttccgggtttttagcccgtgagcccgtaacccgtgtcggtgccaagcccgtagcccgtgcccgtgtattgtgaaaattccgatctctagtcaaaatgaccagatttttgggttcggattcgaattctctatggcaaacttttttgcttagggatttacgaaaaaaaacgtaaattttaaagaaccagaaaaataagtactgatcctggttggagttgcgagtgctgatttcctccggtcattaaacataattatattttatttattgtttcccgccgattaagtgcgttcccggcgccttccaacagcttaactgatgacaatttgatggtgaaaattggtgacaaaaaggtgaaaaacagaaagagcacaatgcattcctcactgccccaatttatttaaataagacagatcactgataaaattgggcattcctatgctaagattgttaatccatcccgatcagatcactaataaatcttggtcagaccactagtgaagcccggtcaggtcactgttaattaattttgctgatcagatggctgtgtccgcccattggctgtcgtccgtttccccggtgatcagtcgcatgctcagcgtggagatgaaggagaagcagcagcgaatgatcactttggacgaattgggcgtggacatggaccaattcattgaatttttggaggccatcacttatcagaacggaccttttctgccaaaccgtaattcattgatactgtatttattctactatatcccctgaggggtttaaaatatgatttttttaatattgattcccaatttttagccaaaaatgtggtgatgctgctcaaattggccgactatttccaggtgcgtcctctgggccgcttcagcgcaaacgctctttttttcttttttaaattgctttttaaaaattattatttgaaacgaattttaaatttttaacaattgttattggcttcataaaaaaccatgatatctttctttaaattaaaaacgctttggttttggtttcggttttaaaacctacttacgatacccgcggcgagaacgcaccaaagcattgggtatcattggagctgaggagttatatgatggttaaagggatcaattatatcccgccccatcatacgctgtatcctcctctttaatacagcgattaacttaccattttttgctccaattggtttttgttaaataagaaagggacaaaaaaaaagaagagagcaaaggttcgagtccattgtgctgcatgaaatgtctattacttttttgtcaaaaaaattaaaaaaatacattttcggaaataatttttaatctttttgccaactaaattgaaagatcttggtatgaatcgaaagctcttgatgaaaagaagcttttctaagcaa

SEQ ID NO: 22988 - DNA, 958 bp, Heterodera glycines
  unsure (1)..(958): unsure at all n locations
ttgaaaaatatgagtttttaaaactcccatttttaacttccaaaatttgggttggatttcgtttccctaaatttaataagaccagaattccgtaagtaaaaaattttttgtgcctccaaagcctaccctgagacctatcgtaatttttatgctattttttgcttgattatattccttttaaatgcattatttatgtgtttgataatatatagattatattttaatgaaattaaaggagcataaagaatcaattgacaacaacaaaatggtgggacaagaacagcaggacgaacagcgattgaccaacggaccaacggagccggagaaggaaataaccgatttgaaagcaaccggttggctcaataattaattttaaaatgaaagcaccaaatttttaaaataagccataagaaaacttaaaaagagggatttttgaaaataaaaagttgaattggtaaaatttcaacttactaataagagaattggcttctggactgacgcacaacagctgatgggacaattcggctgacggacaaatcagccgtagaatgaaatttttatttatataatttttatgaattctcataaagctgagttgtccatcagccgaattatccatcagctgagttatctgtcagctgagttgtccccagctgactgatcctgtcgcgcgagaactcattaattttttaattgaaattataattttgaatgaaaattgcttcaaagatttgcttccacataatctgactggatgggacaacactcagcaattcttggaggcaatgcaccaaattttactgaattacattcgggaagagaacgaccgttccacganaggtaaaattggtgccaatttgtttttttgctaatctattttatttatttanattaatttaaaatgatttagtgcttgattttcaccaacccgaacaantggcacaactcattgacctgc

SEQ ID NO: 22989 - DNA, 1496 bp, Heterodera glycines
  unsure (1)..(1496): unsure at all n locations
aattggttttatttatacaagaaattacattaaaaaatttttaattctaaggacatccgcgcttctttaaccaaatntcgtgcggattggacattgtggcaatggcaggcgaatggctcacggcaacatgcaacacgaatatgtacgataatattttttttaatttatgaaaaataaagataaaaaatgtgtgattatcctttttttacagtatttttttattaacttaaaataataatcactaaaattctttgagaagagataaagtcgttttcgttcttaaatacattcaaatgatgccattcaaaattaaggttcacctacgaaattgcacctgtgttcagtctgatggagaaagaagttacgaagagaatggtaattttcatatttttttaaccagtttaaacatttattgattcaaggggatctgattggagaatttctcaaggccaatcaatgataaattcaggtggaactgatcggctggcaggggggcggtgatgccatcttttcgcccggcggtgccatcgccaatatgtacgcgatgaacgcggcacgccacttccattttccgcgtgcgaagccgctcggcatgacagccggattgcccaccctttgctgcttcacctccgaagatgtgggggatttaggcattattttagcaaaaataaacaattatcaattttgtgggatttataacagtatagaaattaataaactagtgtacattaattaattaactttcagagtcattattccatcaaaagtgccgcagctgtgctcggcattggcgcagacaattggtaaaattgtttttccaatgataccaattttgtctaggtttaaccattttaaaagttaggagtgccacatttattcattttccagcattgaacgggttcaaaaaaaggggtttaaaagcgttgctgcattttttgctttttctatcattttagcacctaagaaaacctacaaaagtgattttgtgtgttgttggctcagtgccttttgtcccatatttacctcaaaaaaatataattattgtttttgtggtaaactacaaactcttgaaaaatgaattccttcttaagaataaattctccgcttgttttcaaaataaataatattaatatacttttatcttttttactttttttatctctgtaaacaaaacacacttttttcagttttaatattcccgtggacagtcaggcccggatgaaccctgaggcgttggaagagtgcataattaaatgcaaagatgaagtgcttaatttttttgttaattattcaaaaaaagattttcaagtatttccttattaaaaatgtcaatttgattgacattatgacgggaatttttcaaaaaatagtcatataattctatattttgatttcaaaatgtataaattttctaaataagttttacttttaacaaaaaaaaaaaaattgaagataaaaggatatgaataaccaataaaaaataaatatatttattg

SEQ ID NO: 22990 - DNA, 1146 bp, Heterodera glycines
  unsure (1)..(1146): unsure at all n locations
tgaaaataacttanttgagaaaattaattacaaaggaattgtatttcattcttttttcgaagcaaaaaaaaaatggggtttctacagaaattctttttttcagttttttgttagtttgtattcttaatcattttttcatatctttgatgaacctattcaatgttaagattttaatggttaaaaaattgaatgtcaatctttgtgactagtaattttttcgaattttcaattagttatttttgtcgatggcttatagttttagtaaaacttattgataatagtggaatttttatgaatataatatttttgacagcgcggcgcaaaagtccatttttgctgggcggcgcaaatgtcgcggcgcaaatggagcggcgcaaatatccgcggcgcaagtgaccactttttctgtgcagcgcaaatgtctcatcacgatttgcgtttattctttttcccatatattagaaccaaaagaagacaacaagaaattcatttaaatttaaataatttagaaatttaagttattttattgaacagtaaaaaccattaaatatttattttaaaaatttattatcttctcaaaaaaatttcctaaaaattctggtcaagagcaagataaaataaataaataaataaagaagcacttaatttggtaaaaaataaaacaataaatccattattaaatattcaactgataaaaaataaaccaaaaattcttatgaaaacataaagaataaataaatattcagctttatgaatgattttttaatatttcattaataatgttaaattaaataaaaaacaattaaatgaaataataagaaactgtacaaaaattttttaatttataggataaacattcatttgcacaaaaatttatttgaaaatataagtcaatagaagctaaatgaataaaatatatctaattttataatcttgatattattcgataatcataaatgttttctattatcctgcaaaattccaaaaaatcgttaagctttaaaaaaagttatggcctgagaaactcaaaaaaaacaatttttcttgaacgttttttatcgtaacattcatgaaacttaatgaaatttttttaaatattgaaatgatatagaaaacacataactctatctaatgattcttattgtt

SEQ ID NO: 22991 - DNA, 1032 bp, Heterodera glycines
aatgtatattgcaagcatcatttgaatagtattttcacaattcaatattcattttgataaatacattttgtgacttttttaattgatttttttttaattattaaaaatttttattaatctaagagtattttttaaataaaaaaaaactattttataaatcgtgatttatcctttgttaaattgataaataaaagttaaaaaaattttctaacaaatatgaccaactttatttggtaataaatatttggttttttcataacattatttaattaaaattatttttttaattcaatttttgtcaattatcaaagaaggttttaaagtgtttttgatttattttatctatgtatttgtgtagaagaatattaaaagctacctatttttaatatttaaagcttttctgattttttcatttttgcgtctagaatattttaaaaattaatacatatttttatatttagtattattgattttaatttttttctaatttttctagattatattttgcataaagctaattaaattacatctcagtatggatgaagttttgacttcttcagggcgccaaattttggtatcatttttctatctgctgctatgtaaataaatttgaaaaaaattattttaaattagagctatatactagggttcggacttcgcccccgcccccggggacgggataggttttttggcctcacctccgcccccgcccccgcgaccttctcccccgcggggcccgggggtgaaaatatacccttaagaatggcatattcgttgataaaattgaaaaattttttatccaattttgaattttttaaccatcgttgattttacaatcaatattatgaaaaaacataaacctggaataagtaataattaaaataaaatttttaaataagttgattaattaattaattgttaaaatattttaaattaaaaacctcaaattaaattgttatacataatataaactgaaatgtataactaaattgacaacaatatctccaactaaggtcgtagccagacccttgg

SEQ ID NO: 22992 - DNA, 1622 bp, Heterodera glycines
  unsure (1)..(1622): unsure at all n locations
tgttcacactttccgtgcggttgctggggttgcccaacagtttagggcattcaaaatttatgtaattattaaaattaactgggaactgcacttacatatattatttatttttctaaatattgccacttttcttcaacccgccccctttttttgcaggttttctcgtctcttttcgtgccaattttccgttggtgccgttttctttggcgccatttgttgtcccttttgcgggttcgccctcgcaattacgcgaattcggaggcaatttggacgaacattcatcagcagcaacaaagcaggggttcatttttttccttttgcattttccactttctttctatttccttttttttccatttgtttctcttcctctgaccatttctctcttttctttctttttctcctctcttttccttcacatttttgcactttctttttctcctttccgcttttctttttcttatttttcctccccctctttcttcagtccctttttcttctcccaatttcgcttcacttttcttttggctgatcgctctcggcggccctttccttctttttaaatgtgtccttcggcttgccgaaagagaggccgaggcgaacaaatggaccaccggacagacggagcattacacggcacaggcaatttttatgattttgttattatttgttcttgctcattcttctcaattgatcctctttttccttctcttatgttaggcattgttcgacttttgcgctgccaatgccaatgaattgtcccttacggcgtttgatgtgattcgcatcgcgccaaagtcggcgcagccgaatgtcaaagattggcttttggccaggtgttataactttgaaatttgacagaccaaaaaattttattttttaagcacattagacggctcaaaagttggccttgtgccgataaattacataaaactgattggaaaatgcaacgacagaaatgcgcaaatcatatgaccagtccgaacattgggttaacggacaattcaattctctttcattttgtcatttcatttaaatgtttccaaattttattactgtaaaactttgtatccgaatttaataaaaataaacgaaaatggcattggcatgggacgcagaaaccgaaaaggggagaacaaatcgccaaataaccaatctgttgaactatccaaagctttcgtttgttttgctctgctccttttttctttggttttctttttaaaaatttccgcaatgaatccgccaacttttgctcctttccgtctcctccgacaacatttcgaccgattggctgtcattttgctcaattcgcccccggcagcggtcgttccctgcggcgattttgcatttccggccgattgggccaaaatttggaacagtgccaacattcgcttgtgcaccgatggggcggcaaatcatttgatgaaactgtgcaggtgaagggaaggaggaaaagatggcatttcctcgttaaaatgccattttactcgcagccaaaacaaaataaaataaagggtcacaaaaactaaaacaaaacgccaaaataattcananntcacatgatatgacatccctcgcctctacnaagcgatgtcctcagcgcttcaaatccatcggcaggg

SEQ ID NO: 22993 - DNA, 1025 bp, Heterodera glycines
gcggcatcaaacgaaaagtggcatctgcgtacacatttttcataatactggtccattccgaagtcgaagaacgagcaaatatcaaaattcttaatatggaaatttgtgaaattaatttttttattgtttttcacctttgcggtccagcctgtccctgaatttgaaaaacgccggtatctgccaacaagaaattctcctcgtcagtctctgttcgattgtacattctgtaagcgggcggcaattccaatgcttccaaactgagtggtgcagcaggtggtacattttcgtcacggcgagcacgttttataacctaaagcaaaggaaaaatcagactggcatattttaaaatttccttatttatgattgacaaaaaaattatttgtcaagagttatgggcgaaaacggcttgccagacgaccccctgactatatttttaaattcagtatttggtccttcaaaaaattatgcaattttcaatttcattatctttttttccgatctgcggccattgtttggcgctatccgcgaccgcggcaatttgagccagcaattagaaactgcggcattttgagtcagcgattcgagaccgatttttgtgtctgcgccccaccccgattcacataatcaaagcaaattctgactataggaatggaataataaaatagcaataataatattgcactgaaaaatacgaaaacgaaatttcttttcgggaattccgcgactgttttcggcacttttttgtgccaatttgtccgtttcaagaaataatgtatgtaagaatgtcgtagtcgccttttggccaagagggcaataacacttttggtccaataatggtgctccaattttttgtcaatcgtgagaaaatgggccagcgaagttatccattggcacaataaccaaacacgacaatggcacatgaatgcatacaaaaaatatggtgccaactttggcattttccaaaaacattgccggcatttacatttttatactttgccaaaaattcgctcctatgaccataaaag

SEQ ID NO: 22994 - DNA, 1584 bp, Heterodera glycines
gtgtcccctggggcggcacacagcgaccattttgcactcactgacgtggctctgacccccagggggacataatttgatttgagtgtaaaatgggaagcattttttaccatgctttttatttgtacattggtctattttaagtgcatagcattctttttaatttcatggcataagcattgatttgagaaatttcgaaataggcaagaaaaaccatcatttttcattttggcatttcatttttgtcaaatccgatcactcccagacaatttttgcttggcatacgactgactgactgggcttctgtttgcaaaaaaagtgtcattgtatcgggtttcttatcagactattagctgtctaattatgtctaactaacgattggacaacgcggcattgcaaccgcaccttatcaaatccttagcctggtcattgttttaggcttttgttttttaccggaaggcttaatccacccaattaaactagaaactgatcatctcgctcccaaataattggtcaaaattgggtgattatgccatgtcttacagatgattcccaattatcttccaccgtttgtcccattatttcggttctcatttcatctcattttcactttccgtcgcagctgggtcaccgcccatttgatgtgatgataaaacacttaattgcccaccccattattatttttttattactattatcagctactgtcatacacctgctgctgtgctgtgctgtccgtttgcccattgcgtcgtccccccggggggtcgttcacgtgaaccaaaaataaaaaataaattaatgtaatcgatacgccgccccccgcccgcccgtaaagtctctccccctccatcctcaccaaatcatcatcgttcaatttcatcatctacgacccccacctgctgctgctgcccaccccgcgcaagtcgtcactaccgccaccataataacacaaattcaattcctccccccccccggccctccgtgtccattgcccggcggctgtcaattagcccctgctccgccccttccccctctcgcgcgccgtctggccaattaacgatttaatgactgcagcatggatggcaaaaaatgtaaaatgaaaatgccctaacgcgccagcgccaccaatgaaaatgtcccaaggcgccaccctccccccaggcgcaataattagtcgatcggctgccggcggcacatttctcttcttcattgtttaaaacggaaccacactggcacacaacaattagctgtttgcctcgcctcattcctaccgtttctgtgctccctctgagttctctcgagactctcgactcatttactcatttgcctgaaggcggcaatttgcacttggtagagggagaagggacattctcattatcaaataaaaataataattaaataatattacataaaaaggacaaaaaaaatagggaagtttttttttattaaagaaaaccttcaaattttcttcttaattaaacaaaaatctgcagccaattaaataaggaagccacaataattgcaaaattattaattattaattattaatagggcccggattctaaggtttaagcacgaaaaaca

SEQ ID NO: 22995 - DNA, 1476 bp, Heterodera glycines
ggggggggggcataacgaaaaagtttcgaaaattccttaaaaaaaactttaaaaaatgatggaagtaagcaggaaaaattcagtgtcccgagagattccatatgatttttctggaattttattaaaaattttaaatcttttttgagcatgaaaaaaccgaaattttttgaatttccataaaaattcagccctttcaaatcgtccggatgtgcatgtgtgctgtcgcagaatgcccgtgccgcccaaccccaacgtggtaactgagggcgcaagtgaaacaaatctgaaaatttttttgaaaattttttttcggatttttcgaacccccctgagccgctgccgaacacggacctgccgccgccgctgcaaaccgagcagccgattgagtccatcacttttcggcctccggtggacgagctcacttgcccggtcggttggagtgcgtacgaggaccaaagggttagccgcataatggaaaaacggaaatttttggaaaaattttttcacaaaattttcagggtgctcaccatttttgccaagatgcactggacatgacatgccctcatggttagaatacaatgttttttgtattattattgtatcactgcttatcaaatccctctgacatagttttttaatgataatcgaacatcatggattcaatggatcagcaatatgaggcataaatatactcttgtatatgcatattaaccaagggatataatgtatctggtatacaaaccataaatatacccgaaatcgattgtaaaggagtaatatacgccaaaacaagtaaatttgtatgtagccataaagatgtgtcataatataccccagataattaatacaatacaagaataatccatggattaaattatcctttacacccttcaggcttttcctgtgcccagtcatctgttagcggcattttcatgtgctgtcgcttggcgtccaccatacagtgcccgcatgagtacaggtaaagtaaaaccatttcaattgtgataaaaaatgacaaaagaagttattgtaaaattatcgaatttgtttgttgtatacagtattctctcacattacaacaacattccaaaatacagtaacaccaattctaatgcttattttattcggcatacagtactctgatggtgaacaacaaccctcgcctttgttcgcttaccgtaatgcgacgctcaacaaccgcgggaagcggacaatcatcagccacagcggcaaatacgctacacgcatgtccaaccgggtaatttggatgtaatagaaaatgtggggaattcatttgtatattcgaaaagcaaattttggcatagtgcctagcaaaacggcaaaagggaaatttttggaatttgattgacaaatgagcggcggcattttgagggggttgtgtacaatttcaaaattagaacctaattttctgctaaataatttttatttctacaagcctgcgcttagttagctcat

SEQ ID NO: 22996 - DNA, 1107 bp, Heterodera glycines
ctttctgaaaaaaatatttatgaaacaaaaaaatcgattttttcaagtgtccatttggggtactcgaacatttatggggagcaaaaatccaacgcagaattaaagtacaggctatagggaagctactcccgaaggattcggtctccccataaatctgggcgcatcggttcggggggactgccccgaaaacaaaaaaatcgattttttcaagtgtccgtttggggtactcaaacaattatggggagcaaaaatccaacgcagaattaaagtacaggctatagggaagctattcccgaaggattcggtctccccataaatctgggcgcatcggttcggggggactgccccgaaaacaaaaataaatcgattttttcaagtgtccgtttggggtactcaaacaattatggggagcaaaaatccaacgcagaattaaagtacaggctatagggaagctattccggaaggattcggtctccccataaatctgggcgcatcggttcggggggactgccccgaaaacaaaaaaatcgattttttcaagtgtccgtttggggtactcaaacaattatggggagcaaaaatccaacgcagaattaaagtacagactatagggaagctattccggaaggattcggtctccccataaatctgggcgcatcggttcggggggactgccccgaaaacaaaaaaatcgattttttcaagtgtccgttttggtactcaaacaattatggggagcaaaaatccaacgcagaattaaagtacagactatagggaagctattcccgaaggattcggtctccccataaatctgggcgcatcggttcggggggactgccccgaaaacaaaaaaatcgattttttcaagtgtccgtttggggtactcaaacaattatggggagcaaaaatccaacgcagaattaaagtacagactatagggaagctattcccgaaggattcggtctccccataaatctgggcgcatcggttcggggggactgccccgaaaacaaaaaaatcgattttttcaagtgtccgtttggggtactcaaacaattatggggagcaaaaatccaacgcagaattaaagtacagactatagggaag

SEQ ID NO: 22997 - DNA, 1432 bp, Heterodera glycines
tgccattgtcagcattgatttgtatatactgagtcgccctggtgtcaatgcggtccaacgagtaccgtaccgtactaccataaccaatgtcccggtcaacagcgacgacttggccaattggctttgttatgtcgaaagttggtggaagcttaataaaaaaaaatttgtttatttatttaaaatataacaaaattttttggcttgggccacaaaattcgacaaaattttaggccgtaaatgccccaggacgcaaatatattggaactattaggattataaaaacccttgcttttcgtgattcccggaggtttccgattaaacacatacatgccttaaatgtataggcatttttggtgaatgttggcgcaaattcgtcaatgccaaacactcgaatttccaccggcacattggcaacaatttttccctgggagtcattgcaacaaatggtgaagttgaggacgacaaattgttgctgttgttgtgccattgaaatgtttgctgtttccaggtcaatcggagagcttagaatgacatcaccggttgttggctcaacagcaaatgcctgttttagcaaaaaatattgtaatttttactttaaaaacacaatcttagattgacccccctattattatcaggaagacggattttttcggaaaaaattaaatcgtgataactttaaccatgtcaaaagtttgttacgactaatgctgtcgtaatgccaacaactctccaaaggctagctttattggcttgcctcaatcagcgaattgctgacgatgttagccctttttggttgctgtatggcataggtacaattgttttgaatttgtgccatcattccatcatttgtggcattgtgttgttgctgctccaagatgccgtgcctaccgcccgcgtgcacgttgaacagtttggtgcccaccggcctatcctcgggtacaaatttgcgataaattggcacaccgaagtgcggctttgctccattccatttgttcatgtccgacaacaattcgacaacccattcggcactttgtgtaggagtgccattgtcgcgtgccgatattatctagaaattcaaaaaaatcatgtgtgattaagaatttgatcccgcaagtcagggtttattccgtcttttccaatgttagatttatgtattacgaaaagctaaattcgaaaaggaaaaatcggacttttcagggttttaatcgcccggtcgccaatttggtcaaacacctaaaatgaattatattagtaaggctcagattctcccagaaacacggtaaatcattactgtataccgtacaaatcataaacgatacgatgctattgaccaaaaatcaccaattgggttggcaaattgtcaattagtgacaatgcaaaagcatcatcccaatgacaaatgcggagctcccctgaaacgctatcaatgctg

SEQ ID NO: 22998 - DNA, 1133 bp, Heterodera glycines
aaaaaagttttgactaaaattttgtccttattcgaaagaactttaaaacaattgaaatataagcaaatttaagtttttttgattaagtttttacgtgatttgctacctaaaaaacgttaataaaaaaaatttttatttgcctattttagcgcctattcgaggatttttgtgcctatttaatgcctattttgcgattttttgtggctaaaaatcgtatccctaatcattagtgaaagcctgttcactgctggaattttcgaggtcgttaaccgtaaatctggcatccattaaataaagaacacttataaattaggaccaagactgggtttgcgcgttcagttcaccattcacttagcattagagtagagcgggaccgggaattttgggcaaaaccgggaccggaactcgatttttcttcgggaccgggaccaaccgggaaattttaaaaattcaaaaaattttaatttatttcaagtgaaaataatacaaaattacatttattattttttatttaataaaatccaaaagttaaagctaaattaaattaaagaaaattttcaaatcaaaatttcttcaattatttcaagcaattaatcatttgggctaaatggtcgaataatatttgaaatttagatttacttatttcaccacttttttcggtgcgctttttccagaaaacttttggggaaaaaggttgtccggcggtgccgataggcgtcgccgggggaaattttgaaaatttgagtgagatttgttaacagattttcaacaaaaatggcttcttttttggattattaggccaatttgtacggattttcatttaaaaaatgacaattaaaaaatatgaggatgatattttcttgataagaaaaccaatgagtatacaaaaaaaattaagaatattttacttactgtagagggattgaaccaggggaaagaagaaggaaaagtaaaggagactagccactaagccatttgcacaattgtcagtgtcacttttaaagaatatataatatattttttaaatttttccctttaaatctaattttcatctctaatttttcactcagaccccccattcttaccagtgcttgtttttcccggttcccggttgccctaccgggaccgggacc

SEQ ID NO: 22999 - DNA, 908 bp, Heterodera glycines
aaaagcccgattttccagtttttaaatttcgaaaaatttcaaaatttttcgagctaggcctaaaaaacggtgttcgggtttttgaatttagggaattcttaacgaattttcccagaaaaacggagaccactttcaagcaaccgtttttcgagctctatcgattgctgatatttttgaaaaaaattcgattttttcccggaaatagaaaaaaatttttgcctcagcgggacatttgagtcccgggcccataactcgttaggggttggttttagcgaaaaattgccttagagcaaaattgtagagcttttgaaatgctatcgaatggtgtattttatgtttggaaattttcaaaatttttcgagctaggccccctagaaattttcaaaaaatttttttgggtcgaaaaaggatgtcaaaaatatttttctggggtattttgaggtgctgagcacgaatatgatgtttatttttcgtttcaaaatttttggaattttttaaaatttgaaaatattttccaattttttggccatcggaaatttgggctaaaatttgaaaattcatatctagcctaagggttgaccaattttgagcaaataaagctttaaaaatagagaaaaatcaggagaattttatgggatttatttatgttttctaacatcaatatgaaaaaagttattccagaaattctggaaattttagatttttcagaaaaaaattcagaactcccttctgaaaagtcattctgtaaaagtaaaatactacaaaaatccgcaatttttttctctataatataaattttattttacatttttatcacatttttaaaaaaagttataaaaataaaagtgattttgtgattcgctcatgagagaaggtgagcattaggatttttgagttgaaaaattttt

SEQ ID NO: 23000 - DNA, 2222 bp, Heterodera glycines
  unsure (1)..(2222): unsure at all n locations
aagcaaccccctggcgagttatcgccctggtactgaagtgtacacttttgggtaaaaaaaattagccaaggctacagccttgggcgcccaacgtagggcttaggttttgctggcaaagttgtcggggatagtctgacttaaaatcctaccagcaagagctaagcgatcccggtccaaagaaaaaatttcgtagaagaaaaactgcaagaaaaagtgagaaatcgttccccgggactcagtcgtccgcgctgaatttttttctatagttttcccggattctcctcaaaaagttgtaagacccttccaccactttcagggcgctcccggccttcggccgggagattttgttttttgaaacgaaactccttgtcaatataacgtatatattaactagcgggtgcgtgaaccgtcggatctgggaatgggataaagcgcttcgcgctttgggagcttcgctacctaggctgtgaagcgattcaaattgatcgaattggttggagattttttgaatttttataaaaattattatgggtttttagtccacgtcgaggctcaagacgggcgcttcgcgcccgttttttagcttattaggccgcttcgcggcctcagtctggcgcttcgcgcccgtttttcaaattttgttggccttggacgggcgcttcgcgcccgtttctaaattttgttgaacttggacgggcgcttcgcgcccgtatttaaatgttgttgagctcataagaggtacaaaaattgttggaagatgtgttggaagaggtacaacagtgattataagaggtgcaacagtgattagaagaggtacaacagtgattagaagcggtacaaaagtgattaaaagaggtacaacagtgattagaagaggtacaaaagtgattaaaagtggtacaacagtgattagaagcggtacaaaagtgattaaaaaacgtacaaaagtgattaaaagaggtacaacagtgattagaagaggtacaaaagtgattaaaagtggtacaacagtgattagaagcggtacaaaagtgattaaaaaacgtacaaaagtgattaaaagaggtacaacagtgattagaagcggtacaaaagtgattaaaaaacgtacaaaagtgattacaagaggtgcagcagtgattagaagagtgatctaaagaggtacaaaagtgattagaagaggtacaacagagattgaagaggtacaaatttgataagaggtacaacagtgattaaaagaggtacaacagtgattagaagcggtacaagtgattaaaaaacgtacaaaagtgattacaagaggtgcaacagtgattagaagaggtgtaacagtgattagaagaggtacaaacaatgattagaagaggtacaaaagtgatagaagaggtgtaacagtgattagaagaggtacaacagcgattagaagagtgattagaagaggtacaacagcgattagaagagtgattagaagaggtacagcagtgattagaagaggtgtagcagtgattagaagaggtgcaaaagttattagaagaggtacaaaagtgattaaaagaggtacaacagtgattagaagaggtacaaaagtgattaaaagtggtacaacagtgattagaagcggtacaatggtgattaaaagaggtacaaaagtaattagatgaggtacaacagtgattagaagaggtacaaaagtgattaaaagtggtacaacagtgattagaagcggtacaaaagtgattaaaaaacgtacaaaagtgattacaagaggtgcaacagtgattagaagagtgatctgaagaggtacaactgtgattaaaagaggtacaacagtgattagaagcggtacaaaagtgattaaaaaacgtacaaaagtgattaaaagaggtacaacagtgattagaagcggtacaaaagtgattaaaaaacgtacaaaagtgattaaaagaggtacaacagtgattagaagaggtacaaaagtgattaaaagtggtacaacagtgattagaagcggtacaaaagtgattaaaaaacgtacaaaagtgattaaaagaggtacaacagtgattagaagaggtacaaaagtgattaaaagtggtacaacagtgattagaagcggtacaaaagtgattanaaaacgtacaaaagtgattaaaagaggtacaacagtgattagtanattcattaaattaaaatattttttaccaaatttaatttaaaaaata

SEQ ID NO: 23001 - DNA, 2394 bp, Heterodera glycines
cagtgcggaaaaacggagagggggggcatttgcattggggtaccaaggtctgcggttgtttttttttaggaaaatcactgtcattttagggttccgattcactcgcagaaagggaaggtggttccgctgctccaaccgggactgtgaggcaactgcagcattgagtaaagaaggcggaactaatggtgtgctcggaagaaaagagcacaaccatctgccggacccagcgtgcttccacgcggaggtaaaacgcaacggaattaagacgacaacgatggaaaacccgtgccaaaagccatcaaaagtattggcagaaatccgtgcaaacaccaaggacgaaacctttgtttccatgggcactgacctcgcactggtggcagtaatgagaaggtttttctcttttgatacgtgtattcctctttcactcttatttcaaaatttttaggcagaaaaggaagatttacggcaacatggaccgtgtcaaccctttgagtgttgtcttacccgatgccctgcttattaaggatggcgaaagcacattgttgtatgacagccgagcgcatcgccaaggagaatcggatgtggtcttggtctttgcacacccgaagttaagttcattcatttcatgttcaatttttcgcttttgttttcagctgttggacgttttgaagcgggcgaagaaaatttcagttgatggaacattcaaagtgtcaccagccgcatggacgcagtgtttcgtgatcggcgcttttgtcaaccggcggctcgcattatgtgtgcatgctctgttgcctggaaagcaacgaaaatactacgaagaggcgctcaatgcggtcaaagcggtgatggcacccagcaccccagcacatagtaagtgatcatttctcctaactttatttcatcccaaaatgtaagtcatcagtgactttgaaaccgcaacgattcgggccatgcgagaaacgtttccagcggcccaattgacgggatgtctattccacatgagccaggcagttttcagaaaatggcgcgaaatgggcttggcggaattgtatgccaacgacgaaggagcaattgatcggagatgcattggacgaggcggagtacaacaccgacgaagacgtcatgaacatcctttcactgctgagtctgcagatgcaaggatatgtgggtggcctgcgtgcacgaggggctcaacacgaacatgaggaccgtgaatgattgatcgctttataccattggcaaaaacccttgtcttattccgcacaagtgattggattttaaacctcaatttccgtggttttcaacattttcatttgattcgaactattatttttgatgtttattataataaattttcgatttcagacattcatttacgttgtattgtactaggcaatttgtgaaaactccataaaaatgactttaaaagtttttcgagttcgaacccgggttttagaatttttttggcggagtagacgaataatgtagacgaatcgttgcttttttgctgagtagacgaatcgtcactttttggctgggtagacgaatcgtcgagtagacgaatcgttgaatagacgaatcgttgcttttttgctgagtagacgaatcgtcactttttggctgggtagacgaatcgtcgagtagacgaatcgttgaatagacgaatcgttgagtttttgctgagtagacgaatcgtcactttttggctgggtagacgaatcgtcgagtagacgaatcgttgaatagacgaatcgttgagtagacgaatcgaggggaggcgtaacacaacacccttcaaatcagaacatttctgataaatttagaacagatccgagccctgactttaccagacataaaatttttttttttgtcaattcatataaaatagcttccgggagttttcagcatcgctgattaagaatctggcgttcatttcaactaatttcgtactccagaacccgaaatcgaacttatgatcgaacatcgaaaattttaaaaatcctagtcaaatatggttcaaaaagatgcaatagtgaaaaatcaacaaactcaatgctcgcatacaattttaaagaaaaggaaactttttggttcggactaggctttcttttaaatacgctcttcagcgatgctgaaaactcctggaagctattttacatgaattaagacaacaacaaaaaaattatgtctggtaaagtgcattagtacccgcttccttttggtttctaattcgccaacactcggaggaatgccaaagaaaagaccttctcttgcggtaggtgacatgatttgcttggcaatggtaaagaattgtggtcccggatttattttttattttcggctcaaaactaactttaagcggttttaaagggaggtgagtgctaatctgaactt

SEQ ID NO: 23002 - DNA, 1325 bp, Heterodera glycines
tgcgtttcagaaccctttctgaaaaaatatttaagaattaattttgcaaaaaataaataaaaacgaaagactcagatttcgaaaattttttgagccagctagctcggcgctcatttcagtgtaagttagtcctttaccggggagtatccctgcaaagtttggtacgcttctgctcaattagcaaaaaatatgagtgatcgaattttcactaaaaaagttaagcctacattttttggcatatttaaaaagcaattaaaaaattttttaaatgagaattcatgcgagattttctggaaataagcttaatagggcctagttaagctgtaaaaaaaatttggggcgatttgaaagagaatagaaagaaccaggttcgatgaagttttggtaagccaaaaaaaatccaaacatttaaaaatctataaaaaatttaaaaatgagaattcatgcgagattttctggaaataagcttaatagggcctagttaagctgtaaaaaaaatttggggcgatttgaaagagaatagaaagaaccaggttcgatgaagttttggtaagccaaaaaaaaatccaaacatttaaaaatctattaaaaatttaaaaatgagaattcatgcgagattttctggaaataagcttaatagggcctagttaagctgtaaaaaaaatttggggcgatttgaaagagaatagaaagaaccaggttcgatgaagttttggtaagccaaaaaaaatccaaacatttaaaaatctataaaaaatttaaaaatgagaattcatgcgagattttctggaaataagcttaatagggcctagttaagctgtaaaaaaaatttggggcgatttgaaagagaatagaaagaaccaggttcgatgaagttttggtaagccaaaaaaaatccaaacatttaaaaatctattaaaaaaataaaatagtgaagttttaaaaattaataaaaatttttaaattaagagttactggtgttagcatcatagcggtgcttttccttgtctttttgatgcccttgcaaaatctggtgcgcttctgatcagtttatataaaaaaagttaagcctaaactttttggcatgtttaaaaaggaattaaaaatttttaaaatatttattcatctccctttttgataatataagagtcagagtgccttattcaacttgtaaataaattttggtgcgtttcagagcagtttctgtaaaaatacttatgaattaattttgtaaaaaaataaataaataatgaaccctcctccttaataatttttctgcgcccaaggtactcactcggccgcttcgcggcctcgtggggggcctt

SEQ ID NO: 23003 - DNA, 1414 bp, Heterodera glycines
tagtttttttaataaacaaaaaaaaaattttttttttcttggtagcgattaacgacacaacgccggcctccaagccctcactcacccaaattcaaaaaattcgctaaatttttctaaaagtccaaaaagtgtgtggtttatttttgtgaaaatatgttacaaatttccccccccccccccctaatcgttttctacccaaaatttttttacgcaaattttaaattttattttaaaaatgtctaccaaactttttttttagtatttcatttttactgacatttaaagtgcattttatgcaaatgatgttgaatttttgggcaaagaaattgctccaaaagttgaaaattcacaatttcgtaaagtttcccaactcaaaatactccatttttatcggatggtgcttatccatcttcaattttttttttccacttttcccaggtccgtctctttcatacgcccaaattgcgtggcctcctcaaaagtgcgctgcccgaacgaaccaacgaaattgtgggcttacagcacatgaaattcttcgttttcgacgacactgtgctcatcacggggttcgtttttttgctttttttaaaaatagtttagtaaaattttgttgttttcaatttttgtgttttataatggctttttcgaatccaaacgggaaaatttcaatttttgaggcctcataacttttgtttttgtttttacacataacttcgctctatccaatgtagtaagtacccttattagcctaaaagcctacaaaaattgtaagaaataattttccgaaaaatgcgtaaccacaaaacattgcgactcatttggctttatcgaatgacaccaattaattatgtttaagaaaagtgtgagaattcaaaaatttatgccaactcaaatcgagttaggacaacaaaatttttatacgacctaataaattggaattaaaaaatccaaacgtataaatttttcaagaaacaaaaatctttttaaaaattatattttcagcactttttggaaaaacattaatttatcataaactttcaaaaaatcgctaaaaaaattttacaaaaatttttttcggcggcagtaaacaaagttcacccataatatgtagggagaagccattgtaaaaaatagtttttgaattctcattttttaagttttccatcggatttttcaaaaaatctctcccccaatgtttttcagtgccaatttgtccgaccaatactttgtcaaccgtcgtgatcgctatttgctgatcgaagactgtccactgttggccgacttcttcgtcgacctcttccgcctcgtcggagacaattccttccgccttttggcggacggacgcgtcgaattcaccgccgggggaacgctttcgccgacacacccggagacaggtaccaaaatggggcgagga

SEQ ID NO: 23004 - DNA, 1221 bp, Heterodera glycines
tttcaatgtcaaaggcataaaactgcaagaaaaaactttgaattttatttgttgttggacatttttcgggaccacgggctccgatgcttccaccaacgcctctttgcgacaaattgacggcaatttggtggacggattacggcccaaaacggtgtgacattggccgaaaaagaactgctgccggtcaatgcacatgcacatgtcgaagggcaagtcgtactcactgaaagatggagaagggttgggaagagggtggtaaaaattttcgttttttttattgccaacccatgattttatttatggcggagggtgggggaatgaagcgcacctcacatacagctctaatccgtttaaatttgaatgacaacagacaaatagcggagtctctaagctgaaaaagcgtcgttttgtgacgccacgcccccaaacataatccatccaatcagtgggcattgccacttcccccgccacccttgacaacagtgtgcgggggtacacatttccccaccctcacgaaaaatggtttaaaactgaaattccatatttttaattttttatgaaatattttgagtaatgtttttgcttcggctaatttcgaacccctgacccggactcgaacaaaaattcaatatgcaacaaaaccggttcaaacgcacgaaatagtttacatcttgccttcagaattgattctccgtcccagaaaacccatttttttgtgcaataaaagtgatccagccacgataatcaagcgagaaaaaaacaaaacactctaccgtatgccaacaaatcgctccaatgggccgtcgtcgtcaaaaaatgcgccgtcggtcgctaactccacccgataattaccctttaaggcacaagaaaaataaaaataaacaaataacacagtaaacacagaggaaaaaattgccaaataattacaaaattgaacaaccgcttcaattggccctttgtcaacaaaccaaaaaatccttcgaattcgccactcacaatttttgtgttttcggagaccaactttatacaagttggaagcgtatgaaaatatggcctgttttttttaaattttgtatatttcgaattcaattctgatcactgatcacatcattatcattagcatcgttatcatcagaacagatcgtcctcctctccgccgccgcaattcgctcttcgccgcccgtccggtccaccaatccgtccatcacttcgtcctcctcc

SEQ ID NO: 23005 - DNA, 905 bp, Heterodera glycines
  unsure (1)..(905): unsure at all n locations
aaatcaaaatttctagtagtttgtaataaaacaggagcaacaatacgncaagaaattcggcatttttgccaaaaagataattttttgaatttttcttncgtcgagtggtgcaaattgaaaaaaagagattttgaaaggtttatttcaatttggttagtttaaaactgaccaagaaagtgccattgcccgacctaaggtcgatgatgtatggccgggtcctatgaacgggaaatgcattttcttcttttataagttttcttttttttttttaacattttttggaaaattttttcacagaaatgaatgttttcaaaaaaaaaggaattcaaatttgccccgtccgatcggaggtggaccttgatcagtacgcccttgtacgtgttggtgtccttggctaactttccgctgggcacaaatgacggcttttccttctcctcctccccctcccccgtgcgctgttgttgcttctccgcttctcctcccccctcttcctcctcctttttgaccgtgtcgtcctcccatttcggcttgtcccagccgcccggcggtggctccccctctcctcctcctcctctccgtccacttttccgtcgatgctcatggtggtgttcatggtgatgatggtggtgttgctcccgccgttcccgtcctctgtcccgctcccggcgatcttcgtcagcacgactggtggaaaaaaaatttaaaaaattttgtacgataaagaattttgaaaaatttttgccgctatttaaaaaagtggcagttttaaaaagcaaatggggcatttttggtttacaaaaacttttttaagatgatagatttgtaatcagcaaccccaaaagctcccgggatcaaattttatgactaaatacaaaaaaaaatttttttttcaaacttaaagggta

SEQ ID NO: 23006 - DNA, 2620 bp, Heterodera glycines
cccccctacctgatcatttttccgatcactcattagttgttgtccctttgccccccccctttccctttttgcttctcacttcgtgcgaattcgctctgaattggcactgttcctgctcctcatccgcctgcacttccgcctccgattcgcctccttttgctggcattgtgcacacataaagcgcgccgtccttcaaacagtcggccacgtgtcggtggatgtgtttgtccaacatggccgggcttttggacacgtgtttacagcctaacagagggcatttgcgagaagctgaacagcagaaggaggagtcaattcaaatcagaaattggcaaaatattctaccaattgacgaacatatcaaaacggagtgccatccaattgcccccccccctcccgcccgaaatgtaaattggaaaaaatttaagtaatacggtatatgtacatataatgtctttgaacagagttcgcccgctctattcgattctttttgggttttgttcacttaattttgaccccttttcctattctgtcttaaaatttgttcgtccgtctcccattggttgttaaacttgcccaagtcgatggattccggcagtgcgatttggtgacggtaatatttgtgaaagtgaatgtaccgcgcttctctaaacggaaagacactcttttggcagtattccgctgggcttggcttgcctggtggtgaactgacatccctcctcctcgcaacggatgggcgggttccgatggtaaatggtcacgtggtaactgaccgagttgtagcgaccgtacactttgttgcacaccaaacaccgatagcctaagggaacgatggcgaatttgatggcaatatttaaattggcattgcaatggcaccttttttgactatttgtatgtactttttgttgcggcaccacccttaagtggggaaaagcacattcattcattggtctgatcatttgccaccgatcacttgccttctttgtcgttggatggcaccagcatattgttggcaccacccgctgatgattgggttatgctgtccaacgattccgtgctgttttccagcggatggtccatggacacggaggatgaggacagggaggagggggccccactctctgtcgaatggacgccaattgcggtggaggacgaaagagacgaatccgaaacggcggtcgattggccaaccgaaggagaggctctaaaagaggggaaattaagtgaaaagcattaaattcttttttagagccaaatgattaaaagggcgacgaatgaatggattgtccgaattggcattctttgaattggttggtccttccccccccccccctcccccccctttctccccttcccaatgatctcatgttcttcttcttctgctgttcatcaccacataccttcgttgtcatccacaactttgctcaaatcccttctaattgatgatgagaggcgaaaagtgagcggggattagagcagcacacaaacgcaattgaactttccctcacttttcgcccattttctcatccctttttggttaattgggcaaaagcagcggaggattatgacaaatgactattggttgacttcggctgctcaccttttgctgaacatttgggccaataaggctgacattggggcggcaaagccaacggcggaaggggcggcaccaaagggagccgaaatttgaggatggtgggcaaaatgggccaaatctggtggcatgggatgagcgaagtgctgttgctgttggtggagcaacgattggagttggagataggcttaaaagtgggaccggaagtaagaaaggaacaacccattgggacaaagccaaaggaataaacggtaaaaaggaaaatggcaaaaaattatggcacaaaaaaaggagggaatgccaacgccgggggaaccaatcaggacaaaagacctacccaaatacaatggcaactgattttcgttgtttggcatcggacgaaagttgacggacccggaagaataaatggaagaggaaggggaggacgaagaagtggaggaggatacggcggaggagagggaaagagaggtcggaagggacggcgccgaggagagaaatttgccaaagagtgccgaaacctccaggtcggtgagttcaagcagtttggccaaaaatagcagctgaaactgacaacaattgagcatgccaatcgaggagatcaaaccgaagaagggtcgacccccgggggaagggaaaaggcgccggaggcacaagacgaaacaccgccgtacagaacagtcagaaaggatttgaagcagtccaaggcattgtccagcatagacagatctgtggcattaaattaaccaaatttggccaaaagaggagagtttgttggtgattggttctgatctggtcgcactgctcccctccctcgtccctctttttgcccttccaattgttttcctaattcgaatcaatccctctcgtttccccttcccccctctccccattttccccattttcttacccaatttgacttcgtgcacttccctctgcaccgccgtctgtgtaaatggtatcagcagttcgctgccgtcgttcaacttttgaggggctcactgctgctgttgccgaacatcgcattttgga

SEQ ID NO: 23007 - DNA, 2827 bp, Heterodera glycines
ttgttgtgtttttaattcaaatttccggtgccgttcaaacccgaaaagtgccaatgccataccaaaatgcaataaaaataattaattaataatttgtctgcccaatttttgaaaatcccaaaaaatgttcccaccatacaatcccacatcattcgcgcaatgtccgcgtcatttttctcgtccattgaaatgttgcggaacagcggcgcactgaggcgaaagaacagcgcccgttgttggatgcaaaaagcgccggctcgcagcaccggcaccccttcggtggcagcaaccttttgaggggaaaatggggggaaaatgtcaactttttagagagaaaaaatctaattttccatttttaaatagggaaatttttaatagcaaaaacagaaaaaaacaatgaaaaatttaatttattttccatttttaaattggccaaaaaattgtggaaaaaggtaattaatttgtagggagaaaatcgatgaaacatttttacttttcatttttatatttggaaaaagacattaataaattaaaaaaaaaatttttttttgaaaaatttaagttttcctttaaaaacatttttttgtattgatacaatacagtacctggtcaaccagaatttcaccgatggtccaaaaggcgtttattgaggtgagcggttgggcgatccagttttgcgcaacttcgatataagtgggctggaaattgcattcgaattaatgacactttgtttttaaaaaaaaaccttcaatggagtgggcggaatgacaccggtgccaatgctgagaaagcatccaacgttcacggcattgggaaaattctgaaaaaacgaaaaaaaaaattttaaaaaaatttatttagctgttgttattggtgttttaccttgtacttgtgaagctgtccaaaaattgatttcctggagcagttccaatgacgggttgttcgcaataatgcctgacaaaaaatgagtgagggttatggaaagaaaaaccacatattataatgggatggaatttcattaaaatcaaccaaaaaaattcaaaaaacagaaattcatcatttaaatttcgaaaaaccgcttttttcttgtcaccaaatgcattttaattgtccaccgattaatacaacaacaacaatcaaagcaccactgttcacccacctccatcaatgtatttgttgtccacactggcaaaataggtaggtgctgaaaatttttcgcgaatttattaaaaaaattttttttttttttacccgccgatgaacgcctcaacactttccacagcaacaaatcgtcgggcgtccggtagccgagctcctcattctcctcgtcatttgtcggcagtttgtagttgcgcatcagctccagctgaaccgggaagaactcggcccgcgtggtggtgaacataagtctggaattttttttttaaatgaggaaataatttaaattttcaaattttatcttcccatataaatatttttcggcaacgtccccgaaatttaaaaaaaaaagaagatattttcaagaaattttacaaaaaatttttgctttcaacgacacatatttttcaaaaaaaaaaattccaaggatttttttccgagatttttttcggcgatgctatgtccctgacacattttgggaacaccgaagcaaccttggccatttgaggtcgctgaacattgtctcggcccccatctcctggcgaatgaacttctccagcacctgcgtgttgtgcggcctacggttgtcgaacaccatgtctttgaagcgcaagtacagctgcaaatgcaaacacacaaaaatcagtaaaataaaaattaaaaaatctaaatttttttgagtttttttaattccaaaaatttatatttttcagcgtaaaaaataataataagaagtgtttaaaaacaccaaaaaaaaaaaaaaaaaattttttttttcatgtaagatggacagacaaaattctctgcttggataaataaatttagattttgaattattgcaaaaacatgttgaattgtcaatgcgataaaaatggaaataataaaaaataaataaaataaaacccgctgaatttggtgcagtgtttggcccattgcgagcccggcagtgaccatggcaccggtggaagtgccgccaacccaatcaaagtaggggaaaatcggctcgcccatgatgcgctcaacacagatcagaagctgaaaatatgacggaattagcattaccgatttgaatgccgtggttttgtgagaacatttttaattatatgaagaaggaccggtggcagagtcccaaaaactcaaaaaaaaatcttttttttcaccctaatcgttctaacaatcgtgtcccgacatttgcgcctttgtcaaaatcgggttcaaccctacatttttcaatccctgatcgggagcagcccccaaaatgagggatccccttcgcatcgaggtggggccggcttaagaggtggggggggggggtcgtagagaagggaaagaggggaattaaatttggctataaaccgccggccccccttttcgcaaaatttcttgaaaaaagcgcgccgcaaaaaagtgcttttgaaaagcaaaaaaggtcgtcgatttacatggccgagacccttcgcaaaaattttggttgacccaccccccccccatgacgaaacagaacggcattgtgttcacaccaacctgaatgatgaccagcccacggatgccaccgccatccaacgaaaggacattgatgaaattgtggtcgggcggagtgtcctcatccgaggacacttcgggcaacttgtccaacacctcgtcatatatgtccttaacaacatattgt

SEQ ID NO: 23008 - DNA, 2154 bp, Heterodera glycines
aatcactgggactcaacccaccagcatttcaatcactgggactcactcaacccaccagcattgtaatcactgggactcaattctgcatttcaatcactggcactcaacccaccagcatttcaatcactgggactcaacccaccagcatttcaatcactggcactcaacccaccagcattctaatcactgggactcaattctgcatttcaatcactggcactcaatccaccagcattctaatcactgggactcaattctgcatttcaatcactgggactcaattctcctgcatttcaatcactggcactcaacccaccagcatttcaatcactggcactcaacccaccagcatttcaatcactgggactcaacccaccagcatttcaatcactggcactcaacccaccagcatttcaatcactgggactcaattctgcatttcaatcactggcactcaacccaacagcatttcaatcactgggactcaacccaccagcatttcaatcactgggactcaacccaccagcattctaatcactgggactcaattctgcatttcaatcactggcactcaacccaccagcatttcaatcactgggactcaacccaccagcatttcaatcactgggactcaacccacaagcatttcaatcactccagaattcaatctcaccaattcttcgaaacccaataaccggaaatgaatgataaaaccgacagcggctcgaccgcttagcggcctcgcactcttcttttggcattttcttatggcataacagttcttccttgtttcttgacattttcttacgacacaacatttttcttctatacaaatttttcaaacaaaatctcattcattcatttaaaaacataagcaaaacaatacctttcatatcaaaatcaaatcaatttaaactcaaacaacaaagaaagaaaaagaaacatttttaagactgttttttacacaaactgacaaaagaaaaactgtaaaacaaaaacatttcatttttcaaagcatttatacaacacaacacaatgttaatattataggattttcttactgaataaactaaggagtgtcctctttcttttattaaatattttataaaataaaagatgggatataaataaggaaggggtgctagacaaattcactattgtctctcccttccatttcttttactctcttttcttttccattgcaatttactctctttttttcccactccctccttctcccacacacacgcacgcgtccaacagactgctgctgcacagcagcacgcgtctgttcactgtatgcccctcccacccgccgctgcccgcgtagaaacacagtcagacagtgcactatttcccacctttccctccctctactttttttcaaattcatttttaacgcaaaattcaaacaaaacgccacactaattcaaaacatggacacatccggacagacactcaactttattatataggatcatgtacaatagaatagacactgacaaatgaatgtagcgcgaagtcgaaaacataatcgaaaaatttgatatactttttgtcattttaaaaggaatttgttaatattcacatagtacatttgcgccttaaacagcatgcacaccggttcaaataatcggattggcattcggtcggggagtgccggtgagacattcatcccctttaaaaatgataatattttttcactaatttcagcatcttctgcatcagcgggtgctgtaagtgatgagcagttccgttcgtccttcgaggcggtgccaaatgttcgggtcagtccgtcttggacatgggaaggggcacacacaaacgcaaatttattatgcttccaaaggttttcgggctcgctgatatgaatctgacatttattttaaccataacgaatcacctatctaatatttgtgataaataaacataaatgtttgaaaaatcgtgaatttttgatattttattttttggtacttatacagtttaggccacataataaatttttttggtttttaatgataacaacgtgtttccagaggtattcggggcgtcgaaaaggatgtcatatccgtgatcagtggtcccagaatacaccgtggaactatgatagggattttaaaaacaaaaaattttttatgtggcttaaactat

SEQ ID NO: 23009 - DNA, 1101 bp, Heterodera glycines
  unsure (1)..(1101): unsure at all n locations
gtcgcgcgaggccatcgcctgcaagtcttgaatctcggcgtcgtgcgcacgncggaggaagtcaatctcttccagcagagtctgcacttggtttggtagtcgattcggttcagcgtttccttcaaaatgcctttttgaatgccaaaatcccttcggttgcccccttttctcacctggtccaaatcggtccgggctttttgcatttcgccattcaaatgttggttttcccgtctcaatgctttaaggtcttcgtccaaaatttccagccgtcgcttaagcattgccaattcggcttccaacgaggaaagactctgcaaaagttcttccatcagttttttgtccccttcgtgcgctgtcactgcgttggcattcctttaacattttttataattagcattaatgcatgtatcatttgctcatctctaatggcccacttcttcttcagtgtgtccatttcctcctccatcgctttcgctttcttttccaattcgtctttttggcgttgtgtctcttccaacagtttttttgcttgtcttaagtccgtctcgtacatttcgcgcacattggacgtgtcttttccccatcgtttgttcaaaaagtccaaatccgttgccaattttcggttttgtgcctccagaaaacgtacctaaaaccaaccgattgatacctaattggcctgttaattatcttaattacccactcaccttctctatgtaagtggccaaccgatcgttcagttcgctcatttccttcttttctcgctctcgcgcatcccgaattgcggtggctgtggtggacgcgggataaggcgacaaggggcgactgctgatggaggacgactcgctgaccatcttcagcacacgagtgccacccccgtcggatgagtagcgagtgggcgacaacggccgagggcgggagaagtacgggcgagaggaaatggcgcttcggtagtcgctgctcgccacgctggggggctccatccttaacgcgaaaggacggctttcaccaacagtagcaagtggaaaaaaagaatgattgtgcaaaatgtgtgacgggatgggggagggggcaacggatgagcgcaatcactcgcccccttcc

SEQ ID NO: 23010 - DNA, 1236 bp, Heterodera glycines
  unsure (1)..(1236): unsure at all n locations
agtttttcattttctatgtactttantaagtaaacaataataatcaaacattttctatgatgcaaagcattaaaaaatcataggctttttattttcattatgttttggaaaaggtcaattaaataaacaatttttttttgtaattttattaattgtataaatcttatgcaattttctataagcaatcgatagtgtaacaaatagagaagataagttctgatcaaacacacacctttcattatttccggttaaatatgtgttcatattttaacaaaaagcagtcttgaatgtcgtcgaaatttgtggtaattccatggctatagccccgaccaattgcgctggaattttgccatgaggcttattttttgtgctggtttcgaatttacaggcgcccatgcaattggagcgcattaaattttttgtcgatttttcttcaatacccactttaaacgataagcatttcctcgcacaccgctctatttgctctgttttaaacaacaaaattttcccaagcattcatacctactttcttaattgcactgggatcacatctaaacgactatgctaaaaacggggaactaaactgtattaatatttttaacaaattgcagtccttttcgcctaccctgttaagagaaatcttaatttcactaataatttcccaattttcttctataacagattaactcttctatggtgagtttttcaatttctatgtactttattaagtaaacaataataatcaaacatttttctatgattgcaaagcatttaaaaaatcataggcttgtttattttcattatgttttggaaaaggtcaattaaataaacaatttttttttgtaattttattaattgtataaatcttatgcaattttctataagcaatcgatagtgtaacaaatagagaagataagttctgatcaagcacacacctttcattatttccggttaaatatgtgttcatattttaacaaaaagcagtcttgaatgtcgtcgaaatttgtggtaattccatggctatagccccgaccaattgcgctggaattttgccatgaggcttattttttgggctggtttcgaatttacaggcgcccatgcaattggagctcattaaaatttttttgtcgatttttcttcaatacccactttaaacgataagcatttcctcgcacaccgctctatttgctctgttttaaacaacaaaatttccccagcattcatacctactttctt

SEQ ID NO: 23011 - DNA, 2254 bp, Heterodera glycines
cagggctggagcgcgaccgcgatccgcgatgcgcgatccgcggcgttttttttgcgcgatccgcgatccgcgaccgcggcaatttgaatccgcgatgcgcgatccgcgaccgcgggatttttctgtgcgcggcgcgccgcgcataatttaatttattaaataaaaaaccaaataattttgtattattttcacttgatataaattaaaatttgaatttttttttaaatttttaaaatttttttgaatttttaaaatttcccggttggtcccggttcccggtttttcttgcggtcccggtcccggcttctcaggtcccggcaagttccggtcccggttttggcaaaaattcccggtcccgtggcactctaatttgaaggtataaaattttgaaaacgaccaaaattccaattttctcgcgcatttaaatggaatatgcaatcagaaaatatttatacattcatcgttcattttatagacaattttcctctttgtaatttagaccaaatgaccaacgaaaaagactctatttggttttattttggcaaaattcacaattcttcttattttacaaatgtgcgatccgcggcgttttttgcgcgatccgcgaccgcggcaaattgaatccgcgatgcgcgatccgcgactgcgggattttttttgcgcgatacgcgatccgcgaccgcggcaaattgaatccgcgatgcgcgatccgcgaccgcgggatttttctgtgcgcgccccacccctgttaggcaggtgtgactgattattaatttgctattcttgtcatttttgaactttttaagtgaaaccccgaagataaatttttgaacagccaattcaaatgcatttcgtaaaaaaaatatcgttaaaattacgaaagtgctctaaattttactggaagatttattttgtttattacgaaattatcaagcaaaaaatctcggaaaggggtagagactatgcacatatttctgaatttttcatcaattttcacaaaattttgcaattataagatactcaatttcgcattaatcatgtccataattttttattaataaacgtaaaattcatatttatttgaaattattaaattaaattatttctttgacaatttacccatttttaattatttcacaaaatttcaaaacatcgcccgccacaaaatgaaaaaaatatttcgaaatgttaaatgtttggaagaaatcgtatttcgaaatttttgcgaaattttgctgaaagataaaccaaacaaaacaaacaagcatttaaatggcgcacattcaaacattgaattcattcattcttttgccatttatagcttaatgcctttttttgtaatttttcatcaaatttaaataaatatttttattttaaaataatatcattattttaaattaaaagaaagtaaatttactacaaaaattgattaatttagcttaaaattcaccaaaaatgcagcttttcgtaagaaatctcgtcgggaaaacaattgtcgtcgagactgatcagcagttcggcactgtccgatcgatcaaagaacaaatcgagtaaattgaaggcatcccaacggatgatcagattttggtcagtaatatacaaatcacttcaaaaatttaagcagaaaaactcgaaataattctaattttttaaattattaagtaaaaaacatttacttatttgattttactattaatataattacgatttatttttcgatttttattcttccattttgtgcaattttatttaattttttaaataaaaaatgaaaaataataattttgattttggtttttttaaagtaaaaacacttacttatttgcttttactattaatataattacgatttcgattttttcttcaattttgaggaaatttatttaattttttgaatataaaaatgccaaaaaaagaataatttagatttttgctggacacattctgcacgatgaccagcagttggccagcaattgttcttcttcttctgctggcgatttgtcctctggcagttccattcatttgtctcttcggcttaatggcggcggttcgtacgatcgatgcgacccaaaattggtgcaattggccaaatgttttcgatgggataagctgatttgcaggtacacaaaatgggtattttaatattcaaaatggcttgtggcgcttggccagacaatagagtgccgacggaactttggccaattccgtcccaccaggggagagcatcatttaactatttttaattgtcaaaccc

SEQ ID NO: 23012 - DNA, 2067 bp, Heterodera glycines
  unsure (1)..(2067): unsure at all n locations
tgatttttgatgatcattggcgatcaaattggtttctttatcatcacactaaatggttatcaattaggtaattcatcgccgctattcgaaataatttcttttaaattttctcaccgattttttaaatgggcgaagaatgaatagcccggttttccgtctctctctcccgccccctacaaatttttcaaaattaaactacggatataataatttttaattattttaatcccccctccctccgatttttaaaaggagcggagaatggtcccaattttcccgtctcccccccccgccaatttgtcaaaaatcaaataggtaattatggactcattaaaatgggtatatttttttaatctccccccccccctgattttttaaaagaaacggagaatgaatggccccaatcttccctcttcgcccccaaatttgtcaaaaattaaactgctcattatggactcattaagactcactcattaaaaagggtatataattttttaaattttaaacccccccccccatctgatttttgaaagaaacggggaatggcccaattttcccgtctccccctcccgcccccgccaaaactgtcaaaaattaaacaggtaattatcgactcattaagactcattagaaagggtatttcttttttttatgacagtccaatttgttgattagagagagatattattatcatcatttaccatctaattttgcaccattttatcagcattatttttctaaatttaaacaacaaataaaatttattaaaacaaataaaattcgtcgaaaatgttttatggttgggagggggtgggggcaatgaatggtcggtcagcagccgaacacatcccgagttttatgatgagatgcgagaatcactctaatcattcacattcattagggctactaattgattacactcattagttagtaattaaaaatagtaacattttctgtgtaatgaaaaagaaagaaacattttggccaaagggttaaagtgcgaccaaaaattagtttatttatttgtctcatccaaaaaaaagaaagaaatatttttttgtccccattttatgcataatatgtatgtacagggacggtctcaggagtttggcttggaaggaatattcaaattttttttttttttaggagagggggtcttaggggacactactatgaaaaatcaaaaatttctaaaaaaattctagttttgagggccagacaaatttttttttgaaaaaaagttttcgaaactttcccggcgggcctattccctaaaattttagtataatatgaccctagaatccaataaattttaaaggccgataaactttgagtctaagaaaatttgaatttcaaggtcgggtgtactgcatttgaaaaaaaaaatgaaataacttttgcctcccttttttaaattcttccttcgcccctgtaattaacgctaattgccacatattgtaattatctcatctcattaatatntaatggttaattatgtgagtgtaatgaatgcctttacagcaaatgcacaaataggaaaaaacaacaacaaaatattcttattgtatttgttgcccaaattgccatcattagcagcaacaacaaaacgacaacaacagttgcactttttttgttgcaaatttgatcacttttttgacgaacttggcattgaattgtgatcagccgtagtggtgatcactgatcgaaaccactttttcgtgcatttgaaaaaaaattggtaatctacgatttttccgcgatttgtaggcctatttttgcacaaataattgacaattttgtagaattatgtagttagttaattaactatctaattgattaattattgcctatagcttttgaaactaaatttttggtaaaaaaatatataaaaaaaattttcagaaaaaacgaaagtgaaaagataaaacgagtttttcgaaaatataaatttttcattttttacaaaagtttccagggcgttgattttatttgcagaccaatatgtatgagtaaacataagggttcggatgtggatttcataacacttatattgttgtacacatcaaa

SEQ ID NO: 23013 - DNA, 1085 bp, Heterodera glycines
tctcagaagaatagatattctcagaaaatggctatctcttttttctacaccgttgtacatgtgggttttccccaaaaacgcattactatctgcggttgagccctacaaaaggtcggtttgaaaattgctgtctcagaagaatagatattctcagaaaaatggctatctcttttttctacaccgttgtacatgtggggtttccccaaaaacgcattactatctgcggttgagccctacaaaaggtcggtttgaaaattgctgtctcagaagaatagatattctcagaaaaatggctatctctttttttctacaccgttgtacatgtggggtttccccaaaaacgcattactatctgcggttgagccctacaaaaggtcggtttgaaaattgctgtctcagaagaatagatattctcagaaaaatggctatctctttttttctacaccgttgtacatgtggggtttccccaaaaacgcattactatctgcggttgagccctacaaaatgtcgggttgaaaattgctttctcagaagaatagatattctcagaaaatggctatctctttttttctacaccgttgtacatgtggggtttccccaaaaacgcattactatctgcggttgagccctacaaaaggtcggtttgaaaattgctgtctcagaagaatagatattctcagaaaaatggctatctctttttttctacaccgttgtacatgtggggtttccccaaaaacgcattactatctgcggttgagccctacaaaaggtcggtttgaaaattgctgtctcagaagaatagatattctcagaaaatggctatctctttttttctacaccgttgtacatgtgggttttccccaaaaacgcattactatctgcggttgagccctacaaaaggtcggtttgaaaattgctgtctcagaagaatagatattctcagaaaatggctatctctttttttctacaccgttgtacatgtggggtttccccaaaaacgcattactatctgcggttgagccctacaaaatgtcgggttgaaaattgctttctcagaagaatagatattctcagaaaaatggcta

SEQ ID NO: 23014 - DNA, 1647 bp, Heterodera glycines
  unsure (1)..(1647): unsure at all n locations
tacaattccattatgattatttgcgcggcggcggcatcgtggcgtggggagggagggcgttgaggaaatgcaaaaaaaaaaaagcacacgtgcagattttcaaaattcaggataaaaaatcatataaaaaatctcaggatttgagaaaataccccaaaaggtttgggatcaaaaaggaattaattggcaaaagaatttccttcacctgtcactttggtgacaggtggatgattgatgaccttcccgcggcgctgcgcggcgcgggaaaaaaacacccgcaacaatttgggaaatcggatttggtcaggcggcaacttcaaagtggtccaataggttttggttttgaaacaccccccatcgtggatttttgatggggcggcaacttcaaagggctgcgccctcccataggcacgggtttgtgcgggaaacacccgcaaccaacccgcaacattttgacactttatactaataacgtgatgtcccatgatcgaagatattcgagattgcaattattgaaattgataaaatctttgaacgccgcgggaaattctttaactgctgcatcatgcagcggtatattattgatgttgtcgttcgagttgaattttagatataaatcatttttaattaaaattaaacgaaattaatagtacttataaaatttattaattaattaaagtaactaaatttttctttttattaagtattctcattgttctatcttgcattttacatgaatttttataattaattattcgtttttattatcgaattttaagagagataaaattgagttttatcgtaaaatgcatacaagagcacgtctatactgattttataaaagtttttagtgaacggtgtaatttggcttagagtatttgccgatgtgcgacgtttcggtgcgggtgagggagaccggcttatcgaagctgattgccgttaaatcaggcagaacaaatgtgcgattgttcataagccatgactcagcatacaggcacacgaagtacccacaactattaccatcgtgttggaccgtcagattttcgacatcaacaatccatgtcaacactgctgacggcaaaatatccgaaatgatatttttaattttatccgtcattgcggatccaacctgccatatggggtaggcaaagaatcggcaaaatgagtgccaaattgcacatcatggacaatgagagtccaatgtccagggaaatgtacttgcaaaagtataacttctgccggaacattagggtcgtacccaaatgtcatatttttgtaatgcatgactctgtccaggccatttctccataccattgggtcaacaacgaccacttttcgttgtgatacggttgccaagtatgccaaatatgtggcagcaaagccgtcattgagaaactgggtcagatcattccaacaggtctcaatgtatcttgggccagatcttggggcaatcggtgtttcgccatcacgttcgtaaaggccgattgctgcccatttccaaattttacaggcaaaatttcgcgatgtagcgaaattaattgacactgtgctgaagttnatcttntcaggcacangttgacaaagggtcactgatgtggtagcttcagagctctggtccattgacgagctctcgctcatggaatcatt

SEQ ID NO: 23015 - DNA, 1435 bp, Heterodera glycines
tcgcgcccgttttttagcttgttaggctgcttcgcagcctcagtcgggcgcttcgcgcccgtttttcaaaatttgttgaccttatagggattataagaggtacaataaatggtagaagaggtaaaatagtgattagaagaggtacaacagtgatcagaagaggtacaactgtgattaaaaaaggtacaaaagtgattagaagcggtacatcaatgattagaagaggtagaagggtaattagaagaggtacaaaagtgattagaagaggtacatcagtgattagaagaggtagaagggtaattagaagaggtacaaaagtgattagaagaggtacatcagtttaaattttattttttacaaattcaatgtaaattgaaacatgatattctttaattttttattcaaaatttaaaaattatttttaataaaattttcaccaaaaaataatttaattcaaatgaaaaatttttatttattattaataaaattaaaaatattttaaatgaataaaaattgaaaaacagaaaataaatgtgtagaaaattattgtacaccgtccggatccgaacctgccccctcccccctcaaattgatgcctcagaatccccaatcacacagggattctgaggtcttgacgatgtcaaaagtaaaatctgatcacgtattcgtgatcagcggcccaaataacccctaaagacatgtttttggaagatttttgtgaaaaaaattttccagtcaaaaatcctggtcacccccctttggtcccgaatccaaaaatcacttttatttttataataattcttaaaaaagtgataaaaagctaaaataaaatttataaaatagaacaaaaaaatgcggatttttgtagtatttcatatttccagaatgacttttcataaccgagttatggatttttttctgaaaaattgaaaatttccagaatttctggaataactttttttcttttgaggatagaaatcccaaataaacctcataaaattctcccgattttttgccatttttaaagctttaattcacttaaattgaccagtcctccattgagttatgaattttcaaataataaccaaaatttccaaggaccaaaaaaaataaaaatattttcgaatttttaaaaaattccaaaaattctgaaacgtaaaacaaacatcatattcgtgctcagcacctcaaattaccccagaaaaaaaattttcacccccattttggcccacaaaaaaaaatttgaaaatttctaaggggcctagctcgaaaaattttgaaattttccagacttatagtacaccattcgatagagtttcgaaagctctacaattttgccctaaggccattttttgctaaaatcaacccatgacgagttatgggcccgggactcaaatgtcccgctcaggccaaattttttctattcccgggaaaa

SEQ ID NO: 23016 - DNA, 3469 bp, Heterodera glycines
tttgcacgaatagttgtggcattaatccctgctactctccctatccctattctaccagtttccagttttcagcttaccttgggctgtgacatgcggcgccgtcgcaattgttccacgcggcgctgcaccgcttcgttggccgccgcgtactccgcgcagcgcggatggtgccgaatctgagaatgaataaaacaagaaatgctcaaattgggcacttctctgcgcgaatgggacatttcgatgaattggcccggcataaatttcacttgtcgtcgctgattttttgctaaataagtaattagccatacattaattacattttctcttttcaacctcccaattcatttccgtcgtccccattggccataaatgagccgaatgaatcgcggccgacactttggcgctttttgctctgaatgagcaaacttagcttttttttttgtaattaattgtttcaaattttaattaccccttttgcctttagcagacgacttcgctttcgactgatggccaacagcggcggttcgtcggattcggacggatcattccgcggccgattcatcatcagaaaaatgggcaaatagcgcaggaatacggtacgaacctggcacagtaaatttaaaaattcgaatgaaaaatgagtttgattcggcaaaagatggcaatggcacacattactcacccattcgggcattgtgtgagtggtggggccacggaaataaatgttaatgatgatgaccgtgaccaaaatggtgatgatgttcatcactgatgtgagtcaaaggcgtattaattaagctaattgtaagccaattaccaaaagtcatcaaaaggtatttggcaatcagaggaattgtgtcggaagtcggaggcaaaattttggagaccaacagaagaaaacgacaagggccaacagaatgctaattgcctaattagcaaatgagagcaaattaattaaaattaattttttaaatgatttaaaacataatttaaattttataaatgtttgatgcaaatgccggaccaaagtgattttttcgtcagcttcggctggcaaataaaaaacgagcatcgaaaggaaagccatcagtacggtagggatgatcaggattacggtatagaagagagttttccttaaatgggaaaatgtgtttttatttgaattttcaaattcatttttattattttgctctcgctgatcattcatttcccaccgtctgattttgatttgatatgcaattttgcttttctgatggatcagttgccccggcacttccattatgtcccaaattccgctctccgagtaatcgttgagctccgcttgacgcttattgttcaaatagctgatgatcacctaaatgaccaaaccgcaatgagccagaaagttaatcaaacagattatttacataattaatcgcattattaatttttaagttttgtagtccgtcctgattaaatccaaatttccttcaattttgtccccatttgatcatttgccaaataattgatggttttggtcacttcgtctttgttgaaagtccacgatccgaaaatcattgcacaaatttgttcatcgaacgggaaaaactcgacgtcgatgatgcacgaggatttgtatatggccggcggaacccacaacatttccccgttgtgctccaccacgacattggaataaaaggctaattggggggggggggggaaagcatgagagcggtgatcagatcagagacagaaaagggactgatcagataaaagaggaaatcagtgagggaaaaataattagagggaggaaggggaatgataagaagaagatcagtgagggaaaaataattatatcagtgatcagagggagggaggggactgatcaaaggaatgaagaaaatcattagggaaaatgaggtagggagaggactgatcagaggaaaagagaaattagtgagggaaaatgaactgatactgatcaaatggacaataagtagcaaaatgacacttacaaacttcatagttcccatcagcattgttgaagcttaacactcaattttaaaccattatttaactcatgactcacagaacgatgtcgggcagccaaactttgtcgggagggacgcgaattgtgcgaatgtttccgtattcaagcggattcctgttggaaattaaatttaaaataattatatttttaaaatggaatgttggaccattgcatttggtagtcaatccatcgcattgttggccaaacgttcgtttgcataatctgaaaaatattttatttaaattttttaaataattaaaaaataataaaattaatttaattaatgttaattaattatttgattctcaatttgtgcctggtttttctcgtccacattaattagcaaagtgagtgccaacgaaaagcgaatttccaacggcgtcgacgaaacatttggcaccggacggatcagatgattatagccacggaacagatcggcgatcagacgctcttcaacgtcagaagggaacgctgaaaatttattattattctattaatgattaattaaaacaaatttggccccaaaaagtttcgtcggactggcacaacaacgaaaaaaaaaaatttatgaaaaattggccaaaaaattaaagaatttaatcatcatcaaattgtttttcccaacaaattcgatctcatccttcgccttccatttgctgctgcgctcgcgcactgagacggcgcaaaatttcctgttggtcccaaattcaaaaacgtgcggaacactgaacataatgtcaatggtcccgcccaggctaatgcccaaaaaactgaaaaatcacatccctagtgattattttctataagaaactttacacaacaacaacatacggccaatgaccttggaaaagaaaaaaccaaccccccccccccccccaaagggatttaaataaaatggaactttgcaagtttttgaaaaactttttttgctccctcctcccccctctcattttttcccccaaaaaaagaatagatccaatcaaaagcgccaattttttgccccttttttggcccccccttctgagaaaatttattaaattataaaattaaatttttctaaattaaccaaaccccgcgagttttggcccaaaaaatttgcccggttggcccaaaaagggggttaaaattaattataaattattttatttttaaaaaaaaaaaaggaaaagggcaaagggggggcaaaaaggtgcccccctttctcccgtccccccccccccccccccccctcccccccccaattttttcacccccccccccccccccccccccccccccctcccccctccccacaaaaaatttttctcccacccccaccacccccacaccaacaaaaaaaaaaagaaccaacacccccccccccctccccccccctcccccccccccccccccccccccccccaaaaaaaacaaaaaaaaaaaaaaaaaaaaaaaaaaaaa

SEQ ID NO: 23017 - DNA, 1317 bp, Heterodera glycines
atttattattttatacaataaattatatttttataacttctcttacatagatgccaattaatggataattaattattaatttatttttttcatttatcccattgcatgatggtcttctttttaataattgttaattgttaattatttttattttttattttatacaattaatataatctaaaaggattaaattttatacttttaatattaatatttatgtaaaatattattttataaaattataatgatattttgatagaaagaatttgttattcactttttttattattttattcaattattgtaatttaaaagttttaacttttattttttaatattcaaatattttagttaaatgccaaaaatggataattaatgaataattacctaattgtttccatttgccccacccattgcatgccttcgtccctcatttgtgctttttgcccatccctttttttgttgcttatatctaattagtacctgtctgttgtgactttagggatcacgaagcgtttggccatttgcaatgatttgtgtcccctaatgcctcctctcgacgaagaaacagcagaaaacgagaaaagtacaaaatacacataaaacgggagagacagggagagaaacagcacagagagagaaagagagagagagcgcgagaaatagcgagagaaagaggggagagagggaggaagagaagggaaagagagtgggagagagagaaacaccagagggagagaaaagcataaaatgagaaagcgagagagaaataaatataaggcgatgcttatcatgagagaaagagagagagagagagaaacacagagacgaaaaaaatgcttgagaaaaatttaaattcatgcctccacatttctaaggtatttccatcattctatctttgacttttctttctttctctttcccttgtgctctctcatttttctttaatttcttagctttcactattttgtttgacacactctcaatttctttgtttctctgcttctccttccgtttcaacttttcctacactcctcttgctctctgcctctttctttaaatcatttgcttctctattctatgccggcttttccttgtctctgccactggtttcattgctttcgccctgggttctctgaccgtgtccctgcgtctctgatccttggattggccacctgcttacctaagcaagtgcggcgctgcggtgcggcaattggcgtgtcggcattgtttttccaattggccaaccttggtcaaacagtgaaattttatttagagaaacagaaaagcatgaggataaacacatataaacgtcat

SEQ ID NO: 23018 - DNA, 1217 bp, Heterodera glycines
cactttttactttgtccctttctctttctctctctctcacatgtctctctcccctctccctctttcttcactctcttctctttccctctctttttctctctcattgtctctccatttctctgtccctctctctctttctctctccaccctaaatatctctccatttctctgtctcttcccaaatgcttttgctggtgccctgagggcacaacagttcgagcagcggcagcttttgctcggccctttcgttttgccaaaattttgcttttcttcttccttcccttaattttatttagcacaaaaaatatttatttttggcattgtaaaaaatcataaatcaaattaaattcgatttaaaaaaaaacaatttatgtcaatatttttttgatatatttaaaaaatttgaataaaattaattctaaaaatatttccttgctaaaaataatgaatttttttttggaaactattggactattttatatttttaaatattaattaaaatgcaaattttattttttaattaaatcattaaatttaataattattttttcgcattgattgctttgcgcaatttttagattttcttttaattactttcgcgaattcatatgaacacaatgaattgacgacatccaacgagcactactgaatttctattcttatattgtaattgcttttgggcttttcaaaaatctcaaataaatttttaaattaattaatataattttaaataaaaaattttttacaaaaattaattccaaaaatgaatttatattaaaaaataattaaaacaagagcaaattaaaataaaaaaataaattaatggttaaacacaaacgttaaaataattaattttatattaaataatattttctgtttcaatttttaaattttgcattttatttatttttaataaataaataaatattttttttaaataattaatctaatcaatttataatcaaattcccagaaaatatgcaccaacaacaaccgtcgtcatcctcggcagctcacaatggaccacaggtgccgggagcggaagaacaaagaacggcatcattaactgtgccgacacggccaacggatggtcaacaacaacaccaacagcagaatgctgtcgaaataattaatggtaaaaataatgaaaataatttatttaattaaatattttaatattaaaatatttaaaaggtataattaaaaataaaagggaa

SEQ ID NO: 23019 - DNA, 951 bp, Heterodera glycines
ttgaaatgcagtggcaagcacagcgagtcgcttaaatgcacaccctctgacacgtaaaatataccaaaaaaagagatagtgattttttctggattagagcggagagataaaaattatcagctatatgaaatgcagtgggcaagcacagcgagtcgcttaaatgcacaccctttgacacgtaaaatattccaaaaaaaaagagatagtgattttttctggattaggccggagaaataaaaattaccagctatttgaaatgcagtgggcaagcacagcgagtcgcttaaatgcacaccctttgacacgtaaaatattccaaaaaaagagatagtgattttttctggattaggccggagaaataaaaattaccagctatttgaaatgcagtgggcaagcacagcgagtcgcttaaatgcacaccctttgacacgtaaaatattccaaaaaaagagatagtgattttttctggattaggccggagaaataaaaattaccagctatttgaaatgcagtgggcaagcacagcgagtcgcttaaatgcacaccctttgacacgtaaaatattccaaaaaaagagatagtgattttttctggattaggccggagaaataaaaattaccagctatttgaaatgcagtgggcaagcacagcgagtcgcttaaatgcacaccctttgacacgtaaaatattccaaaaaaagagatagtgattttttctggattaggccggagaaataaaaattaccagctatttgaaatgcagtgggcaagcacagcgagtcgcttaaatgcacaccctttgacacgtaaaatattccaaaaaaagagatagtgattttttctggattaggccggagaaataaaaattaccagctatttgaaatgcagtgggcaagcacagcgagtcgcttaaatgcacaccctttgacacgtaaaatattccaaaaaaaga

SEQ ID NO: 23020 - DNA, 265 bp, Heterodera glycines
ctgcggacatctacatttttgaattgaaaaaaattggttttactctttctttttctccatattgaccatcatactcatactccccccacccttttcttcttccgccacccacctcccctgctacgcgccgctcccctccctctcttggtagtttaaactgaaggcgggaaacgacaatctgatccccatcaagctagcttctgcaggtcctgctcgagcggccgcccggggatcgatccccgatctagtaacatagatgacaccg

SEQ ID NO: 23021 - DNA, 1848 bp, Heterodera glycines
  unsure (1)..(1848): unsure at all n locations
attcgccaccatcaattggagattctcncatctttctcatccacttttcttctagcacatccccaaatgatttgtcttcncatcnttcaggaatggcaaaagtcgcaaaccaaaaacgaaatgagcgccgaattcgtgccgtccaagacttggcgcggcacctcaaccaccgaatgaaccgccatcgccgtgggcagcgcgacggaaaacgggacccgtcagaggaacggcacatccgaatgaccaccgaacgttatgcggatcagctctctcgcctgggagatgaccacattcaccgactgcagcaccaattcccgcaactccccaacccccgccggcgtcgatcagaggtggggggcaatctgaaagggggaaagtcccagccaaaattggcatcaatggtggtacgcccgccccagggagagttgctcccttcaaaggatgtcggcggcgcagcaccgggcgcatcgaactcccatggccgaaacgagaacgaagaggaaggccgagaaggaaagaggcagccgcccgagggtgctccctccgccgggggacagttttggagaattgctgaagaaagaggcgaaagctcgggccgaagtggccgagctcgaagcccgggcaaagaaggcgaaaatggagagggaggaggaggaacagaaactgaaatcggcgaaggaagcgcgccttcgggacttggaaacccaagccgacgacttgcgccaaatgttgggcaatgcgagctggccgtggtcgaggggcaaagacgggaaaaatggggaggcggtggctccccgcgctgggaaagcggtagccatgccagcagtgccgatggaggatgatggagtgtcacttgccgattcggaaatggaggtggtgccggccggggcagtgtcgcaagaagcgacgagatgaccaaaacgggcgggaggtctgctcccgccaaaggaggaagccattcatgggaaggttttctagtgttcggagtggacgatggaaagccccgggaactgtcacgggaggagggggactatttcggagggggtgcgctcgatcacccggtggcatttccccgccgggagaagagagggaaaagaaacaagtggtcgaacgggagcacttcccgtcgcaattgagggacagagcgagaggtgtcaagaaaatgatcggaatttgccttttcttcccaattttctctatttttcacctttttcctcccaattttctcaatattctgctatcgtaattttattcaatttgtcgtatttcaattttgcccctttttctcctctttttcacatctgcgtctgctcttccccctttgccccgccgctttgccatttattttttgaattcacctttgtcttcattttggccgacacttcccctccggccttctccgattcttttccgattttccccattttttccctttgttttgttaattcaaactttggaccattcacatttttctattcacaatgtttacgcatttttctatgccagggagccatcttctccccggcatttgactctctttttttttcttatcgcatcgttcattttgctcatttgtccaatttgcatttatctgggcctaacccccggggggggggaaatatttaccaatcacccatccccccccttttcatcactaatttgtccgtcacatcattcattcgttcacttttcttcctcactcccctctagggagaaaaagttgttctttttgccttaatctctcaccacaccactcaatcacggcattcactgttaatccccatttttgccgtttgtcacatttgcccccccccctcctctcacgaggtttaattacccaagtttgag

SEQ ID NO: 23022 - DNA, 1589 bp, Heterodera glycines
aaaaacaatttattacttctgctttttaccttccccccctaatcactttgaacacttttaaacattatcttaaacttaaaatatattttttattattaataatggaattaagctaaataatttttataaagaattattttttgttcattttcatttatgaataacaataaaattgtcatttagatttaaaagcattttatttgccaataattaactttgaatttaaacaaaaatatttttgaaatttgttgttctatttttggtgtctattttcataaaacgctctttaaagccaatttaatagttactaattattaaaataattaaatattaatagatttatacattatgaacgaaaaagagttaagccatgaggcaaaaaaaatatcattaacaaaaatgttttgatatttaaacaagtttcatagcttataaaacatcttaatataaaataaaaataaatataaataatattttcaattatttgtaaatagagcaaacaaaaagactattatctcaaaattagaaaaaagtaactataaaaaatgaatttattaataaaaaaaatgatgccgcacgcaacgagtggaacctctgcacgttaggagaacatgaagataaaataaataataatagtatttcaactccaaaaaaaagattaataaaattattaaaaacaatatcaataaattttatttataatgaaattagagaattcatttttgaataattgcattaatcgtttttaattatataaataattaaatataacaaattatttaataaggcgaaaatatttccaatctattacctttacttcataattattagcagcgctagtcgtgagaatacagtgaaatatatgaaaaacaaatgctaatgaatgtaaaatcgaaaattaaattaaatctatgaaaactatttaattattttaaaagatatacctaacataatttaaattataaaaaacaaaattccttttatatgtcattaattaattctaaatcaaagatatttttgtgaaattatcaaactaaatttaaaaattagaatttttaatggagattttgaaatttacaaaatttcctttccctgtccaacggtgacagtgtagaaaaagaagtgctgatttcagtgcccaaatgtggacactgacaatgagggttctctgtgacccttgaatgacccaacggtggtcaaattaatggtctgtatgaaagggctgctgattgtccctttaacagatttagagaagagctttctcttactctttattcaaatgaacacaaacacaatttgtgttaaatttaattggacagttcctgccccaactgacttgcacaaacatgaacaagtgaagaaaatggagaatgggccggcttttataccctcacaaatcaatggggcggggccaggcacgtgaaaaatgtgcgcaaacaaatagacaaaaatccattaaaaatggtgactcatagcgatgaagagagaaaaaaagatgagtcataaaaagaggaagcgaatgagggaaattgattgacaaattaataaaaattaaatataataaatttcgaagaaatttgtgtcgcttt

SEQ ID NO: 23023 - DNA, 2934 bp, Heterodera glycines
ttttgtcggaatgggcaatttgtttgtttttttctactgaccacaagttagcatcaacagagccccattaaattcgcaaaaatgggtcaattaaaacagtaaatcgtgaaatcattcgaaaaaataacttacttagagaacaaaagtgctaccatttgccaaacaaaatgtactgtagaacagcagaagaatgaaaacactgtaaaacaatttaaaaattgtaagacaaaaaacatttgaaatacaaataaaaatggaaaattgacaattttcatttaataaatcacggaaaattacatgaatttttattgcaatacaaaaatggcacaatgagatgagaatgaataagctaattaagtgtaaactaaggcaggctaatctttagatcgccattattacacaacgcattgagcagtttgggggaatgaaaatcggaacagattggccaattattggttgatcagaatcaaaaagggagggcgagagggtatcaaattgaagggatggcacagacccaattggttgattgattggttgggttttgatcaatcagattatcgattgatcaggaatttgcagttgtgccgtgggcggtgacggattagaaaaagtggcggaacacgcgggcagcgtatttcagccaggcggggatcagacagtcgcggcggaggaacacgctcgggtcgagcagttcagagtgggcgaacagcgaacgcttctcctgattgggtatcatgtaaagtaattaatcgctaattatgccaaaattggaaagagaaaacgaattttttttttgaaaaacgaacgaaaaatagctaaattattttattattttttttctcaaaattctaaaaataaatttgaaaaaatttatgaaaaactgctccttggtcccaagtgcacctatttctgtgcttttgtactgatttttgctacctcagcaatttgctccctcaacgcgtcgttgtccgtcaccagcaaaagttgggcctccaagtcgcggtgggcggaccgaaaaccttggggaaaatgcaatataaaaaagggaaaaaaactatcaccaaaggggagaggcatgctatacacattcttctcggaaattaaaaaaaactgcaaattttaggttttaaaaaaaatgaaatttttttgattttgagtcaaattaaaaaaaaatgggaaaatttgggtaaattttatatagtagaaatttgttaagaaaatgtcacaaaatttcaaaaaatatgtttggcatagttttttgttttagttttttaccaaagtttgacgagcccacaatggttgcaacacgagggccagggcaccaagcagtgtcagcaccgtccgcagcaacagcagcagcagtggcatcattttgtgggcggcgccggtgccattcctccacccaaatgcccttcccatggaatgtccagccgggccgtgtccactcggaaaaagcgatgcgatctgtgcattttttgggggggggggagactcaaaaatgagaaaaaacgaatggcgaaaaacataaaattatttttgaataattttggacattttgggtcaattttgaaaaaaattcacacatttcgacattgttctcgagtaacgtgaactggaaaatatgaatattcaaacagaaacaaaaaagaaattttttaaaattgaattttcaaattcacaattttatagaaatccatctatttaaatggttggttgaaagaccatgtggccttctgctgctgcttctgtttgtagtaaatcacctgtttggttcgcctgcacagcgcgacggacgaagtccaacgcgtagtgttcgtacatggcggggatgtgcccggacagtccgtgcgcaccgaggaaaccgttggcctggcacaaaaaacaacaacaaaattttaacaggtctccgggttcagttacagttttcagaaaaacacaagaacagaacccagactgggaccctggaaattcacatacagtcctgtccgaactctcattggtaagagcgaaatctgagcctatttttttgaaaaatttcgcatttctttttggaaacttttcaatttgattgggccaattgaaaattgcaatcaaaaaacacctgtggcgacgcgaacacaattttgaacgggtcgcggcacttgtgcagaatgaggtcggcgtacgggtcgaacaggttgaagtaggcggagatcagcgtgaactccagccggcggaggtcgtcgtcgccattttgctggaaataaaaaagaaaatttagaaaaaattgggaaaaattaaaatttcgctcctcggaaattttacccaaaatttagaatttttccatttttttttgtacttacgctgctggttgtggtgcagctgctgaacaatttgctgaacaactcaacttcctggttcacgttgaacaggcccatctgcaggaagggcaccacaaaagtggtggtgccgtcggccccgtccggcactaaatttgggaaaaaatacgacggcaaaaaaagttgccggaccaccaattctctcactgggaaataaattcaaaatttagtgcgcttttttgacgtaattttgctactatggcacaccaatttaaacatatttttcatttataaaagacagaggccatccatctcccatcatttgtcccttgccactgctccgcctgccatttcccggtggagcaggacaaaacgtcgccgcaatttttttttttaaattttagaaaaaaatctagaaaaattgtcaaaaatttagttagctaacttaatacgaaaaatttttttcaagttttttttcccggaaattcagcaaatttagtttttattaacacttagattttcaaaaagcttaaatacttttaagtttcttgaaattttgaaaattttttattttttttgcggctacgtttcggcggcgacgttttggggtgtaccc

SEQ ID NO: 23024 - DNA, 1060 bp, Heterodera glycines
cggaacgccgggagaacccggaagtccggggattaccaggacaacccggacatctcactcacggtttgaaagaaaggggaagttttaatgggtgattttgttcttttagcccaccctatccaaggaccaccggtttgttttgcgatttcgccattgaattgtccgctttatccgattcgaactgccacctcccctattcagggcgcatacggaatccccggagagcctggcgagagcggcactccgggaacgcccggattgcccggcgagcaaggcctgcagggataccctggcgacgacggtttcccaggcattgcaggcaaaccgggatctcccggggagcttgggccgcctggcgaccagggcaagcagggcgggtgcgatcactgctcaccgccacggacagcgccgggctattgatggcatttttcgaattttattcattttatgtaaataccaactttttatttcaaattgaaaatcttttggcaataaagatgcattcagttacaatcatattgtaattctgccgatttcattcgctttcttccgattgacctcaacagagtgtctataactaattatttccaatgcttaatcctaattatgttcaattccttaatccataattaacaattattttgaattgctattaaatggtcacgagttttcccgtccaaattggcccaattgagtaattttgttccaacacatttattcctcgaaatgatcgttcaattcgcttttggaccctttgctttcccatttgcccctctttcttatttcatgccaccatttgtgccgtgcgtcctccttcgaaattgctcatcgacgacacttgcgtcgtgtaaatgcgcattgagttaatttggccgagtgtcgggtcgattaggaactgtttgatgctgcgtcggatgtatttgttcatagtgatgtaaatgaccgggatgaggcctaagttagggacaaacaatttaattagccgcaattaagcattaattgactttatgtattttggtattaccctgtgaggcaatccaagtgtagctggcggacatta

SEQ ID NO: 23025 - DNA, 2078 bp, Heterodera glycines
tggaatttcatatttcaaatattttttattcaatccgaaacaagtcactgaacgttagttcgacaaatttaataaaataaaataagtttttttttttttggttttttaaatgttctcataaataaaatttaaaatttttcaacaaaaatttgtttgaaattttttgtgaatccaaaaatatcaatttcaaatgtttatgctttttcacattttgtccaatttcccgaacacaaatttcgttgaaggcacatgccaacgcaaattatccacaaatccgttaatggacttcctgtactcggcaaaatctaatccaagcaatttaaccatcactaaagagttaatatgtagtggaaaaaacccataacaattttctttaaaactttccaatagaaattttaaaaatctaaaatcgcaccgcaaaaattaatttaattctaaaacattctaaaaagaaataaactaacaaattgcgcgatcgaattgaaatattagacaaattaatcgcaaaattataataaaataaataattaaattttttataatttgaaaagttttccaataaattaaagtaattaaatttttaaatctctaaagagttagagattataaaattaaataattaaatatttttgattggaaaagttttacaataaattaaacaataagattttaaatctattaggaatcattctttaacaagttaactcttttttatcctttttataaataaatttattcattaaaaaaatttttaagaaaatgaatcgccaaatgtttttattcttatttttgttgactattgtccaatcgaattttgaatttgttcgtgaaagtgaaggctggagcgcctcggacaacaacataaattcaatttttccacaaaatatcgtaaatttatttgtttaattaattcatttatttaaaaaaaaaacaaatattaattttctttaaaaatgtgaaattacaggcgaatgaatttggcaccacaaaaaatcgtcgagcggctgaaatgaattttggcaaagatgccgaaaaacagcataaacaccacaatcatcatggtaaaagttatccaaaaattttaaattgagattaattaaaaatttcaagaggcttggggctatgatgaccatgacgggcctcataagtggggaaaacaggttggaaattctaattgaaaattttaatttcttttttaaaatttaatttttttttaacacagtgtcaacacggcacgcgccaatcgcccatcgacattcgaacatcaaatgttgtgaaataaattaattattgcttttttttgggacttttgagcaaaaatcctccccccccccctcctccctttccgaatataaaaaaatgatgaaatttaatcaaaattaaaaaaaaatctcatcaatttaattttgacatttaaagaaagctcgaaatttctactatttaaatgattaattcgttcttagcaaatttcctgttagcaattttacttttttaagaaaatttaaaaattctgcagcaaaaacgaattttatgcttttctcatacataaaaataataaataaataataaatctaattatttatacattttaattattttaaaataaattaatgaaaaacacctaaaaataataattgtagttggaatttgccaccatcaatgagctccaatttgtgaattatgacgtgtctggcgctgttgaaatcaaaaacaatgggcacacaggtaaaaaaaaaagtcaaaaatttattaaaatttaaattattgaaatttaatggcacattgggataaaaaagatatttaaaaataaaatttaatttattgcaaatttaagttgttgtaagcggcttcgaaaagtggcaaaaccggcaacggccttacatttacgggggcggtctgaacggcaaatatttgttggcccaattccatttccattgggccgcggaccatgacgacggcagtgagcacaccgtgaacgcattacactatccaattgaagtgagaaatttggaattattttaaaaaatcctatttaaattaattgaaaagcgcaaaatttgtcacttgttggacaaaat

SEQ ID NO: 23026 - DNA, 2013 bp, Heterodera glycines
  unsure (1)..(2013): unsure at all n locations
gaaaagaaaaaaatagtcaaatttatgaaccgttaatgattgatttccgatcaactttttaccgtcggatccaatcgaaaaatcttagtcgacccatcagccccttttaatgcatcccgccagcccttaaaaatttatttttcagcattttttgatttttggaaattttttgaatttaattgaaatttttcgattttccaaaatcccgcaatcccgcacgggatcccgcaaattttaaatgcgggatttgcgggattaatcccgcgggattccgtcccgcaaaaaattttgagttccagtcccgcagcgggatccgcaaatttgaaatttccggtctctaattaatattgtgtaaaatatgaaaaaaaacttattttttaaaattattttttgacctcacaaattttatcagaaaagattcttttaaaaagtgaaaaccattaatattattttaaaaaacgtttaaattaagtaggattttttatttacaagaaatcagtagaaaggcacattttaaaaatgcaaatataattaataaaataacatttttataagaaatatattataaatttttttgaaaaattgtgaagaaaatgaaactctgcctattattaattccaattataatattttgggtcattaaaattgaccaaattgattcaacaaataaaaattacaacagaaatcatttgacgaaatatttggagaaaaatgggaagagaaagaagaagaaaaacgaaatgaactcaaaaaaagagaaataattggtaaatattataaaataaaagagaaaattaagcaaaaaggaagaaaatattcaacaaaagaatggaataaaattaactcaaaaatagcgaaaaaattagggacaaatcgaaagagaattatcgaaaatggaaaaactgtaaattactgatcaaaattttatacatcactattaaatataaattagatttcgaccttgacaataatgatttagtttcatggaaccaggtctaatttattttattttatttactaaccttggtttttcctagacctgctggattttcttggattttcccagaatacccatgtccagcaggtccaaacaaccaattttttccggcgcaagtggaacttaatgatttttaaaattaaaaattcgattgactttttttaaacaaatttctacaagcggaggtggagaatgcttgaaccactaattttcatcattttgcaattttttaaacactcactttcggattttcattttacatattttccaaaaaaataattaattattttcctttttttaatcaataaaatagaaaaaaagaaattatttaatagaaaagaaattcttttaaacaaatggtaaggaggaaagaatatattatctttttttcatttttcaaacaattttttgccgaagaccattagagagttgtgattttttcatgtgaataaaaggctcttaattgacttaacttaataatgtgaatttatttaagaaaaaaaaaaacataatatagattcatatttggaagataatcccggagaaatgaaattattgttattattctttttgattttaattctaattgccctaattagccctattggatcaaaagaaaaaaaactacaagaaaaatcatttgacgaaatatttggagaaaaatgggaagaaaaagaagaaaaagcgcaaaatgaacagaagaaacgggaaataataagaaaatattataaaattaaagagaaaattaagcaaaaaggaagaaaatattcaagaaaagaatggaataaaattgatggaaaaataacgaaaaaattgggaacaaataataattatatttataaatggattaaagaattggggctacaaaaaagctataaattgaaaactgatgaagaaaaacgtgaaattgtacaaaaattcattgaaatggcaaatgaatataagcaaaaaagaaaatattcaaccaaagaatggtgccaaaattatgtcgaaangtgcaagaaaattggagtaag

SEQ ID NO: 23027 - DNA, 1729 bp, Heterodera glycines
aatcaagctcattatgctctacaataagtccgctggctcctcctcgctcagatcaaacgctgacgcggtattcacctggtactgaagtggacaaagttggtactgaatttctcctattttctgcagcccttcctactataggtagaggcctggaattttttttgacttttagacaacacttcaacttaggttcctaccagcggaaagtttttgattcgggatttagaaaaaaagttatgggccgtcaaacgcacgaaaaaatgagaaatcagtccctggtactcagttggcccttggaccggaaaacctatatttttcccggatgcgcctcaaaaagttgtaagacccttccactactttcagggcgctcccggccttcggccgggagattttgtttttgcagacgaaactccttgtcaatataacatatatataactagcgggtgtgtgcatgcgagggtggcgcttgggaaagcgctgcgcgcttcttgagcttcgctacctaggcgcgttttagtctgttagggtctttgtgtcagccgacatgcacttggtttcctccaataattggagttgacacatcgcataatgcaatggaaaccggaagtgccctaacgttgcacgtcatggccctcctccctcccttagtccaggcgttggcacgttattgggttgagcgctaaatggcaattcacctgtaggccctaaagagggctgaccggtccatgtcccggatccaagcttctcaccattttcgcacccaacatagtgcagatgggaatgggattggcatctctccaaaaaccatgtgcccaactgctctggactaagccatttattgtaacttgagcatattagtagctacaatattcagcactttggctcggccttgggcatctatttcccggttgggagcatgaacacggacattgtttccgtctgttgcccgagagaaggccgtatacaattgaccgtgggaaaatacttccctttccagatcaatgccgacagtgcggattgtttggccctgacctttttgaatggtcatagcgaatgcaggctttattgggaactgcaaacgctcatattttatgccgccaggcgatttgtcttcatagacatttcgtgttctttcaagaaagaatctcacttggccgccaatagcattgctattgataacacgaccaatgaggcgatcatcgccaagttcttccagaactatgcgtgtgccattgatcagtccttccttatcacttttattgataagaaggacgacgacgcatccgactttaagccggagactgtgcgggggcatgcccgagtctgtgcgccggttcaacgcagccacttcggactcgatctcatcgatgtccagtgggcggtcgtcaaggggcttatccgtggacaagtattcccgcacttgacctggcacattcgccatcatgatctcgttgacttcgtcgcacgtgtcaatgtgcggagcgagaatcaaacgattgagcagctccttgtcattgccaaggagttgttggaagttaggatagacatagtctatcagctcttccttgctcttaacgaggaactgcggaggaatccagaagtgctctccggtttctccgagcccgatttggcggcacatttgcaagtacgcttgctgaccttggcccagtctctggttgatggtcaatttcatcgtggtgaattgaccaaacaacggagacgtttgaaa

SEQ ID NO: 23028 - DNA, 1447 bp, Heterodera glycines
aaaaggaagccctgctggttgtatggcgaaaaatataaagaatgagatttttggaatttttatgcaaaaatacccttggtttttccaatttttaacacatattttgacatttttggggtttttagcacatatttcagcatttttattacatattttattacttatttcaggatttttagcacataaaaatcccatttctacaaattaattatccattccagaaccaacattttttattatttcttaaaacaaaaacaatttcaataaagttcaaaataaaacaaataaattcaatatatggattaaaaaatatatcaatatgagatttcaaatgaggataaaggaattatcattaatcttcaagaacacccaacatggttatgtgttcggcagatttggagctaaaatgtgaattttatttaaataaaatttatggaaaatatattttatgcactaccgtattttgattatttcacgaggcattttcatgttacgtccaattttgtggcaggtattctgtttttctaagaggaatcagtggaattttttatataatttttacaaatttcattaaaaaattccaatgccttttaacatgcgcaaaattgtgggaagaattggatgaacaagcaaatccacgggtttttcttcatcaaatgccatttttctgaatttgtagtcgttgccctatttatagcaaagggacgactttaaaaatataatttttaatgactaattcaaaaaatattagaggctccacagaggagatttttcattacaaaacgaccaaataaacgcaaaaattcgtacgcttctccaactcttcgggcgacacttgcggcacaacagggggcaactgttgcaaagacaaactgtttgttgccaaattctttgcccttttcttcaccaaattggcattggcatgaacaatggaacggatttatatgtgctaaaaaacgccaaatatgtacatattatgtgccaaaaaaacccctaaaatatatgaaaaaacgcaaaaaggccaaaatgtatgccaaaaattaaaaaatgctttaaaaaataaattaaatttttttaaaatctaagtttttatttatcaattttaatagtgtttttctcaaaactttgaaaaaggcatttgtttggcatgcattcgaactctgtgcccgttccatgcggtttatccaccgctttctcgattacaatggctacaaacgcagtcggataaaacaccacagaaatggcaaaaatccaaataaaaaatcctcacattattttttgcaaattgccaaattcattcatggcacaaaatcacaatgctgtgaatgtggctgataagactttagctgaggatggatttttctaaaattaaattttatcttattatttaagtaatataaatttaaaaaataataaaaataaatgttacccttttttcgacattaaa

SEQ ID NO: 23029 - DNA, 2346 bp, Heterodera glycines
ccgttccaatttggcgtctgatcagtacattcgtccctttcggtgtcaacttattctcagatcagttcatatgcatcattccattccgtccaatttcggctctgattagttaattcgcttcactccttttccaatttcggctctgatcagtccattcgtccctttcggtgccaactttttctctgatcagttcatttgcctcattccatttccgttccaatttggcctctgatcagtccagttcgtccctttcgatgtcaattttctctgatcagctcatttgcctcatttcaattccgttccaattttgcctctgatcagtccagttcgtccctttcggtgccaattttttttctttgatcagttcatttgcctcactaatttccgttccaatttcggcaaattttccaatagatttaggcagatatttagctgtttttccgtggcaattacagcaaaaatatcaactgatttcgccattttctgtcaatttcaccctttgatcagtccgatcgtccctttccgttccaattaagcctctgatcagtccattcgtccctttcggtgccacgtttttctcagatcagttttcgggtctgactcatttacatgccaagttccctctgattagcccatttcgctcttccctgtcaatttcggccaatcacaacattcgctcgttcctttccaatttaacccctttgatcacccatttttcccctcgtaccaattttaactgtgatcaatccaaattttgttttatttgagttaatttagttgctgaattttttggcacatttaaaaaactatatggcaaagatccaaaaattacgagaaaggggaaaaattggaaaaggtaattaactaaaaaaattattcgactctgatcaattatgcgtctcctccctttttatgtcaatttcggctctatcagctcatctgactcaccttttttctgttaatttcaccctttgatcattccaattcgcccccttccgtgctagtttcgactctgatcagctcattttgtcacaccctttatctacgtctatttcgggctctgatcgctcatctgtctcatatcttttctatctcatttcggctctgatcagctcatatgtctcaccccttttctttcgactctgatcagctcattttgttacatcctttatctacgtctatttcgggctctgatcgctcatctgtctcatatcttttctatctcatttcggctctgatcagctcatctgtcttaccctttttctatgtcatttctctttcatctgtaccacactttctatgtctatttcggctctgatcaactcatctgcctctctagccctttgatcagcccatttatccctcttccatgccaatttcggctctgatcagctcattttgttaggcctttgatcagcccatttagccccattcggagtcaatttggccctgatcggttattggcattaccctatttcctttgcaatttcacccttggatcaatacgattcgtcactttcgtgctaattccaggtctgattacttcatttgttttacttcatttccgttccaatttcaccctttgatcagtccaatcaaccttccatgccgatttcggctctgattaaatcattttgttagccctttgatcagcccattccgatttcggctcagaacagctctttttcatcccctttcccaacccatttcgcccttttcgcgccaatttttcgggaccgatttcattaacttccgcttcccgcatcttaggaaatggcaatcgtgtatactgaattcactcgggaaggtatagatacgtggttgttttatgctaaattttgaaattcaagaaattgacgaagctattgaggaagcagttttgaaagtgaaaggaggaactgagagagatggcatgcgcgccgccttggaaacgattgtgagcagccctcatctgctgttgaacgatgtggcagcgcgtcacaacatcgactacagaaaagtttctaagtacagaaacagatttaatgtaagtgcttccatgaaataacttcgatataatgtttgggatttagaagattttgtcggaaatgcgggaacagcaacagaggggttcaggagatagccggcatggagtaaacaaataattaatctattggaacaagattaattataggatgatgcgcaacccgcgcgcgagactgaacaccattatggtgattatgagagcgagattctcggatacttcaaaaggcgtcaggtaaaaatggtgcaagtgataataggcaacaaatgattttaaatatctgattttaggctgtgtttcgaccggacaattatcttaaaccg

SEQ ID NO: 23030 - DNA, 1113 bp, Heterodera glycines
  unsure (1)..(1113): unsure at all n locations
attaactgtcaaatattttttaaatttcatctaacaatgattatgccaaaattttgcaaaatattgaaagttctattgacaaaaatggacgaggaaggggagngggaaggggggnaagactctcgtaagnccttctctcaacaaatgagtgcaggcagtcaaagaaactctcaccacgatcagcattacggccaacagaatgaacacctttcgccactgatctcgatcagtttcatcctcaacgaacagccaaagcagggcggggcccacgaaaagcgtcaaactcttcacgaattggatgttggccaccacaaagtgcgagtactgcctgaacatgacggcgatggcatttgaataaaattcacattcatttttcaatcattttttttgcctcgagcaaagagtgccgcatttataaaagccgcccccggcggtggacagcagcatcagaatggcggtgaaaatcagcactgtccacatcggccggtccacgggaacgaagccaatggccaaataggcaatggccggcactccgacggcgatggtgttgaacagaatcagcttggtacgctcgggaaggcacctgcgaaaagcggcacaaattggggcggcgcgggaggggatacagttggcaatcaataatggttattcatcgccatactgtacgtattacgcacttgaattggtcgctacagtagccaaacagaaatttgagcggaatgtgcgaaagggaaggcaatgcgcccagaaagcccgtcttttcgataccgtagtgcaacactaaaaccaaaattagggatacggtaataagtatggaaaatagcaactgagaagtgagagacggtgtgcgaagggactacggtagataaaccaatattcgaaccaagaaggatttgttcgattttgtgtctgtttagcattggctatttttgtccgtacagtaacacccgtcagtttttaccgtagttcaggtagctgggaatgtacatgagcagaaagacgcccgagaagaggtcggcaaatgcatttagccacaccacccaaatgagacgactgcgcagaatttgcttaagtggncaacattggaaattggccaaattaaatttttatgaa

SEQ ID NO: 23031 - DNA, 1406 bp, Heterodera glycines
gtatggtaggggattagaggggaaatgccaaagtatggtagggaaaatgccagaatacggtagggtaaatgccaaagtacggtaggggaaatgccaaaatacggtaggggaaatgccaaagtacgatagaggaaatgccaaagtacggtaggggaaatgccaaagtacgataggggaaatgccaaagaacggtaggggaaatgccaaagtccggtaggggaaatgccaaagtatggtaggggattagaggggaaatgccaaagtacggtaggggattagagtggaaatgccaaaatacggtaggggaaatgccaaagtacggtagggaaaatgccagaatacggtagggtaaatgccaaagtacggtaggggaaatgccaaaatacggtaggggaaatgccaaagtccggtaggggaaatgccaaagtccggtaggtaagctgattaaaaagcgcttttgaagagtgtgccaaccatgccggagatggggttggtgatggtggtggacaggggcgagtagcaggtcagcacggaaatgaacagcgcgttctgcttcaggctggcccaccgggaacaaatcatgcccatggcggcaaagtcagctgcataggaaatgccctggaaaagtgggaaaagagtgattgaagaattgcggagaaattcagacaataattgggggagggggaaatttgatcggtatcgtatccttaatactgtgagtcggacatattcgatttaatttcgagaaattttagccgcccaaatgggatggctttccattcggtttccaaatttattctatgtttttttttgcctgcacaaagcgaagtgccaaaaacaggttgaaactgaacgatgtcgcaattggaatcagcgcagtggcaatggcagatgccaatccggcaccgaacagcacgaaacgggcgccgaaacgggtgtacagccaggagaaggggaaagtgccgagcattgagccaaccgcaacggcccacctgaaaagtgccaaggcatgctcataagtgtgaaatcattcttctgctgcttacatcaattggtttttctgctgcggagtgtaagcgacggagtgttgctgaaaatggtaatttatttttaaaaataaaaatgcattttttgattatttcgcccacttcggcaccgcttagatcggtgccattggtcggcaccgaacccatgcaaatcaatgtgaaattcagtgccaacatgttggacgaaattgaggtcagacagagccaactcagaagcaaaatgaaatatctgacaaaggcatgcaaccaaatcttttcaatattttcgattttcttcaatttttacctaaattttccgcaaaaagtgccgcttttgctctactgtttttgccttttggcagtgccattctctgctaccct

SEQ ID NO: 23032 - DNA, 1306 bp, Heterodera glycines
  unsure (1)..(1306): unsure at all n locations
ggcaatataatatccattgcgcaccgctctccctatcatgctgagatcgatttgtgcggtataaaatttatcagataaagatagccatttttctgaaattcctcatagaagccaaaaattctctgggcaatataatatccattgcgcacgnctctccctatcatgctggagatcatttgtgcggtataaaattttcagaaaaagatagnccatttttctggaattcctcttagaagccaaaaattccttctagaaatataatatccattgcgcaccgctctccctatcatgcttgagatcatttgtgcggtataaaatttttcagaaaaagatagccatttttctggaattcctcttagaagccaaaaattctctgggcaatataatatccattgcgcaccgctctccctatcatgcttgagatcatttgtgcggtataaaatttttcagaaaaagatagccatttttctgaaattcctcatagaagccaaaaattctctgggcaatataatatccattgcgcaccgctctccctatcatgcttgagatcatttgtgcggtataaaatttttcagaaaaagatagccatttttctgaaattcctcatagaagccaaaaattctctgggcaatataatatccattgcgcaccgctctccctatcatgcttgagatcatttgtgcggtataaaatttttcagaaaaagatagccatttttctgaaattcctcatagaagccaaaaattctctgggcaatataatatccattgcgcaccgctctccctatcatgcttgagatcatttgtgcggtataaaatttttcagaaaaagatagccatttttctgaaattcctcatagaagccaaaaattctctaggcaatataatatccattgcgcaccgctctccctatcatgcttgagatcatttgtgcggtataaaatttttcagaaaaagatagccatttttctgaaattcctcatagaagccaaaaattctctaggcaatataatatccattgcgcaccgctctccctatcatgcttgagatcatttgtgcggtataaaatttttcagaaaaagatagccatttttctgaaattcctcatagaagccaaaaattctctgggcaatataatatccattgcgcaccgctctccctatcatgcttgagatcatttgtgcgggataaaatttttcagaaaaatagatagacatttttctgaaattcctcttagaagccaaaaattctctgggaaatataatatccattgcgcaccgctctccctatcatgcttgagatcattt

SEQ ID NO: 23033 - DNA, 2025 bp, Heterodera glycines
gggggatttggttcaaaaatgctacccaatgtggtcttctcaatccgtgccttcacccgtcgtgccaacttttcgtcccgctcatcggccaatgccacggtgatgataggcgttgaaatgaagcggaccgcgttgatgattctacacaaatttgtaaatttttaaaaaaatgccaaaaaaatatttttattttttgcttactcttttatcctgggcacgccttgggtgatgttcatggacgcaacgccagcaaagtgaaaggttttcagtgtcatctgagtggagggttcaccttaaaagtatagaatatttatttagtggaaaaaatgctgagcttttctgttaaaaagtttttgtaccccagtggagcggagatggtggttccctcgatgagaaaattttaaaaaatttatcaaaaccgaagaattaaaaaaaaaacttggctttggccagcattcgtcgtgctgcgatagttcctaaattcagccacataattagcgtttcctaaatccatcgcgcggatcttttcattttcatcttttttttggtgcctaaccgtcgccgccaggaatatggaatttaaaggctagacttggactcagcccacccgaaaaaatgacatgaatttgttataaaactgcttaatattgaatattattcacaaaaatgtatgaaaaagtgacgacatatagtgaaatttttttatcaacatttgaaatttttcaaaaaaaaacgtcatttttgagtgtaatatctcttaacagccgacaataattggtcaaacgcatcaaaacgattctttttgacctctctgcgccattgatactctaccaacgtgtcagcaaaccggaaacctgggacgcgccgttcgcggaaccaatcctttgcaggacgccactgagcctcaatacgttgtgtgtgcgtcccatcctcggctaaactttaaaatttagcagattttacttgactttaaaaaaccaatgaaacggtgttcggggtccgagtggttgacaattttgtggagaaacccatgctcatttaatcgagaataagccctccacatgtcagtgtttatttcagtaccaactgcaacgtgtttttggatgatcggaagtagaacatcggcacttctgacattgtccggacacacgacacgaaagtcttcactgtcattctcaatcattccttaaaaaaaatggccgctgtagtcgagtgtgcggcggttttttagcgcaatattattaaacttaaatagctatgacccaatggccttcaattcttctccctctgttgaattttctttttccaaatttgctctcatctaattgcactattgagccgcgccatccgatttgtcctcgctcctgttctctttgcaaaaaatcatcaacaatcatttctcggcagtagtgatacctaatttgataattaatttgattttataatttttttaaaccatgccgcgacactgtccattctaacatcgtgtcattttcactctccattgtttcaataatacattttttgtatttctcttgatgcgtaaatgaatacataatactaaataataattattcataaaatataaaaaatatagttaaaaacaacaaaaaaagaccttaaaatttttgacagtggcatatgtgcattttcaaaccacgaatcaacaaaaagagctttttctgctctacaagtactgcatatgaatgagccggccctgcctctgtttttgtcaaaacgcatttcctttttgtagtgctgtgtcggccgttttccatagcagtaacgcacatttgttaacaagccgttttcaaggctccaatttataactttttgctcatctccaaaaaaatgtaagagcttgcgtctattccaaattgcattttattgctaaaaatacagtattaaatagatgtataacagcatatttcttgataaattcactcaaaaatgacgtttttttgaaaaatttcaaatgttgataaaaaaaaattttcactatatatcgtcactttttcatacatt

SEQ ID NO: 23034 - DNA, 2270 bp, Heterodera glycines
tttcgtagctctccaaatagatatttttacgttttggcctctttgtggcatttaacatttacgaattacactcacgaaaattaattaaaatgtaattttttacaaaaacgaattaattcaaatattcgcttcaaaaaaatgatatgtaattcaaaaaattattcaatttttgcatttttattttcaaatcaaagaataagcacaaaacaaaggaggtcaatccgaggtgtccgtttccttcacttttacctacataccttatttttctgtattattttttgatgtttattaaatatttacatactagtaaatggggggggtcgttttcgcgtggggcgagtttttgaacttaacttttttctttgtcaaccaaatccaataatcttggtatcattcgatagccctaagtgttctctattagcctacaaaatttggaaaaattttgttaaggttcaaaaaagacgcgaaacggcccacgcgaaaacggcctggcccgagtaaatgagtttcgatttaaatgaattaatttttattaaaattttaaaaagaaattttttcaaaaaaataaaaattccatttatcgcccggggggataaatggagacgggggggattattgttcaacctcctcagaaaggacggggggattaatggagacggggcgacaattagagaaatacggtagaaaggcacgccaaaggcgtgccaagggagatttacctttttaattcggttgtaccaccaaaatcagtccgtcccccgccgccattctgtggtgactgatcgaatggaaacgccgcgctgcccgcctctcctcacattttttctcttctcttctcacttttcagtacccaattccatcgattgcatttttgatttaccattttcgttaccatccattttttcctctttcattcttttcaaacaaaaaatgtacccaaaattggtcgatcagattgcgggaggaattgccaaagcagtgcaaaaggccactgacagtcacgcctttcacgagttccccgattgcttatcattggcccacacggaccgactctccatcaaactgaacgctgctcacagtcaaatgtaacagtaatcattttttgagaggaaaaattagacgccgaggaaattaaaaaaaaattatattttcgaattaaaaatgtgaaaaatgtaggcaaaaaaaaaatatttacataaaatgctttagggactatccgtcagaaatttatttaaaaaaaagattattataaaatacataatgattaaaataatttgatatttataaaagtaataataactttttttttaaataaacataatttctataaaatagtaaatttaattaaatttttaaagaaatattgcaaaaaaaaaactgcaactttttttaaatcaaacagattttatgtagcaaggaagtttatcattgagtaaaaaataaaatacatttggctgacggattgtcctccatcactgaatcaatttgtaaagatacctttttatcccctccgccttttgcccccccccacctttttttgtcccatccgtttcccttttttacccttttcagacatcggtcgcttcatcgatcggctaatttgacacagctcgatgcgattagttttaaaattagaaatgaagagcaaaagaagaagttggtcatgacggcagaagtccaaaaggggaacgggctgctgttgaagaatgaggctggcaaagcggtgatgctcgtcagactttccactcacacggccgactcactcggcaaactgatgcacccgtcccaagcgacgctcttcaaggtgggcatggtaacattggcaagcagtgcaccagggatgggccaaattgaaaaataaaaagcgaaatgcgaaaagcgcaatttgcgaaactgaaaaatgcgaaatgaaaaaaaaagcgaaatgcgaaaagtcaaaatatgcgaaaatgcgaaaagcgaaatgcgaaaagcgaaattttttctacaaatttttaatagttaaaatcataaagcaaaaatcattttttaaaattttattccaaatttaaaaatcaataaaacgcttttttgaggcgcgctttttccaaaaaaactttttgggaagagggggcaggcggcgtcagcaggcgccgccgggaaaatttttgaaaatttgattaaaatttgttgacagattttcaccaaaaaatcatcaaattttgtgatttttgtatcatttttctaatgagaaagaagagttttggcgcgccgctgagaacagtttttca

SEQ ID NO: 23035 - DNA, 2291 bp, Heterodera glycines
tgcccggcccaagtgatcagccgcagaattgaatgaccgttttgctgagaagtgatcggtcaatttgaattatggaattggaagttgacaaaaatgctcatagaaattgctcttttttgtttgaatgatcaatattgatttgtggctgttgtatattttaggaataaatttttgtgatttcctgaaaccgaaatccatcggtaaaaatcaaagtaaaattgaaaaattgcagattcgtgatcagcgatctcgaaaaacctctaaaaaatgttatatcactttaaattttatttaaaatattataatttacaaattaaatgagttcatttcaaaagggttttgtcaaaatttgctctgatttgtcagttgatttagtcaacttacaaaaatcattggcttctgttggcaggcgaaaaactgttcaaaatcgttggtcgtcagaaagcctttctcatccgtgtccaattcctgctgtccaaataatagcgcaatttgacaaaaacaccataatgattgtcctaattaggtaattaagggactgaaaacccaggttttttaggatttctcctaatctacaaacaatttcctggagtttctagaatttatctgtttttaggggcacatcgggcctaaactctaggagtttaggttggtctcgcttttaaaaatttcttgttttttttgatgccttggcctaagtttttcggccgagtttcggaatatttcaaactcaaaagccgcgcgaggctttcaattttccgcacgcactttaaacagaaccaatgcgcgctgttcgcttgctgtccgtgccattgcgtcaccgtccgtgccggacgaactccgcgcgcgcccaaaatgcgcaatggcagggccagcggtgggcgcggtgattgccgacgcaaacattgccttaggagggattaattaggggagggggattaattttagattgatccatcaatattcggcagatcagtagtgatcagtacaggtccataaaggggaatttcattgtctctccggaaaaatctcgctgaaattttaaaatttattttttaccgcactgcgcacaatcgttgctttacgcacgagggtggagccgcgtcgttgttgcggtggtgccgacgcaccgccgccagtgccgcccaccagaagagagtcggcttttcgtttccgctcgcattggtcgctgcggccgcgcagcgcaaacaccgcgcggacaaattcgagaaattcctaaacaaaaatgaaaaaagcaatttttaaaaaaagaaaaagtaagttcaaaataatttaaatttctttgcaaaatggtagattttcaaaaaaaaaaacttttgattcaataaaattttatgaattttgcaggcttatagcccttatgcctatgccaaaatattttcccaactatttttttatatctaatgtaaatacataaaaatattaaatatttaacttttcagtttaaaattttaaaatttagaaaaaaaaagattttctttaaattaatgaaggcttaaaaatttctcgcccaattttttatgatcactcttgaacaacgtatatttctctctaacaaataagctgatcaatgatcaccagcaataactaattttaaactgtcaaagattcggcactgatcagacagtgatcaaacagtaaaatgatatacggatttaaatgacattgataaaaaaattgttgataattttcgtacaccaaagctgatctgttgctgaagctgttgtggttgttgttgttgctgtgccgtcggtgccgtcccggcggcgatcagtcgcattgtccactcggcattggcacgcgcattttcatcgcacaagcggtgcaatgtcacaaccaaatcctgtgaattttatttaaaatggatatttaaaatttcagaaaatccgttttctgttcgaccaaaattttggtgtgacccgaaaccaaaactctaaaagcacataaacattaactgttcagatggcacgcagcaaaagcatctcgtatattccaaaattttcgggaccgaaatctcatgatgatgatgatgaatctattagatgacggcattcacatgatattttctctaaggattacataatctttttaacatgataaaacatttgactgtcacaaaacatcgcataataccaaatcagcaaaaaataaaataaaataaattttaaaaatacaataacaatgttctagaaaaggaaatgaatcagatcacaaaaatacaaaaaatggaaaaaatctgcgaagaacggaacattcgtcgaattgataaa

SEQ ID NO: 23036 - DNA, 1502 bp, Heterodera glycines
gctaagcccatactgaaaaagaagttatggcctcccaaaaatcagggcaggacgagacgtcgccggaacttaacgtcaccgtgaaaaaataaaaatatattcgaaaaaaatacaaaaaataatttaaaaaaaaatttcgtttccctgaaaaaaaacattttcaaggaatttttccgttttttcttgaaattaagcaaaatttgattttcagaacatagtggtttttcaaaacacacaacaaaatttaattttaaccaaaactttctttcctaaaatttttttattttttctgagactacagttatttcaatttgtcccgcgccgcgttttgggatccaacgccaaaaatttctggcggtgaaatgcctattgtttcgctgcaactaattgctgactaattgattggccaaaaatccgccaattttaaaaataaataaattatccagcttttgcccattatatccattaccacaaattgtgcggcatttttccaatcaaaaatgccgactcacttcgctacaaaatttgtgcaaatgttttcgctgttcgagtgtttcgcaattgccggcgttgattttggccactaatttccacggcttgtcatgactgtccacgtaatcgtcggcacattcagcaatcgaatttgttgaatttgatgaagcgacggcggcaaaagaattttccccgttttgctcagtgccaattggcggcgtcgctttttgatgttttgccattgatgagaattgctcagaaaggttcagcagaaaatggtccaatgtcggcggatgagaagtgaacggactgtgaaaaaggcgcgcgatttgatggacaaaaaattagtcaaaaatgccatggcaaatcctgggtgagtatagggctatgacaccttttatatggcatggctttgtcgaaaatgcccagcggggatggcaaaactcttattttcttcggcagtgattccgttttcccagttggcggcaaagatgcgtggttatgcatattccggtcgaaaatggcacggcgatccaccacgtaaatggcacggtacggacatttataactaaaggaatgaatgaattgaagtggaagtctttgttcggcggagttatggactcgggactaaatatctcatgagcagaaccgacaaatgtcgaaatatgcacgaaagtccaacaccggcgctggttccgtcccgcaaaaagggatccgcaaattccggtttatatttggcactctctcgtccttatgcaccaacacagacacaaaaaattattaacagtagaaaacaactaacggcacacatacatagaatgccattctctgcaggcgagtgaatgtacacgcaaagtgccgtccccgtaccgtttcatggttctgcgacaaagcccatgcttaagcaattattcaaatgactctaattaatttccatttgaaaagccattttatgtggacttttgacataatttcgttgtgctgaaaagtgtttattctatgatttgatg

SEQ ID NO: 23037 - DNA, 1541 bp, Heterodera glycines
  unsure (1)..(1541): unsure at all n locations
aactagagtacaactaaaataaattagggactaccatctatacacatcgacagtcttgccaaagtatcaaattccccatatttcggcactgtgccaacaatgattgttgtcacagcggcagggtagggcgtgaaattcggcacgtctgctgacctttcactttgccgaacgtgccgacgccgagcgtgtcgcgcagaatataatgggcaattttgatctgcggcttcgcctcccgctccattctggtcaactcggtggaagccattcaattggaaatgaaaaaatgtgccaatgctaaaaaagtttggaaaatttgaaaaaaaaattctgaacccctcaattgtggaaaaaattttttttgtgatttatttgtgtggtgggttagaattttatcaaggaattcgaaatgaaatatcgttacagaagccatcatttttaatgttgctttgatttactcttttttaaaattttttgaaccatttttatttccccatttttggcccattttaatgggtttttttccatttttttctctttaaaatatggccttaaatcacagaatagtgcaccgtaaacattcaaaaatcaatagatgagaacatttgggcaaataatcaaataaatgtagaaaaatacatggaaaatattaaaattaaaccattcaaagaaatggattattaatttgacatatttttatatctaaggcttaaaaagccatcgaaaacaaacaaaataaaaaagcgatataccgtatatgctctaattatagcccagtctctattaatcccgcagtctccaattatcccccccccccttttctgaggaggttgaaaaataatcccccatgggctataattagagcatatacggtaggtatattctacatacgaaaatgtgtgatcgatcaccatcaaaccgtcactttgcttcttttccctccgattttcgtccgtcgtccataatttgtttttgtcttttttggtctgatcagatgccctcattgtcggtcaccatttccctttccgccacatagttgtaaacatctcggaccgttttgaatcttaaagttgttacatttaaaattaaaatttgttttttttcattcggatagtgtaatatttttgaccagcaaaattcaaaaaaataaaaaaaataaatttaaaaatttatggttgtaaaaaatctactttttatgaaaatgttggccgtaatctttttttgaatcctaacaattttttttcaaatttttcaggctaatagagaacaattggaactagcaaatggtgccaaattgagtcgatttgaaaatattaaaaggaattgagttacccctgagggtccgataaattgggaccaaatttgccccacttcgccccctgggagcagttcgtttccacgacccgaaaatatttttttcacaacaacaacaacaaaaatttgaaaggatttcttacaattagtgaattttccaaaaattaatgatgaattanacaatttgtttttttatttccaaaaatcactgaaaatttttagacattttt

SEQ ID NO: 23038 - DNA, 1048 bp, Heterodera glycines
aaattttccaaaaaaagagatagtgatttttctggattaggccggagaaataaaattaccagctattgaaatgcagtgggcaagcacagcgagtcgcttaaatgcacaccctttgacacgtaaaatatcacaaaaaaagagatagtgattttttctggattaggccggagaaataaaaattaccagctatttgaaatgcagtgggcaagcacagcgagtcgcttaaatgcacaccctttgacacgtaaaatattccaaaaaaagagatagtgattttttctggattaggccggagaaataaaaattaccagctatttgaaatgcagtgggcaagcacagcgagtcgcttaaatgcacaccctttgacacgtaaaatattccaaaaaaagagatagtgattttttctggattaggccggagaaataaaaattaccagctatttgaaatgcagtgggcaagcacagcgagtcgcttaaatgcacaccctttgacacgtaaaatattccaaaaaaagagatagtgattttttctggattaggccggagaaataaaaattaccagctatttgaaatgcagtgggcaagcacagcgagtcgcttaaatgcacaccctttgacacgtaaaatattccaaaaaaagagatagtgattttttctggattaggccggagaaataaaaattaccagctatttgaaatgcagtgggcaagcacagcgagtcgcttaaatgcacaccctttgacacgtaaaatattccaaaaaaagagatagtgattttttctggattaggccggagaaataaaaattaccagctatttgaaatgcagtgggcaagcacagcgagtcgcttaaatgcacaccctttgacacgtaaaatattccaaaaaaagagatagtgattttttctggattaggccggagaaataaaaattaccagctatttgaaatgcagtgggcaagcacagcgagtcgcttaaatgcacaccctttgacacgtaaaatagccaaaaaaagagatagtgattttttctggattaggccggagaaat

SEQ ID NO: 23039 - DNA, 1348 bp, Heterodera glycines
tgacagattttcactaaaaaaagatcaaattttgtgattgttatcattgttataaggagaaataagagttttggcgcgccgctgatcacagtctttcatcaaattagcaaattttgcgattgcggctcattttctaagaaaaaataggagttttgggggcgcggcggtgccgataatcgccgcccggcgaaaaaaatggaaattttgatcatttataaacagtttttcactgaaaattagccaatttataggtaaaattttgaaaaattttatgggaattcaatccaattcttaggggtgtaaaagtcgcatttcgcgccaaaaagcgaaatgcgaaaagcgaaatgcgaaacgccaaaaaatgcgaataatgcgaaaggcgaaatgcgaaaagcgaaacctcggcccatccctggtgctgaccattcattcattttctcacttaataatttattcattttaatttcgttgttattactttgtcaattgcttcataatattacgctgaaatgcttaaaataaattcattttccgagctgccaaatttatttgaaaaaaagccgaaatggaaaagacttaaaaaagcagggaaaacagaagagaagccgttgtgagttaatatgtaaattaattaaatggaattgtttttcaattaatgcgttaattacccaatttcttttagaatcgttcgtccgtccgttgttcgctgtcccaaatgccttttgtcggacgttcgctttttgcaaattcatttgcagacagacgaaaaacaaaagaaatggcaaaaatttgaagtgattggaagggttttggtggatgaaaatggggaagaaagtggccaaaatggagtcaaattggccattcttctcgaaatcgcggacatttcgtccaatgtttgctcggcggcaagctttttgaataattatcactaattgcacccattaactaattactcaatgctttgttcgcctttagctgtcaatcgctttaccgctttggatgggattcgccatcgatttgtcacgcatttttgttgcccttcatgccgatatccgctctaaggaaggaaatgcgcgtcaaattttcgaagttggcgcggacgtactgctcggatctgtcggggccgaaattggcggggcattgggcgtcggaattggcacattaattaaaggcagcaattaatatgcccgaaatattttataatgatattgcaaattctctccttatccaacatcgtttttttcaattttcagttgcgatttgcgcagttttcgcgtgtccctttggcgcggtcggcgctttggtcacttccgtcgctggcgcagccattggttagaccattttttcg

SEQ ID NO: 23040 - DNA, 1708 bp, Heterodera glycines
gtcaaaaatctataaggtttacggagtattcttgcatattacattataaaaaaattttatattttggtatgaaaattaagtaacaaatttattacaaaaaaaacaatttattgacactagttagtgtttgaaatttaaagaccttaaagtggatacatgtaaaaaaataacatttagtccaatattaaacaaataatttgaggaaaaattgcatattcacaaatattgttcaatgttagcgattaaaaaacaatatagtcatttttggcgatatgttttgtcactctttgcttggtgagggagatgatacattttcaaaaatcaaaggagagtttttaaagctataattttcaaaaatatccatgatatcagcggaccggaataagggaaaaattgatttaaaatgaattatgcgtcatggacgcggacaggtagccaattatacaaaatcggacgattccgaattctggtcaatagggctgtaaattaaaaaaatttacataattttcatgatttttggaataaaaattcttagaaaacacaataccgtaaaaacggcctacttaggcttaggataacttttaggtatttaaaaattggttttaataaaataatgttttttcgaacgatacttttcaaggacatataattttgtcatcgaagaacgaataggaaccatgtatttacattttcatccagcaaaaacatcattttagaataattggcgaataatccgatttagatttagttggcaaaatgccatttgtgaaagctaagtctgggtggccggcgacaatttgatacaaagttacaggcacaagacaggaatcgtttgatacatattttagacaacacacattcttatgcattattgcaaaccaaaaggtgcaaggtagggtatttcaagccgagagcagagtgcaccccaattccatattcagccccccccacccctttcccccaccaacttcagcggttggagtgttcggttgcgccattttgtaacagtttgaggacaaagtctgtaataaagttaaagtgtataggcacactctttttgggaaatgaattcttaccaataaaatttggtagctctttaaagcaaggcaaaaggcagcaaataacaggcttaaacaattataaaataagcaaaaaaaatcattaaaatgaaaaataaaagcgcataaaataacgctctaaacaattaaaattaaaaagattgtgcaatttaagggagacgcaattaaacaaagcatttgtttattagcattgaacgcataaaatcatttctgagtgtcgaccaacaacatattgtagtacaatcaaattcgccgtttttgcattgtctgactcaatgttgtgctaaaaaatgcaaaaactggaagagaccgtttacgaagttaataaattattacacttagcttcaaaataacaaaaaaacgcattattgatcaaaaaataaattttgagtaacaaacaaaaaatgacgaaaaagacaaaattaagagaaaagttattaccaacggcgccgacccggtcggtgacaaatgttcccgtttccgctgctcgcggcggcatcgtccgacctttttttaaattggttgttgccgttgccaccgccttttcatcgatgtacatctccaactcctacaaatgtggaaaaaatacaatagttttaaaaaaaaattttataggtaaacattgaaaa

SEQ ID NO: 23041 - DNA, 1278 bp, Heterodera glycines
ttccgaataaaattaaaatgttaaaacgttgatgatcttctcctaaattttattcttcaaataacaagataaattaatattcagatatatcaatttattcataaccaatatataacattaaaataattaataaattttttttgtatttaataatacataatttttggagtttaagtagcaaccttttaattggtttattctttaattaatatttttatttattttttctgttaatttctaacaatattatatattttttgttttttaaagtgtgttttattacgagaaattggcaaatttatcatttgcaaaatatttagctgtctgagtaaagagtttttgcaacaaattgataaatatgatatgattattaatttatcttgtctgcttctccaaaaattgggacataaaaagataaagtttttaatttgtattcttcacttaaataatttaatcaggtgatttatttatgattcttgttgaattaacttcagttttgcttaaatttaaaatatttgctctgagacacttttttttgcaagttaatattttgtgatatcatgtccgattccatacagcttactgatatattaaattatttaatctcttatttttatttaaaattcaatattaatcaaaatattcaaatacgaatatgaacctttcagaaaattctgaatttgttttaagaaatttacgctaatttttagaaattaataactcgcttcagggttggacaatattagtggataaagcttaaaaaataaagaaaaatctgtaattttttgcattacaagaggtatattattttatatttttatctcttttttaaagaaagttttaacattaaaaactcattttgtgattcgggaccaatggggggggggttgcatatgttttttgagtgtaaaattttttacccaaaatcatccaaaaatatgtctttaggtgtattttagggcgctgataaaaaaatctgaaataagcttttggttaggactccgttaaggcctcagaatccctgcataaatggagcttcttaggcatcattctgaaagggggggggtcaggttcggatcccggtgaagtaaatgatttttctgtattatttttcatgtttagtaaacatttaaatgaatttcgattttgaattaataatttttattaaaattttaaagaaattattttttcaaaaagttccatttatccccccggggggataaatggagacggggggattattgttcatcctcctcagaaaggggggataaatggaga

SEQ ID NO: 23042 - DNA, 1767 bp, Heterodera glycines
  unsure (1)..(1767): unsure at all n locations
aacacacgaccccgaaaaccacctagaatgattatatgatttaaaaattattattttttttggctggctacaccatataagtaccaatttttcaaccaaaaaaccggaaataccatttttaaataaaaaatcgagccgttttaccgtagtggcaaataattccaagccattttcatcatcgtggaattgttgttgcattgagtgatggaaatgtgaagtgttggcgccatctttgtcaaaaatgttgccgtgattttgctgctgcttttcggacggacgatgatggccccgttggcgatagcgtgccataatgtgtgtaatccaaaaataagacaaaatagggactgtaaaaaagaaaagaaacgggatttactgcttgtaatggctgatcgaaaatagctgtgggagctcaaattgctgtgggagcaaaaagacaggggccaaaatgaaggaaagatggccccataacaacagtcatccctccagtggtggatgtggtctagtggctaagacaacggatccacgtaaggggccccgagcggcggttcaaatccggccttccaccccaatttttcgcctaaataatactgctccgttttagtgtttaggattctcgaccaaaagaatttaaatttaggcccggaattttgaaatgaacgagaccgaaaccagngagtttagaaatggaccgggacgggggtttatcgagacaaaaaaaacccatttgttagcggcctagtccaggatggtttgcttgcgcgccgggcccccggacccatccaggctgaggtttgttgtaattcaaactttttagaatgaaaatacctaataatagacagtatgttgaacaagagaagggtccgtatcgttttggcgccgacgttttggcgccagggtcgttttggcgccgacgttttggcgccaagccataataaaaaaaagaaaaacacccaaatttaaaaattttcgaaaaattttgtaaaacaagaaaaaaaacgtatttttcgcgaaggtaatactgccgatggttgttggttgcccccctttttgaagaaaatttttttgttttcaaaagtcacaagtactattcaattaaaggaataataaatattttttcaatttttaagatcatcaaacgcgctcgacacgaagtcaatgcaccacctgctgtccctcaaaacattgaacaactgattgttcctccggcttaccggacatatgaaccaactgatgggaacgaagagcagttcctgttgggtgactctggtgtgtttttcgagcccggaaacgaaaacccacaacggtaattgttaaaaggaatgtttagattcaactttttttcaaggattctgctgtttgggcgcgaatctttcggccggtgggctgatcgaatgaaagaatgtttcggagacggcacattctcattggcacctccaatgttctaccaaatctacacaattttggccaagtgctgttttaatttgatttcacgtgaaaattgttttaaggcgtgggtcgtgggttatcgtcgtgtgccattgcttgctgacgtccaagtcgcaagcgtcctacgagaggatgtttggacttctccgtcaagcttggtcgacattctcgcctgcctcgttcaaaatggacttcgagaccgctgcgcgcaacgccgctgttgccacgtttcctgcatgcgaaatcaaattttgcttcttccatttcgcgcggaatttgcaaaaaaaaatcaaggaacaaaatctctgggaggtcagtaag

SEQ ID NO: 23043 - DNA, 1669 bp, Heterodera glycines
caggccagggggtggctctattaaaaaaataaaaaatccttgcatgtagaggacactttggcggggtgccctcgcagcgggcattttttgattcgagttttagaaaaaaagttacgggccttcaaacgcaagcaaaagtgagaaattagccgccgggactcagttggccaccggagcggaatgccgatagttttcctgaatgcgcctcaaaaagttgtaagacccttccaccactttcagacccctcccgacagccgttcgactcaaattagtttttaagacgaaaccccctttttctctatggtaatataaactagcgtgtggcgcagtagttgctcggtgtagacagtatgctttgcacagtaattgctcggtgtagacagtatacttttggtatatatgggcgggcgctgacatgagcgcttcgcgcaaaagacttcgttgctagtgcatgcgcgattttgaaatgaatttatggatgtgataaggaattttcagtctacagtcatcgcgaggacgcattcataattttgtggaggaccttcggccgcttcgcggactcaaagggcgctccgcgccctttttatatttaaggtttaattcggccgcctcgcggcctcaaagggcgctccgcgccctttttatatttaaggtttaattcggccgcttcgcggcctcaggacgggcgcttcgcgccattttcataattttatgtgatcattctagacagtatacttttggtagatatgggcgggcgctgacatgagcgcttcgcgcaaaggacttcgttgctagtgcatgcgcgtttgataagtgatgagcaagtgcattcggccgcttcgcggcctcagacgggcgctttgcgcttctaaatattgtggactcagattagaagagtgattagaagaggtactttaattcggccgcttcgcggactcaaaggcgctccgcgcctttttttaattttgtgggagggatccggccgcttcgcggccgcagaacgggcgcttcgcgcccgtttttagactttgtggggccagacgggcgcttcgcgcccgtttcttaattttgttgggcttggacgggcgctttgcacccgatttaaattctgttggggccaaacgggcgcttcgcgcccgttttttaattttgtaggaatcattcagcagtttcgtggccttaggacgggcgcttcgcgcccgttttttaattttggtggatattcggccgcttcgcggcctcaggacgggcgcttcgcgcccgttttcaaactttgtagggaaattaggacccttcgtctttttttctttagaagatagaaatcccataaaaagaggtagaacagtgattagaagaggtagaacagtgattagaagaggtacaaaagtgatagaagaggtacaacagtgattagaagaggaagaacagtgatagaagaggtacaacagtgaaagtgactgcttttttatggtttatttttcaaggattttttgttgaaaattcaaattaaataaaaaatgaattctttaatttaaaaataaattaattaattaattgcattaaaaatttattcatcaaaaaataatttatataaatacacgaaattctttatttaaaaaatagtaattaatttttaaattaaacttttattcatcaaaaaataatttat

SEQ ID NO: 23044 - DNA, 1636 bp, Heterodera glycines
gatgtcatgaaaaatataaatagtttccaaaaaattaaaacaagaaaaaatgcagcatacaaagcgctattggttagtccccgaagagatttatcagagtttggcagcaccgccaccatctgacggaacacccaattgggctggtccgtacccgaaattaaacaaataaaaaatgatgacgccataaatgaggcggaaagggcagtcaaatatgagcaggaagttaagcgtctcaacaagctcacaaaggacgaagatgaacgtcccgtgggtgttaaattagaaaatttgagtgatgtggttgacgccatgccaaaaccagtcaacgttacaaggccaattgttgtttctacgcgtcgccatcttaaagttgggcgtgcgcgaaaagaaaatgttgaacaattagaagatactgatgatgatgatgattatcaaaacccacggtcgtcaagttaaaataaacgacaacccacacaaacggaaatcttaaaattaatttataaaaacgcccaatctctaggggtgtcggaggaagggcaagttttgagagccggtgggcgtccatttataaccagcagtgttgatgacattgttagtcacctgttgaacaaggacaagcgtggccaaaataaagagccaacggcattcaaagaaaaaaaatgcagcatacaaagcgctatttgttagtccccaaagagatttatcagagtttggcagcaccgccaccatctgacggaacaccaattgggctggtccgtacccgaattaaacaaataaaaaatgatgacgccataaatgaggcggaaagggcagtcaaatatgagcaggaacttaagcgtctcaacaagctcacaaaggacgaagatgaacgtcccgtgggtgttaaattagaaaatttgagtgatgtggttgacgccatgccagaatcatccactgtcggatggtccattactaacggattgtccttccctgacggattgtgccctgacggattagccactgtcggatatccactggcggattgtccggacccctaatatccgggtttgggccagaatcgggtgggtaaccagcatgccccgtatgcgcatattcaataaaaaaataaataaaacgggcaatctctaggggtgtcgccaggcagggcaagttttgagatcacggtgggccttcatgcatcccatcgagtgttgacaccatgtgtagtcacaaaatcaacaagcccaacacagtccacggggggcagtccccgtcataggctcctccctcggcccagcaacagcagcagaagttccgaattattctggcctctaaatgtgcgctcatcggtaaccccttttatacaaccgcccccccccaccgtccggtgcaccccaagaacgtcgtcggaagactttttggaccataaatttgttcgctgtcaatcaaattaagaattgttggtgttgttcgatatctctatgtgtttattattaatttgcaaaatctcaaaaattttggttaagtttcaaaaaagttatggccagaaggaactcaaaaacccagtaattcgaacttttttttgctctgatttttttgtaaaagaaataaacaatttttgacaaatttgcagtgcctagatagcgatgactctaga

SEQ ID NO: 23045 - DNA, 1695 bp, Heterodera glycines
  unsure (1)..(1695): unsure at all n locations
agcgcgcctcgttctgctcaaggcaatgcagaaggccccccaggaccggggtcggatttggtgtaantggtaagtccctctaccaaaaaaaatttttgtgcacaaacatttattttagacactgacagcctcatcctcgtccacccggaggagcggtgcccgctgaaaactggcccccacttgggccagttcaccgacgaataccccgaccacgacattgtggaattttgcagtggcggagcaaaacaagtgaattttcagttcatttttgtttacttttgaattttaccacgctttagtacggtctttgtctgcgacgcaagggcgcggaggcgggagcccaattggaacatgtgctcaaagtgcgcgggctgacgctaaattatgatgtgatcaacaatcaagggatgcgctatgagaacttcaaagaggaggtggtccggtacgcgacaagtggtgaatacgagccgataaccatcacataccccaacttccttcgtccaaacatcagggagggaggtcgggtggtttccatgcctatgcaaaaatgctatcgcccatttgtggaaaagggaatcatcggagtcaatttcaatgtgctgaattttggacacacattgtaatttgtgcattatctatcacacacacacacaccacacacatatgactgtttcttttgtacctcaaattgtgtacattttatgccattttattagtttttaataaaaatttgtgcattattagtgaatggaagatgcaattatgaaataattaagcattagaagatgtcatttttaggtagaaaaagtgcataattaagctaaagaagacacaatttttgaaaaattaaggaatggaaaatgcaatttcaaattaatagatggaagtggtcattttaaggaagaaaaatgcataattagtgagcaaaaacaaaactaatataacggtacagtactctgtgagcattcattgcgtctgctgtcttcatcgatgtctccctcaaatactaggcgcattgttgtgtcggatgagtttgacgacgattgtttgtcgtcaatttcagtgaaaagacggcccagccaatgctcgttgttgttgatgtccatgtccatgttgttatcaatcagctcaagaagttccattggatagtgccggtcctcccctccccccgaaaagcgttcaattatgcacggtgcatacgggaagtgaagctttatgcggtgccgtgcataaaaatgcgcccccacattgatgttgaatgggttgcgcaattgcccatatgcgggaagaaaggcggcgccgtgcaccgaaattccagtgacgaagaaagttttggtcaatccattacggtcgttgtatgtggtgcgtgctttgcgcccaatgatgtgtttaagcacaagcgcccgatcctctgggtggttgagccggtcgcgcaatgatttgacagggcagttgagcagctgagcgcaaaatgcgcttacaagaaccatagcaggagaatgaaagtgggatgaggttgaagaatttcacttttatatgcgcaaaagtgtggccacgcctacaccatttgaaaagagtcacggttttagacacgcccactcacagtcaaaacagtttgtctgccaaaaccccaaaatcattttaacaatttttgtcaaaatgaaaagatgcgttgctcctcttactactgctgct

SEQ ID NO: 23046 - DNA, 1702 bp, Heterodera glycines
ttgagtctgagctggaaatgcggacaatgcgtagctttgtgtcctatgaattcacatgaaattcaaattgaaaattcaaaaatgcacctctttcgtggcaattatgacaagtgaccgcatagtttggacgaaaattcaacttgggagcaggttctggcattggcaaattgaaggacggatgtgagaatttgcagactgggccatcggtgcaaaagccaagcaagtagaattggcatagaacacgtcgacgatgcctgtttttgcaaaacggtcctaaaaaataagtgctaaaaagatgtagcggaaccgaaatcataccatgtctgcaaaaaccgcggtcgtaccatggacaatccttgattttgctctccgggtcaatgtgtctaaatgggcattccctgttgctgcaagccactaaaatgaaactatccgataattttcgctgagaataaacaaacagtattttgagaaaaaaaagcattcgggcattcgactcagatcgtattcgtggagaaattcgcattggtcgccttttttgcaaagtccgcgtaaccaatgcttgcacacaacttgtttgtccttgatgatgtgtcggagaggacataatgcgccaaacatgcacgctttgacttcgtttttaaggcagacaccgcgtccactcttatccatgccgggaaagggcaacttaaaaggtcggcagtattcattttcttacaattagacaacaaacgaacttaacctccctaactcctcgctgttcgattagcatctcttcaacatctgtcaaatgttttggtggctccgcaagtgccatgtccatggtgagcggttgttgtatttcagaattatcatcagaaatataaggccccatttgcttaagtgttttgttagaaaataaagtaacattgcagattatggcattctctttgggggcccgaatcaacacgtccgaaacaaatttttcaaaatatttttaagctcgaacctgcattgaatgactattttttcccatgacatttatgtaatgcgtcccataaatgatcatcctcagtttctttggccataacttttttcgaaaagctgaatatggcctaaggatttcattagagcccggaattttgaaatggccgggaccgggacttggaaaatggaccgggacgggatcccgggactcccgttttttcgggactcccggtcccggtggtttgtccaaaaaagccgggacctcccggtcacagtttttgggccgggaccgggactttttcaaaatttctgaaattttgataataaaatttcaaaaaaaattgtcatcttctattttagcttggattgttttcaaagcacttttttagggcacgctttcttcaaaaaaaaaattaggcagcaaaatggggggggggggggggggccccttaaacagaaagccaaaaatatcccgcataaaaaaggaaaactgaaattttatagggcagcaaagcaatctatcaaaatcagtgccaaatgtcatgacggtagccttagagaagaattaatgttgattcaaacgacaaactcttactgcatttatgtgtagaaacaggtgaccttccccgccctcccccctccggcggtgtccctccccgtccccggctttagagtcgagatcaggtgcggggtttcggggatatgttgtgactcatcattaggagtgatctttgatcat

SEQ ID NO: 23047 - DNA, 2598 bp, Heterodera glycines
tacagcccagacatcagcccgtgtgactactatctgcttcgatccatggagcacttcttgagagggaaagaatttgctgatcaaaacgaggtcgaaaatgcattggatgaattttttggatcgaaaaatgatcagttttataaaaaggggattgaaatgttgcccgaacgatgggggaagatcattgattaaaatggtgagtacatcattgattgaacatttgttttttgtgaaataaaaaattgtttaatgttgaagtgcttaaagggtcagaactttttcatcaacccaatattttaggaccgacgatttttaataaaacatcaaaaaattgacaaattgtcaccagtgccgaagttgcagttcatttttatgtgtgttcgtttcgttgttcattttgtcgtttttccgatgccgtccattccaaaattaaattttggtgctcggcaactcagcgtacttataaaagatttgggaagaaaattgcaaaaattgatcaatgattcaaattatgttgaagaatatgatccgaaaaagagagcagaactgaaatggaagcttgaagaagatctatttttagacggtaaatcgaatataatttacaatttttaactaaattgtattaatattggccgaatggaaattaaatatgccaaaagttcttagtattttcggtggataattttaaaattaaatttttcaaaaaagaaaacctctttcttcctgaaaatttgccaaaatttttgataaaaatttggtgctaaaacaatttaatttaagatactgatgaggataaactgctaagaattttggacgagcttgataaaatgaaaaatgaggaagaaaagaaaaaacatgaattgaaacacaattcggctgaaacaaaaacaaagcaaaaaacaaaaatggaaaagaacagaaaagaaagtgagaaaatgggagcaaaattgaacattttacagagtaattaataataaataaataattttaaataaatgcattattttaaatatatttcattttaattttttttaggacatgcaattcaactaaaaatattagaatttctattgacaagcgatgaattgttccgaataaatcatcgttttgatgaaagggtgacaaagggaaatactttacaacattcataatagcttatgacattttgaattatgggcaaaaagttaatttaaaaacttttaataaaaaatgaaaaataaaatttaggaaaaaatatttttgacgaaaatattggccattttaatgcgcaagtgatttgtataatgctaacaaaagtgtttctgctattccctggcaatgtttctgtgccatttttgttagaaaattttttcctaatttattcaatttggtaatttgaaaagatcggttaaaatataattaattaaataatattttatgaataatttttttaaataaattattaaaatatttctaatggtttatttaaaacttttgatttatttgccatttttaaatttgaatatatttatatttattaattttctatgaatatgaaatgatattttcaaaaaaatgcaggaattggcctttaccattgcaattgactgacattaaacataaaatggcagaccaatttttgagttggtcaacaacgacaatttctgctgaattgactaaaaaatatattaatttggaccaaaaaaattctgtggaaatgccaatcattgcaccgatatttcctgaacaaaatgttatgaatctgatcaatgcgagtgatgcgagaaaaattaaaaacgaattttgaatggtaaaatatttaagaaatcaattttttattatttaaataatgcaaaatttttagcatttaaaacaattaggtcaatgaaagaaaatgaagattttgttgcatttttggagggaaaataattgttttttttatgaaaatattttatttataatttaattcgatgctctttttatgaaattgtctaaaatgaaaattttctgaatgagattaaatttcaatgctctgataaaatgtgataagacaatttattcattaaatcccaaaagcaaaaatgtaaaaaaaaaattgaatgattaatattttgaatgtcatacacacaaaaaaaataaataaattcaaaaagtgccaaagaaaaaaaattaacaaatattgcaatggaattgcggcaacaaattcacaaagcaaaaattaaagaaaattatagcaaaaataaaaaaataaataataaatgctaacaaataagcattaagcaaccaagcctagtaaaattaagcatgcacgaaaaacttcatctagaagcctcaaaccacgttgtaatgcgttttcatgctacctgtcttatttgtttgaattacacagtttaatttttaatttgttttttttaaaataagcatgtgattacattgttggatttgctccaaatgtcattattaaattggtttcgctcaaaagactttttataaagttcactgttatttaatattcaatttaatatcgaactcaaaaaagcctcaaaccacgttataaatgcgctttcatgcttctatgcaaatgtaaggttagcataaatttgtgcatatgcttcagaa

SEQ ID NO: 23048 - DNA, 1632 bp, Heterodera glycines
aggtacaacagtgatcagaagaggctcaacagtgaatagaagagtacaacagttaatagtagttacatttactcgcaggttttgtacataatagtttaaaatggttaaatcatggtttcataatcatattattaaggacattgttttatagcaaatataaataacactgaaatgtgttaataatttcttaaacatgataaaataaattaacacgtattgacatgtttttggcagtgaattgttaaaaaaatgttttctttcaaaaatcctgtctatcgccgtttgtaacaacccccaaactcattcaagaattctggaacgtttatcaaaatggttataacaatgactactaaaatttatatgattgagtaaacatttccgtctttagggtggcattggctgtgccgtgctcgcctcgcttggccttgtgccaaccggtttcggcgctccgcttctgaactcgtcgcttttacttccgttggacggcggaggctccgccacaagcgcaacaatcacaccacgaaatgccaattcggacagaagaagcaatgagaatatgagcgacattttgccaacatttcaaatggtcagtgccaacaatggacaatttcctaatgcaaaaacaaatgacaatttgccatcagttggaaatgcatccgactcagcctttgtaccgtttggtttggatgtcaatgaagcgcaagttgcgcaagccggactatctgccaggtattgggggtgatcaatgattagaatgtctgatcaacagaaatgataaaaatgccatgtggtgaccagaatgcctgatcaggagaaattatagaattccatgttgatccatgcctgatcagcagaaatttaaaaaatgccaccatcagcaaataatgccatcagtgatttttagcagcttttgaataaataccatctcattttgacgtgacttatcagttgatcactctcggacccttttaagcattcccgcccccctatttttctcctttaatttttaatttggctaatttcccaattttcagctcgcatcgattggtacgcccgcgtttggatgcccattggttttgcggtgttcaatgtgtgctattggagcgtttgtctgaccatggcttccaaccaaatatccgacaaaagaaattgatgacaacacagaattaattctttttttattttaaatattgccaatttattttattttccaattattatattttatgttttatttttattagtcgtaggatttatcaaagaaatgtatgtaaaaacggtttaatacatatcatatgtacatatttataaaataaaacaaaacattaaataatttgttcgtttttattaggttcggatgaaaggttacaaaaaataaataaatttaaacttcgaattaatagctattaatattaattaatatatttactattaatgattgttgctctgttaatccttatttggccttggaaaatcattttttgaatttgtcttaacattcggtggaaaatcctccaaaaaagcaaaggcgaaggtttaaaagaacctgattaaaagcactccctttcttcaaaatgctttttcgtcgttaacaaaacgattcattattctgtcctcggggcgaatgaaatg

SEQ ID NO: 23049 - DNA, 1421 bp, Heterodera glycines
cgttaattagaatcatttttaagttaatgcctttttggcgtcaaaattcaatttgtgtgtcggtcgtccgaatgatttaattatcttttgcccaatgccgacgccacacgcgtcggattcgacatttctttgatttgtcctttttgctgtttgtcaatcgtaattgctttgattaattaattatttgattaatttgggttcccaaaatggcaatgttaattttttgtacatttaaaaataaattttatttgactttccattcattggcctaatttattcatgaatttggtatcgattttcactgtttccgccgcctctcatctcattatttattcggcatctccccccccccccaaattaatggcggcactctctcccccgagggcattcattttttgttgattatttgtgctcccattattctctttctcccccccccccccattacgcgcaattcattgctattattttcttatttgtgctattttaattttgctaagcatttttttggacaaaaatctcttctccgtccctccattggcatttaatttattattataaaatggcaattcaattcaaaaaatgcgtcccttttccctcctccattttttccaaattaaaaacaaaaactttttggcctcgtcatttattcctttgttttcatgaaatatcattcatttgtaattattttcgtttcgttttgctatttccgcccccccccccttttgtccctaattgacgcaattccgcccacagcgttgtgatttattgtgcattttgtaccctccgcctccaaattctctcacccgcgggggaaatgcgcgccttttttggtgcttagaattagcaaaaaaaaaggaatgaaacgaaagaatgaatgcatacatatgcattgagaaaggccatgaatatttcacggaattgtccaaaaaaagtgagcacaaaaaaacggaaattcaaaaaaaaatgcatggaaaaagaggggaaacgaacaccacaaaatggaaatggacagatgaaaagtgtcttaatcacagttcgaagagtttgtacagcgtcaaaaaaaaattttttgaaaattgaaatttggcactaaaaactcatcgaaaccctcgaaaataatatttaaaaataagatgcaccgaaataaatttttattattatttctttttcatttaaatttcaaatttaaccaacaaattaagcacgtgctcatttgaattattaatcatttttccgagtcaaactaatgaaaacactgcgcttttttcggttcccccgggtccaattacatttgggcaatcgatctccgacaaacaatacaatgacagctaataaaaaataatttccatcgactccgctttgtatgtgcatcggaaaaaaagaatgaaagtggtcgttttcgtcattgggacagaacg

SEQ ID NO: 23050 - DNA, 1133 bp, Heterodera glycines
ggccgaaaaatcattttttagagcatacaaactgatgacagccactgtcatgtttccaaagagatttctattaccagattgccaaaaaaagagatagccatttttttggaccgtccatacctcacatatactcaaacggcccgaaaatcatttttagagcataacaactgatgacagccactgtcattgtttccaaagagatttctattaccagattgccaaaaaaagagatagccatttttttggaccgtccatacctcacatatactcaaacggcccgaaaatcatttttagagcataacaactgatgacagccactgtcattgtttccaaagagatttctattaccagattgccaaaaaaagagatagccatttttttggaccgtccatacctcacatatactcaaacggcccgaaaatcatttttagagcataacaactgatgacagccactgtcattgtttccaaagagatttctattaccagattgccaaaaaaagagatagccatttttttggaccgtccatacctcacatatactcaaacggcccgaaaatcatttttagagcataacaactgatgacagccactgtcattgtttccaaagagatttctattaccagattgccaaaaaaagagatagccatttttttggaccgtccatacctcacatatactcaaacggcccgaaaatcatttttagagcataacaactgatgacagccactgtcattgtttccaaagagatttctattaccagattgccaaaaaaagagatagccatttttttggaccgtccatacctcacatatactcaaacggcccgaaaatcatttttagagcataacaactgatgacagccactgtcattgtttccaaagagatttctattaccagattgccaaaaaaagagatagccatttttttggaccgtccatacctcacatatactcaaacggcccgaaaatcatttttagagcataacaactgatgacagccactgtcattgtttccaaagagatttctattatcagattgccaaaaaaagagatagccattttttttggatcggtcatacctcacatatactcaaacggccgaaaatcatttttagagcataacaactgatga

SEQ ID NO: 23051 - DNA, 2058 bp, Heterodera glycines
acataatggagtctctaactacttcaaaaaacagccaaataattttgtaatgaaattaactgaatatgcattatcggacgcattgaataacaatgaagtgaagaaaatttattttggcgaagaaattctcgaagctttggcaagtttcgatgctgacaaacgccgggcatacattttgatggaaaaattacggccgatgtctgtgaaggtaaagtcgggaaaatgcatcaattgtgagcttaaaaagtctcagtttcaattttcaaattcttaaaataattttataaattcatttatgcaaattcagaatcacattatttgggcagaggacggagaagaaagcagtggagaagactttttagaagacgtgaccccggaattgggaatttttggcactttgctcggcaacattgtcaacggtgaagtattgtacaatgcgcaatttggccatcagctgaagaccaaattggccagcgaaaatgcgcgtggcataacaactggaaattgtgcttttgatacggcatatttggtggactgattttttgaagggaaaaaggagaaaggaaggatgaagaaattaggataaatataaagcattcattgtttgatatataatcaaaatgtttcactttgataaaccaaataagctctttcttctttggactttataaaaagtcagaaaattattaattttaagtttgttatgaaatatttcttgttacttcttttctaaattatcaaaattgtttacaaacaatttttgatttagcgagattttagcacctaaaaacatctaaaacgggggttagcatctgttttggcattttcaaattttagaacctattttggtattttccagatgattttttttgacgcaatgaaatttttagcgacgtgtttaaaataattacaaaaattttagacaaataaatctatagaaaaataatctcccccttctccatttgtccccccatatctaattattcccccccccctttctgaggaggttgaaaaataatcccaccccggggcgataattagagaaagtacggaaaatgtatacgtaaattttcatctatcccattcatcgatttcaataaattttcctcttttcccccttcgctggcgaccccctccccccgaattaaattactggattttcggctcattgtaagaactacggtagaaaaccgttaactcccggcaatgaaaatttatcaactaaaaagatccgcggggggcttctactaggataaattgcggaaattttatttaaaaagtttcagcgattttttcaatagaaaattttgaaaaacagtaactcatttaaaaaacttcgaaacccaatgaagaattaataaaattttgatttcgcatcattctcattcaaaataaataataaagaatttttgaaaatatttattcaaatataaaagtccaaaagaagggacaaaggccgcttatacttttggaggaatgtgatggtcaaggaaacctgatgaatgtcagatctccaacatgaaattaatcttttttatattttttactttttttaaaggaagcacagaatttgatatcgaagtatcggatgttttgcaaatttcttataaatcttttgtggttctattaataaaggagtgttcggttttggttgttttttgtttgttagtaaaatagaaaaaggtgaccttttcctgtttgaaaattttttaagtatttctcgaaagcctcgctgggaaaaaatccggggctggaatcccgaaaaaatcacggcgggccacggtgaaagatgaaaatttggtaaaaatagtttaaaaaatttgtaaaactggaaaatgttaaagaaaactatgaaatacaattcaaaatgctttttatttatcgatgacgtgtattggcttttgtttgcacaaacatacaaaatgtttatttttcattcatttctacacattcccttttggtggcggcgtggcgcagttggtaaagcttctccttatgtctcgatgaaacttatgagttaaagtccgcttgccttctgttcaaagggtcaagaccgag

SEQ ID NO: 23052 - DNA, 1237 bp, Heterodera glycines
taataataaaaaattctattataattttttttgtagaggggaaattctgaaccaaactactatttgaaaacccaatcaaaactgggaaaaatttgaagtcaaaaaattattcgaatttctccaattttgtttccataatttccgaatgttattcggtatcataatgccaaaccaaaacgaattcgttttaaaatattcttttctggacttgacttggtttctcaatatcgaagcttttttctccgcaatttctaaaacgcttataccaaaccctagatttttggttccgatgggtttcagaaaaaatcccgtgtggtgcaaacatatttcacatttcacttcataactttttgagttctgcacggatcgagaccgggataagaccattggaaagagcagctcgagctctacaagaagctatggaaagaaaaaatcgacatttcagggactttttcagaaatcatatttaattccccaatggggccccattttgggtccccagccacagccccatgcttctcccaattgtggcgaaaacaatatttcacatttcacttcataactttttgagttcggcagggatcgagaccgggataagaccattggaaagaacagctcgagctttacaagaagatatggaaagaaaaaatcgacatttcagggactttttcagaaatcatgtttaattccccaatggggccccattttggttcctcagccacagccccatgcttctcccaattttaagtcttggatttgtcaaataaattaacgatttcgaattaataataaaaaattctattataaattttttttgtagaggggaaaattctgaaccaaactactatttgaaaacccaatcaaaactgggaaaaatttgaagtcaaaaaattattcgaatttctccaattttgtttccataatttccgaatgttattcggtatcataatgccaaaccaaaacgaattcgttttaaaatattcttttctggacttgacttggtttctcaatatcgaagcttttttctccgcaatttctaaaacgcttataccaaaccctagatttttggttccgatgggtttcagaaaaaatccagtgtggtgaaaacatatttcacatttcacttcataactttttgagttctgcacggatcgagaccgggataagaccattggaaagagcagctcgagctctacaagaaggtaggaaagaaaaaatcgacatttcagggactttt

SEQ ID NO: 23053 - DNA, 2147 bp, Heterodera glycines
  unsure (1)..(2147): unsure at all n locations
tcagtgtaaatgatgaatatcanaactggtttattcaataatccttcttcgtctcgctcctcacaccaatccattcttcataagaacaaaaacagggcatagcagtacgcgtcgaaaagaaatgggttaatgagtgcggtggccatgttttcagtcggatgcgttccgcgaatgggcactgtggaatttgccgtgtcgattaagcaactactcgaaagccatttttctcggcgaatcaaaacaaagtttcgataaagggaaaaattgctcagttggttgtgcaaagcccaattaacttcgctgaaaaccgtgggcaggtctttgttgcttgcgtgccaattgctgagaatttggcagaaaattaactttttgagttcgaatgcgcgaaaggtctgataaaacccagtttcgcaaatgaacaaaaagtgcaaatttggcgatggaaaaagtgcaaatttgctaaattttgctttttttcatcgcaaaatttgcatttttagccatcggtccgatttgcactttttatccctcccttgccttacataattgcattgctgatttcgcccttgtttcgactaaaccattcgtttgaacgctgggcacggttggtatcttgttcaaaatcaaatcgcgtgatcacaacatgcacaccacggacggctcgtaacaccttaaattacccaaacatttaaatttgtatttattagggatcgtgtttttggtttttacttagtttttctgcggctttaattcgacgaaaaaacactttttttggccatggggagctcagaaaaataggtaaaacctaaaaatacaatttgccgtggtcgcggatcgcacaaaaataaatccggcagtcgcgcatcgcggtcgcgcattaaaaactcaaaatttccaattttttttttgttatttttaaaagaaaattaaagattttggtcggcgccgactggggaaattggaattttgaaggatatttgcattttgcaaatctctttgattttcataaacagaaatttacttttaaataatttaaatatataaaacaatcgcttcaataaaaaatttatttttgaaattttatcaaaaattgccgcggagtcccaaattccgcggatcgtggattcaaattgccgcagtcgcgaatcgcggaaaaaaatgacgcgaatcgcgtatcacgctcgcgctcctccaacacacaaaatctctcagattctgttcttcgtcatgagacctataatatttttctgttttaattaattgctgatttaaaaatcttaaaaatatattttttttgaaggacagagtttctatttccaaaaattttaacttaacattttaactaaaaaattaagaacccccatccttccgttcgtttctaaaaaatcaaaaatcacgcgcataaaaatggcaatttttgttgcaaaatttgttaacaaatcacaaaccacctcctaattaaaaaaattgggcctaaaaaagggccctaaaaatgcaaaattgaccatttttcggtcccggacctaatcattacacataccacacagtttgcttccgaacaattttcgataaatgaccacctgccaccatcgagttcgatgtcctcaacgattaacacccgattgctgtatcttaataaaacaaaaatttacaaataattattaagctaagagttggggaaagaaacatacaatataataatcaaaaaacgaaatgaacatttacagtgcatggcataccaattttgtataataattactcttttaatgattattaaatgcataattttttgcattttcttttttttattttaacaaattaattatgatgtggacgatgagttgcccttaccgctgtaagcccatttcgtcggaaagatgtcgaattttcaaggcgacagtggccatttcacctggccctactatttcagttgaacggtgtaaaagttgaagaacgtgctcctcagtcaattttggccatgtttttgtctgaaaatattcaacattacaaaaaaatagtaagtacaatttttttgtatttgcgttcaaaaatggatacttttatttacatatattcgggatttttcgagtagaaatgtgcatgtttttctgaatgttttggagtttgacacatatttaaagattttg

SEQ ID NO: 23054 - DNA, 1205 bp, Heterodera glycines
  unsure (1)..(1205): unsure at all n locations
ttaattgaaanttagcttaaaaaatatttaatactgatcattaattttacaatatttaaaaaccattcaggtagggggtaattttcgttttaaagcattattgttaaggaaattctccaaaagcataacttaatggaaaaaaatggcaaaacgccaaatcggggcttataatatttattttttggcatttttcggagggtattacggttactgcaaaaaaagctataagatatataaaaatttatttttccctcgtaaaaattgttgaataataattacataatgttcaatttttccccacaaattaaaatatgctatacggtatgcaccgtaatttgattttgctaaacaaaatttttttttttttgcataaaattattaaatttttttccaagatcgtcatcacactgatggagacaatggcagaagtcatgcaagacgggatcatcatcatcaccagcatcgtcataactatgaaaaggaggaatatgaggagatggagaatttcgcaacaacaaaacattttgccaaatttcaattggcccttttattattggcaacatttattagcataatcagtgccagattattattttaatatactgtatgtctgcttagactttgtaaacagtttaaattagcgggatttttcgcgtaaaaaaatgaaagtcgagccaaaagccaaaaaggggtaaggcaaaactatgtataaatataaaaattagttttattaatttttaccaatttaaacatattaaatttgtttattttcctattaaattgaatggaactagttgtgcatttttgagaaaaaaaaatgcctatcctgaacaatttttggcattttccatcgcatttttagcacatggtttagcactcggtagcttagtttatgttttgaggttctttagcacatataaatcaataattgcttatttaaaaataagagaaattccagaatatctccgggattttcattaattacggcagagaaattttggaatttcatgaattcggaaaaaagaaatttcggattctacttgctttcatcccattacaatttaaatttgcgcaaatttttgtattgtgtggcgccttggaacagaatcggcaaagttgacgaagaatttttttttttatttgctatcttgcagtctaagtatagctggtttttcttattcatatttttgatacaaatttgcaaa

SEQ ID NO: 23055 - DNA, 1472 bp, Heterodera glycines
atcagatggggtgcgtcacatcctaaaaattcctcttttcgtctaaccatccctccctttttgtgcactatttcgtttcaacattttatcaattttttgttgtcttttgaaataaattgtgaaaaaatatacgaaaattattttcgcttttaattatgatgtacaatgcttttaagccccgccgtgaggcggcttctttttgtgcactattttcgtttttaaaattggatccggattttttggcttttttaaataaattgtgaaaaattcaaaacaataaacttttttattgcgctacaaatgcttttaagccccgccgtgaggcgggacagttccaaaatttgcaccacattttactgtggaaagtccaagtaccttaattggacaactacgtgtcaatgagcacagtcgccgttggccagttgtgaaacagaaaaatgggaatatcagatggggtgcgtcccatcctaaaaattcctcttttcgtctaaccatccctccctttttgtgcactatttcgtttcaacattttatcaattttttgttgtcttttgaaataaattgtgaaaaaatatacgaaaattattttcgcttttaattatgatgtacaatgcttttaagccccgccgtgaggcggctcctttttgtgcactattttcgtttttaaaattggatccggattttttggcttttttaaataaattgtgaaaaattcaaaacaataaacttttttattgcgctacaaatgcttttaagccccgccgtgaggcgggacagttccaaaatttgcaccacattttactgtggaaagtccaagtaccttaattggacaactacgtgtcaatgagcacagtcgccgttggccagttgtgaaacagaaaaatgggaatatcagatggggtgcgtcccatcctaaaaattcctcttttcgtctaaccatccctccctttttgtgcactatttcgttttaaaaattgggaacatttttttgtttgtttttttgaaactaaaatgtaaaaatttaatagaattatttttgattttaaataatgcttctgtttcgaatcttttgactctaagaaattaaactataaaatttagaacaattaattctctgaagtttttaacttggctttaccatgcttttaagccccgccgtgaggcgggacagttccaaaatttgcaccacattttactgtggaaagtccaagtaccttaattggacaactacgtgtcaatgagcacagtcgcctttggcctcttatggagcagaaaaggggaaatatcagatgggggtgcgatcctttcaaaaaattactcttttcgtctaaccatccctccctttttgtgcactatttcgttttaaaaattgagaacatttttgtgtttgtttttttgaaactaaaatgtaaaaatttaatagaattatttttgattataaataatgcttctgtttcgaatcttttgactct

SEQ ID NO: 23056 - DNA, 1090 bp, Heterodera glycines
catttaatttctcagagaattttaaatttatcttatatccaagaaaaatgactatctctttattttgagaaattttatacgttacaaatgctctcgagcatgataggaagggcggtgcgcaatcgccatttaatttctcagagaatttttaaatttatcttatatccaagaaaaatgactatctcttattttgagaaattttatacgttacaaatgctctcgagcatgataggaagggcggtgcgcaatcgccatttaatttctcagagaatttttaaatttatcttatatccaagaaaaatgactatctcttattttgagaaattttatacgttacaaatgctctcgagcatgataggaagggcggtgcgcaatcgccatttaatttctcagagaatttttaaatttatcttatatccaagaaaaatgactatctcttattttgagaaattttatacgttacaaatgctctcgagcatgataggaggggcggtgcgcaatcgccatttaatttctcagagaatttttaaatttatcttatatccaagaaaaatgactatctcttattttgagaaattttatacgttacaaatgctctcgagcatgataggaagggcggtgcgcaatcgccatttaatttctcagagaatttttaaatttatcttatatccaagaaaaatgactatctcttattttgagaaattttatacgttacaaatgctctcgagcatgataggaagggcggtgcgcaatcgccatttaatttctcagagaatttttaaatttatcttatatccaagaaaaatgactatctcttattttgagaaattttatacgttacaaatgctctcgagcatgataggaagggcggtgcgcaatcgccatttaatttctcagagaatttttaaatttatcttatatccaagaaaaatgactatctcttattttgagaaattttatacgttacaaaagcgctcgagcgtgagaggaagggcggtgcgcaatcgccatttaatttctcagagaatttttaaatttatcttatatccaagaaaaaatgactatctcttatttttgagaaattttatac

SEQ ID NO: 23057 - DNA, 1017 bp, Heterodera glycines
attgtctatctcttttaaaaattggaaaatttttctgctcacagtaataggaattccaaccgcattctcagaataattacgccgatactaattgttctggaatttgtttctcggcgcgtttgtttgggaaaaatttggaaaattggctatctcattttctgctcaacagtaataggaattccaaccgcattctcagaataattacgccgatactaattgttctggaatttgtttctctgcgcgtttgtttgggaaaaatttggaaaattggctatctctttttctgctcaacagtaataggaattccaaccgcattctcagaataattacgccgatactaattgttctggaatttgtttctctgcgcgtttgtttgggaaaaatttggaaaattggctatctctttttctgctcaacagtaataggaattccaaccgcattctcagaataattacgccgatactaattgttctggaatttgtttctcggcgcgtttgtttgggaaaaatttggaaaattggctatctctttttctgctcaacagtaataggaattccaaccgcattctcagaataattacgccgatactaattgttctggaatttgtttctcggcgcgtttgtttgggaaaaatttggaaaattggctatctctttttctgctcaacagtaataggaattccaaccgcattctcagaataattacgccgatactaattgttctggaatttgtttctctgcgcgtttgtttgggaaaaatttggaaaattggctatctctttttctgctcaacagtaataggaattccaaccgcattctcagaataattacgccgatactaattgttctggaatttgtttctctgcgcgtttgtttgggaaaaatttggaaaattggctatctctttttctgctcaacagtaataggaattccaaccgcattctcagaataattacgccgatactaattgttctggaatttaaaagtcggcgcgtttgtttgggaaaaattggaaaat

SEQ ID NO: 23058 - DNA, 2137 bp, Heterodera glycines
  unsure (1)..(2137): unsure at all n locations
ctgagcaatgatatcttgagggctgaaacttgnagtaattagggacaaagaatgattttgcaatttttaaatttgagggaaaaaactaaactatttaaaaaacatacggttcgcataacaaaactggcaaagcggcttcttgaatcttggacggctgaacaaatcccatcatgtgaagcgctttgactaattcgggttttctaacaaaaaaaaaagttgaaaattattttaaaaaagtgggaaaattgcatattatgtacattctgagctcctcaaaagtgtgtgctgaatagagaggtgaatttgggtcacgttgcaatttggacacttccggagtgccctcgttcaatttgttcagtttgtcattgagcactttgttcagcagcgaagtttcggcgtcaggaactgctgaaatttagacgaagaaattggttaaataaacgaaaatagcaaagtaataattactcttttcatcagactgcgaccaaaaattgccaacattcgattcagaattttccataatgatgggcaaaggattgagattcgactaaagtggtattattttgatacaatatacataaatatttgaaattaaaaaaaggaaaaaagcattgttaaaatcaagaatgaaatgcaaatgcaccaattcccgaccaaacattacgccaagaaaaaaaaaaaagaactaacttgagaagacccactaattcttcgtcgagtgtatgacatgatctgctgacgaacttgtacagatattttcagacttcttaagaaaattaaatggttaaattcacaaaaagaattattttcttcgattaaaaaagaatggcacttcaaatgtgataataattagaacggtccggacccaaatccggtttttccgggagccttagcaagtaacccgtattttttcgaccgatgtctttttacgtactacaggtgctaacaatccttcgctcgctcgggcgcccctctatttgtgtcgtcatcgcatgcttgttattcgcccgaacaaaagttgaaagtaaattttcaactaagttcactttatgcaccaaaaaaggctatttttcgtgcaattttttaaacttacaatttcgaagctatctaacgcagccataaaattaaaaaaacaaagtgattgaagacacaattttatttattttgggtactaaattgaattttttttaaatgaatttttgaattttgtcaaagtccgggctcggagtttgaaatgagtgaaattggatgtctgaaaacgaatttttgcaaccccgaaaaccacattaaagttttttctctaaaatatggaaatttttgaaaaatctaaattttggcataatgttgtaaattttcgaaaaattttaaattttctctgaaatttattgcgttttatttttttgcgtaggatggcagaggatggtgttctaaaatcggtgatcggacttcgcattgaacgggtggcagagctggacggggttgcaaagttttccccagacaaacgcatcgccaaattgccatggtaaaaagcaaagggaaattcgggcaaaaggcccgcccgatgaggaaattcatttaacctcgaaacaggcgtcttgaagtacggaaaagtgcgggcggaggacagcactcgccgcccactttggctgtttatgtttggtgcaattgggccaacaaatcgcagtgttggcgctgcaaggccatcgtcaaatttgtcatcaaatcacgcgaggtatccacatttgtgaagcctttactcagtgccattgagaattcaagccgtgccaatgttttcggattaaatcgaatggcattcgatttctttaatttcgatgaatttggtttttcccatttagttggattttgtccgcaactttgagcacattttctgcgctcgtcagccatttgtgaattggacacgtctgttggagtccaccgcagcgaacagtctgagacgggccgaggacacactcgaaatcgaggcacagatcagtgtcaccgaaatcgtcggatacgggtgagagtgagaagggtgtggtgaactgatagatcgcctcgcgaaacaatttttatagatcaatatttttgaatttttaaaaaattaaaaaacgagattttctttttacacagattttga

SEQ ID NO: 23059 - DNA, 1751 bp, Heterodera glycines
ctgtaatcattcataacgcttttgaaacagtcaattaattgtaaaaaacattattctgaaacaaaaaagttataaaaaattcatattacatttaattttatttattatagtataaaaattattcataaagcaaatattttgcgatgaatttttttggtgctagcgcgtttgttaaaaactgccacccatgcgcgtttgttaaaactgccacccatgcgcgtttgttaaaactgccacccatgcgcgtttgttaaaactgccacccatgcgcgtttgttaaaactgccacccatgcgcgtttgttaaaactgccacccatgcgcgtttgttaaaactgccacccatgcgcgtttgttaaaactgccacccatgcgcgtttgttaaaactgccacccatgcgcgtttgttaaaactgccacccatgcgcgtttgttaaaactgccacccatgcgcgtttgttaaaaactgccacccatgcgcgtttgttaaaactggcacccatgcgcgtttgttaaaactggcgcccatgcgcgtttgttaaaactgccagaacgataaaaatataatttatatattttacattttaaaatattaattttaattaatattatatttaagactgacgtattataataaaaaaaaatatgaaaatatttgccaacattaaattatagccaaagcgaaaatatttgccaacattaaattatttatacatttaaaaacgattggtaaatgaaaattttatctaaaacatatatcccatctttaataaaaaatattttagcaatttcttttaaaaatgaggatgcaaatatatttattaactatattattatgttcatgcttcaaatttttaaattgcatcgacttcgaattttcgaacttataattaagaattttttgtttcttctgagtacgtacccggtgaagttatcagtaaaactataatttctagaggaaattaatgttggaaagcaaatcctcattaaaatgatatttatcaagaatattcgtaaaaatcttctttaaggtaaaaattatcaaataaaagcaaaaaaggaaagcaggagataaagggctttccaacaaattaatattgataagctaaagtcctagaaacgacttttaaattccgaattattttctttaaaggaatttctgaagtatataaaaacaaataattaaagtcttacaaaattctagaggaaattaatgttggaaagcaaatcctcattaaaatgatatttatcaagacgattcgtaaaaatcttctttaagggaaaaattatcaaataaaagcaaaaaaggaaagcaggagataaagggcgttccaacaaattaatattgataagctaaattcctagaaacgacttgtaaattccgaattattttctttaaaggaatttctgaagtatataaaaacaattaattaaagtcttacaaaattctagaggaaattaatgttggaaagcaaatcctcattaaaatgatatttatcaagacgattcgtaaaaatcttctttaagggaaaaattatcaaataaaagcaaaaaaggaaagcaggagataaagggcgttccaacaaattaatattgataagctaaagtcctagaaacgacttgtaaattccgaattattttctttaaaggaatttctgaagtatataaaaacaaataattaaagtcttacaaaattctagaggaaattaatatggaaagcaaatcctcattaaaatgatatttatcaagacg

SEQ ID NO: 23060 - DNA, 1718 bp, Heterodera glycines
ttttttgatcagcaccaaaagttatgttaacttaaattatttcagatattttggccataaaatattgactttttcttcggtaaatttaatgggacaacacttttgaccacctaaaaatggggttggcacataaaatcgaatagaattcgggcaccaaattttatcttgactaatgattggtttcattgaaaagcccataaaaaatcttatcagaaagtgtgcttcttttttcgcagaatgcaaaacatcaatttttacttcctataatatttctcaaaaaaagatgagacaacacttttgaccacgactgtaattgatttgataatattttatttttatttgtctctttttcggaatttttacaacttttttctaaattttcagatgtcttcagaaattttttgttcgcctcggcgaaagcccaacgacatgtccaaagtgtcggtcgcacacttcgctgatggaaaacatttcactgtcctcttccaacgcgcaaacaccagcaaatgaaacggattcaaacagtaagtgatgagagacgaggagaaatgccgaattaagtgcaaaattaccgacaaaaatggcatttttgtgttggtttcggtcaaaatacggcattttcagttgccgagttcgccgtctgtcctcttccgaccgatccgtgcacttccgctgcttcgacttcggcacaaattcagcagccgccgcccattcccgcggttgtactttgtgaacgcaattttgtacgtcctcaattaccaaaactcattggaataattggcattttcttaaaggatgactcgcgatggaaggcgaattcgcattttggcgccgtcccttcgccctcctccgccaccactgaaatggcatcggcagagcgtcggatttgtctgtcaacttccaccgtttcttccacctgttcaacttcaatgcgacaaaaggggggaaaagagagcgatgacggaacgccaaaaaatggacaaaatgggaggggacaaaagaggcgggaggagaaacaacgaaggacggcacagccaatcacaacactttcgacattcgcaacccaaaaaggtgagagaaacggacgaagaccgatcgatggtgaccactgatcagcagaagtgatcagcgcaaattcaattgatcagaaaaggggaggaagaggaaagagactgatcagaaataatcacaagagagagacactgatcatcaatcttttcgaaaaataataatcagggaaagcgatcagcgcaaagcaattgattataaaggggaggaggaaacaggctgatcagaatttcttacaagagagaggcattgatcagcagttatttctaaaaatgaagatcagggaaagcggtctaagagatgtctgcttttattaccggagacttattttatgccggatatcatttttgcgaattggtgaccaattttagtttgacggcggctatttattgtccattagaggagctaatgttggaccaccaaaatttaataaaagttttgcctcatttcagagaatgcccttacaactggccggaacaacggcacggactgttcggtgtggcacagcgaatttgaggcggacgatgcgaacattgcgctgccgctgagttcgttggacggtggtgccaaacagaaaacgcagcccaaccatttggcacgccgaaggcggacgaagaagcgacggcaccgtcgtcaacgaaaggactttt

SEQ ID NO: 23061 - DNA, 1301 bp, Heterodera glycines
  unsure (1)..(1301): unsure at all n locations
ttgaatattatacaattgtgctttttgctctctatcaatttattataaaaaaattcacttcccttcgaaattgaaggcagaatgctcatttgaagctacgcaaatataaattaatatttgctataataactgactatttagtcaacagaaaacaaataaatcataaaattagaacaaaaaatgattttattttagaatgcacactgaagatgcataataagctaatatattcgaatttattttgaaataactgttcaacagattattagttgtttctaagaaataatgataggaagcttatctgaaatgtgtgctcacccaggttggaatttgtcatttcctgcaataaatgttttcatataaaggtttaaaaaatttgatcgggtttaggaacattcaacaaatgcatagataaattttttgaatattatacaattgtgctttttgctctctatcaatttattataaaaaaattcagttcccttcgaaattgaaggcagaatgctcatttgaagctacgcaaatataaattaatatttgctataagaagcgactatttagtcaacagaaaacaaataaatcataaaattagaacaaaaaatgattttattttagaatgcacactgaagatgcataataagctaatatattcgaatttattttgaaataactgttcaacagattattagttgtttctaagaaataatgataggaagcttatctgaaatgtgtgctcacccaggttggaatttgtcatttcctgcaataaatgttttcatataaaggtttaaaaaattcgatcgggtttagaaacgttcaacaaatgcatagataaattttttgaatattatacaatcgtgctttttgctctctatcaatttattataaaaaaattcacttcccttcgaaattgaaggcagaatgctcatttgaagctacgcaaatataaattaatatttgctataagaactgactatttagtcaacagaaaataaataaatcataaaattagaacaaaaaatgattttattttagaatgcacactgaagatgcataataagctaatatattcgaatttattttgaaataactgttcaacagattattagttgtttataagaaataatgataggaagcttatctgaaatgtgtgctcacccaggttggaatttgtcatttcctgcaataaatgttttcatataaaggtttaaaaaatttgatcaggtttaggaacattcaacaaatgcatagataaattttttgaatattnatacaatgtgcttttttgctctctatcaatt

SEQ ID NO: 23062 - DNA, 1217 bp, Heterodera glycines
gccagttgtgaaacagaaaaaatgggaatatcagatggggtgcgtcccatcctaaaaattcctcttttcgtctaaccatccctcccttttttgtgcactatttcgtttcaacattttatcaattttttgttgtcttttgaaataaattgtgaaaaaatatacgaaaattattttcgcttttaattatgatgtacaatgcttttaagccccgccgtgaggcggctcctttttgtgcactattttcgtttttaaaattggatccggattttttggcttttttaaataaattgtgaaaaattcaaaacaaaaaacttttattgcgctacaaatgcttttaagccccgccgtgaggcgggacagttccaaaatttgcaccacattttactgtggaaagtccaagtaccttaattggacaactacgtgtcaatgagcacagtcgccgttgaccagttgtggagcagaaaagggggaatatcagatggggtgcgtcccatcctaaaaattcctcttttcgtctaaccatccctccctttttgtgcactatttcgtttcaacattttatcaattttttgttgtcttttgaaataaattgtgaaaaaatatacgaaaattattttcgcttttaattatgatgtacaatgcttttaagccccgccgtgaggcggcttctttttgtgcactattttcgtttttaaaattggatccggattttttggcttttttaaataaattgtgaaaaattcaaaacaaaaaacttttattgcgctacaaatgcttttaagccccgccgtgaggcgggacagttccaaaatttgcaccacattttactgtggaaagtccaagtaccttaattggacaactacgtgtcaatgagcacagtcgccgttggccagttgtgaaacagaaaaatgggaatatcagatggggtgcgtcccatcctaaaaattcctcttttcgtctaaccatccctccctttttgtgcactatttcgtttcaacattttatcaattttttgttgtcttttgaaataaattgtgaaaaaatatacgaaaattattttcgcttttaattatgatgtacaatgcttttaagccccgccgtgaggcggcttctttttgtgcactattttcgtttttaaaattggatccggattttttggcttttttaaataaattgtaagaaattcaaaacaaaaaacttttattgcgctacaaatg

SEQ ID NO: 23063 - DNA, 1882 bp, Heterodera glycines
ctatctttacacaattggataagtggtggaagaaccccacaccccgcgttcatcaattaatttgtcgctttttggtgagctatttgttaatggtgcaggtgttgtactgacaatggcagtggtacgtttgaataaagacaatcttcttaaatattccgagtatgaataatctggctcgtgttgatgtcgagatagagtcaaattttttagataatcagagtatatgttttcggtatgttgttctcgcaatgatgatgatgatgatgatgaaacaatgggaagagaaactcggagcaagaataaaataagacccaattttttagagaacattttatttattttatggaacaaaatgatatgacaagcggactttaaatagtggtgtctgtgcttattgatcggtttttgtccagcatcaccagtgagtcacattctcccatcacaacaagcattattcctccgtcgggcactgggtgattaaattttatgctcaccgctgtggtcccattctttatcagatcaaacaatgccgcctgatcgtccccgctattggtcaaattgaaaacgtaaatgcaatgtgttttaccgtattgggcaaaagttatcccgttgctctccgatgagatagcgaacccaaccgcttcgttcatgtcattgaacgggcgaacatatttcctacttgggtaatccaggtcatagggcgcttgggcgtacgatcgtccattagcaacaatggaaatttcgcgcacattaaatggttgaaagttgaacgggctgcgcctaattgtcccaacatagtcagcattggccaccagacccattgtcacacgacgggggatttggtccatgaacagattggatgtaaactcataacggccctgactgataaacattgatttcatcattgtcttccttactgcataacgggcaggcttcacctccaactttctcgcaatgtccagcgccaacccatccatcagagacacctttttcacatataatttcagtccagtccaagaatctcgaaatggtagcggggtgcacccgcgataggcgaaattaacataaagtcgttgtcgttgggcaaaatttcaatgtccaattcacaaaaattgatcagatacaatggctgattgaataggtcagtgtctattttggcaatgaattgagctacgttgctacccgcaaacaaatctcgtcgcgctgtgcatccgcctcccatctccaatgtatcatccgtgtcccgataatagcccatggcattcagatgggagtcttttgctgtcgttgaataggagagctcatgcgagaaatatgttttgtaggccattaaagcgttggcattgaaaatttcgcgtccattaatactcatttttacgttgcggatgaaggtttgtccgatcatttgaattggcgcaatatttatatcatcagcatttaggttaatgagttgtccattagcgttttccttccggattcgaaactcagtgagcaaatagcatttggagaggtcaatgtaattttgacttgaatgaagtttgaagtggtagggtgtgtcggtcagcggattgctgggcagaagctcgaacactttcgatgacgacacactcacattggtcggcggaatacggaaaaagtccaaagcattggtgattgagttcacggagtcgttgtcgattttgtgaaatgccattatttaataaagtccaaaggcgtccgatcgaatacgctttttcccctgctttacaattggtcgaccaattagggtttgatgagcaggcagatatgctctctttctttttatacccttttttccgcttccaaactgttttggtaatcctcctttgtcgagtacggtatcaatccctttctttccttcact

SEQ ID NO: 23064 - DNA, 1170 bp, Heterodera glycines
  unsure (1)..(1170): unsure at all n locations
ctgcattgaatgctgcagtcgccgctgctgtacgcccttccgttgctgagttagggtcgagagcggcatgaaaaaagacaaaaaggaggaaaatgaaacaaattcgcggctttgccctcgcgttggagaaagcaatgcgcagaataactggggagacttagggttagcgcatcaattatttttttcagaatgtgatcggggtacaaaaaatacgggtccaaaaatgggtgtaactccgcttggagatgcgttagaaaagaaagaaaaatatgttcggacagcttttgaagagctgcattgaatgctgcagtcgccgctgctgtacgcccacccgttgctgagttagggtcgagagcggcatgaaaaaagacaaaaaggaggaaaatgaaacaaattcgcggctttgccctcgcgttggagaaagcaatgcgcagaataactggggagacttagggttagcgcatcaattatttttttcagaatgtgatcggggtacaaaaaatacgggtccaaaaatgggtgtaactccgcttggagatgcgttagaaaagaaagaaaaatatgttcggacagcttttgaagagctgcattgaatgctgcagtcgccgctgctgtacgcccacgcgttgctgagttagggtcgagagcggcatgaaaaaagacaaaaaggaggaaaatgaaacaaattcgcggctttgccctcgcgttggagaaagcaatgcgcagaataactggggagacttagggttagcgcatcaattatttttttcagaatgtgatcggggtacaaaaaatacgggtccaaaaatgggtgtaaatccgcttggagatgcgttagaaaagaaagaaaaatatgttcggacagcttttgaagagctgcattgaatgctgcagtcgccgctgctgtacgcccacgcgttgctgagttagggtcgagagcggcatgaaaaaagacaaaaaggaggaaaatgaaacaaattcgcggctttgccctcgcgttggagaaagcaatgcgcagaataactggggagacttagggtagcgcatcaattatttttttcagaatgtgatcggggtacaaaaaatacgggtccaaaaatgggtgtaactccgcttggagatgcngtagaaaagaagaaaaatatgttcggacagcttttgaagagctgc

SEQ ID NO: 23065 - DNA, 909 bp, Heterodera glycines
aaatttcctatttcactacagttttatttggtgttagagccaaaaacggacaactgctaattacatgtatgaccgcaccatacacaaaatggggggggaggcaccagattttttgaattgttctggggctcaaggggatcagcggtcaattttgtgaggcgtctgaattccgactctgaccgccttttttttgcttttcaaaatctgattttcatacagaattttgtccaaaaatctaacctattgggtcgaagggcgcgcttttaaaatacttgggatgcggtgtcgaagcaccgcgatgtcttcgacctcctacaatatcaacagtacgcaaataaaaaattttgtttttatcggcacaaaaatttttgtccattacaaggcgtgggaaaggggaagagtaaatagaggcaagagtgaaacacttcgaaatcctgctctcctttatattgtgaatttgttcgcactggcaattcggcgaacaatgaatgcgcataattggtccggagaacggctcaaagaggaagagaggcgtgtaagcggcggttggggggggggaggggatttgccaaaagattaattaccatttctgacagaagagagtaaatgtatgtgttaaagggcacataataacgaaacattttgttgttatgcccactagcaaaattgatttacatattgttttgtgcaaaaatctgtctaatctgaccaagattaatcactattgtcctcgccccaaataacgacgaaatacttcgcttacgaaatgcgaccaaaagcataggctgattgtccattgttcttttgtgaccgatttttggccttaaacagacaaacaatatgctaatcagccgcacaaaatttaacaggatttgaccacaagattgatgaccatatttgtattgtcat

SEQ ID NO: 23066 - DNA, 1242 bp, Heterodera glycines
  unsure (1)..(1242): unsure at all n locations
ctcttttcaaatatgcgaaatatttatggcaatacattctttccatattttccttaattaattggttgggcattttttcgaatctcgaaaatctctggctcggtaggcatgggactcaaaattttttttttcataatttgccataaaacattaaaaaaaattataattttcactttccagatttttattttattttattatatttattttaattatcatttataatttttaatgtgtccgcgccttcggagcaggtcgaaaaatatgcccataatttgtttttatgaatgttgtcttttttctattctttttggtctttgatgtttcaattaatttctttttcttttattatattttgctttctcgcccgttttcaaattttaattttttattggtttttaagaagtataaattaaaaattaaatacctgaattttttacatcacccggctatagcaaataaagaaaaataaagccatttttagagaaaagatggaattaagcgaaaatttttaattttatgttcccgtccttccctgtaggtcgatgctatttttttcatttgttccttcattactcgaagctattaaaaaataacttactatattacattttttcggttttatttattcaaaaaatgaaatatttaatggagaaaaaaagggggaaatagtacagaacagggctggagcgcgcacagaaaaaaaccgcggccgcgcatcgcgcatcgcgcattcaaattgccgcggccgcgaccgcgcatcgcgcaaaaaaaaaaaccgcggccgcgcaccgcgcatcgcgcattcaaattgccgcggccgcggaccgcgcatttaaaaacaaaattttcaatttaatcaataaaattttcccaagtgaaagtttttttgaaaaaaaatttgaaaatttgactgcactttgttacgaaaattgcctatattaaaatatgtactcattgggggaggcattcgaagaatttttccattatatagaaatttttttttaaattttcatgcgggggggggggaatcttggattttctgagtcccaaaattctggattttttttgaataaattaacaatctattaattttttaaatcgcgtttttgtgggcggttccaaaaaactttttgggaacattgtgggggggggggggcggcggtgccgataggcgccgccggaatattttgatattttcagcgnagattagttaacataatttgtcaaaaaataccaagg

SEQ ID NO: 23067 - DNA, 2534 bp, Heterodera glycines
  unsure (1)..(2534): unsure at all n locations
tcaaatantggacaccccatttttctacagctcctatcggtatcgccatccacaaaacccgtacaatatgaactaccaaatttgtatattatttagttgtctttgtttgcctttcactggtctctccaccgttcccatgtccatcactgtgcgcagccatcgttgaaaaagacgttcattcgtaaaaaggaatttgtcaaaaacattcactaattgtcgtaaaaagtcctaccacaattggatatttccatcccaattgagacaacactttgtcagtgtttgagcgcaaaaagtgactttgtgtgaagtgaaatttgccatcactttgaagggaaaatgaataaaataaaatcggtaaattatggcaaattataaaaccatcgaaaggcgcccaacggattaacttggattttctggtaccgtaattggattgacttggtaccccaaggtccgtgaatgtttggttgggttttcttcagtgttcactctgttcactcaactcaaacccaccggaagatattttccaccaatttttggagttgtgccaatttcggattgttgctcaattcgatcctttgcgcagatggaaattatcacacaaaactgaaattcgctcacattttgacccattccgaagttcgcatttgctccaactcgaagcccatccgacgcaaccaatccatcacttcggaccatcggagagtgttctgagaagcgatcaaatggaaaattttgccagaactttcgttgaacaactcgcaaagcacacggacaacgaaacgagccgaaaagtccacgggggtcagctccaactgaacataaagcgtagaggaggaggtcaaacagtccaatttgacctgccagtccaaatcgggcgttttgccagtgcaaatcactcccagaagcatcaaataagtgaagtctctgtcattccaattgccgtcgcaattggacggagccgactgattgccgagtcggtaacaaacgccgggcagtccacgagtgagcgacctaagggcaacggacacaaaaaatgccatggaaataattgtgttggtcgtggagagtgccgatcacacacctggtcaccagctgttccgccacgtatttgctctgtccgtacccatctgtcagctgatgacagtgattttgcggtgggaagtgttcgtcaacgccgcgcaaatcagcggggaacacccgcgtcggtactgaacggaaccaaagagaaaatgggcacaaaagagcaaatgccgcggttttttggtcgatttgtaagcaattaattatttatgagacaaatacttcaaatatacggctgacctgatgtaatgcagcggttttaacttattcttcaggcagaagtcaagcacattgcgcgtgccgagcacattaatgccatgcaaagccttgggaaaagcgagcgaatctcagcaaaagaaatgctgtgactgacttggtacggatagatcagattcacataagcagctgcatgaagcacaacatcgatgtcataggacaggaaatggtaatcctcatcagagagaccgaattggaaaagggcgatgtctccggcgacgacgcgaacgcggtccctgggaaggaaaagatcgacggacatggcgaagagaccagcgactgaactgacctggtcaagttgcggagatggtcggtcaacagtccattggcacgcaacgaattgaaaagacgctgcagaacactctcagcaggcgacgattcgcggactgacaaagcgacgaggcgaactaacccttaaaagaggcactcactcagacaagtcagccgagtgtccgtggtcagcaacagttcgaccagcaaatgagagccgagatagccggtgacacctgaaaaggttggacgccgggaaaaggtcggaatggacaccggtgaggaacacgttggagttggtgaagcgcctcttccaaaaccccgtggcacgccaaaatgccctcaggtgcaggtcctccagcaggcattgattggttaagcgaaatgacccaaatgaaaggcatcgccaaccatgacgttgtcgtgcaggtcgtggttgtccacctgctgctccaagtccacttcctcctccggactcgccctttccgcgccgtcgagcagtttggccatcgcgtaaactgtgggggccgcaaaaaggtcgcgcatgaccaattgggcgctgaattcggtgttgacccggttcagaagacgggccgccaacagagagtgcctaagggcgacgaatcgtaatattggcaagcgaacgcttcgattaccctccgaggtcgaagaaactctcttgaatgtccaaattgaccaaatggagaacttcgccccatatttttgctaatttctgtaagtttgtgtgttgtgcgtttcctttggttacaatttggcacttgttctgtttgcgtttggggaagtgcttccgcttcgacgacgtcgcgctcgaagtccacgggaggcagagaccttaattagcaaaaggagcacaatcatacggtgttacagtatccacaactttttgt

SEQ ID NO: 23068 - DNA, 2305 bp, Heterodera glycines
tgacattcaattttttaaccattaaaatcttaacattgaataggttcatcaaagatatgaaaaaatgattaagagtacaaactaacaaaaaactgaaaaaaaagaattttctgtagaaaccccaattatttttttggcttcgaaaaaagaatgaaattcaattcctttgtaattaattttctcaataagttattttcatcgattttaatttaatttcattgaaaaacgcgctgattttcaaattttcgctcctattttaccatttttcgcattatttcgcaatttttatgcccttatttatttacctatttttttcgcttaaaatccgccgcttaatgatcaggcaatacgaaggcttgttatcgcatatggtcccaatgaaaaccaaaatgatcaagatttgatcaatcattacgtgcacttcaatatggaattgacatgaaaggcttcgaaaaaggaattaattatgaatatctatcaattcttattctataaagcacataaatttatttcaatcagagcgcaaatgtcttttttcgctgtacggcgcaaatgtcgcggcgcaaatgtcgtttttattaggcggcgcaagtgtcgcggcgcaaatggcacggcgcaaatgtccgcggcgcaagagtcttttttgctgagcggcgcaagtgtcgcggcgcaaatggcgcggcgcaaatgtctgaggcgcaaaagacattaacgctataatttaagaaaattaataataattggatttagtaatctaattggtatattatatttgtttttaatttttaatattctcaattcataattatttatatcctttttatgcatttgttaaatttcatttagatgtatttttatttcatatattaaattaccgtttaaattattaatgtattctcttttttagtattcttaaatgcattcgaactggtgacataattgacttaacaggacatttcacttgtttatagaaaatatatgttagatataatgaattaatgagcttatctgttcaaagatctatgtaattattgagaaagtttttaattaaagcttcattccgtcctctcttttgtgaaatatatttatgggcttttacatgacataaactatctctcaaccaataattctgttgttcctttatggaatcaaaaccttcacttgatgatatattttttggaaaaaattcgtatagggtgtaatacgctaaaatgtgataaaaatgacctaaatattcttagaataatattgcctttgatatctcttttttaagaaacgattttttcgaggtatattttcaaaacttttagttttaaaaagaaattttacaaaatactcaaaatatataaaaaatgaaatatgtataaaattacataatttagaatttttggagtatttaataaaaaacacgattataaggagaatttttttttttgcaatttttcgaaaagttagtcctttttttgtggttcttagaatagatcattcacacaaataattttgttaagcgcttaatactaactcataataattttgcaagaaaaatgttttctgaagtaattgtttggttaaataattatttattttgtataatattattttactaaattcaatttgttatattttaatcgagtattatattttcatattgctttttatactattgtgttggttttttcgctaaattattttaattgctctcgcgtgtcaatatgtcttgttgcttttgccagacgtaaaaattttgttgcgcgaaattcactttcaatccatttcgttaataaatcaattatttaacattggaatatctttttttttattaattatttaaatattgcatttgactaaagtgtgacctaacgattttttggatatcttctcattctaagaagcttgagatttgtgattaaataattattattttatataatattttataaacaaatatttttatttaagttggaatattttagtcgattattaaatcatcttttttttctcgggtaaacttgttattttatttctcttttctcgagtcagatatttaagttgagcgtcggttcgaacatgttttaaatttttaattctgtgccgaatttatgatttactttgttattattaaatcattaaattttatttttaatttgatagttaataaaaacaaaatatgattattataataacaatctatttaaattatacataattttaaacatgccttaagcgcactcaaatattttcttatcgctccctttgaacaaagtcttgagtttcttcatttaaaaattttactaaggcattttgt

SEQ ID NO: 23069 - DNA, 2406 bp, Heterodera glycines
ataatgaaaagaaagaaagcgggagaattcagtgtgttggtcggatgacatttagtgatgttcgagacggaaaaattttccgagactcgagaccgagacccaaaaagcacgagactgggcgctacacgaatatgacatctatttccagcagatttcgagtagataacccgaacttgaataaaaatcgaaaattcaagtttctcgttcaaaatctttgttcaattttagctagaaagtcggaattgattaaaacaaaatgtcatgctcgtgatctaaaaaaccctccgggaacaaatttttattttttatttggcgaccgggaaaatgcgtcagtttagtcagtttatcagtgaatcagtgtatttattgaaaacgagatatgtgtatattataatagttagaaattttaagcgatatgggaacgaacttacagcaacccatttaccagaatattacattttatggtttttgaattttttttaatttattaaagtctatgagtttcctaaaaacggaattgttaaattcagaattaggctcctaaacaattttaacccttttattatgccaacaatagtcaatttaggacaatatttatttactcgacctaatactatatgtaaaacaatatgctgctacagaattttatttttttttataattcggtatactgacgcattttcacattgttatacatatatacgcagaagatcatttttggatttcttcgtgtttctatttgttatattttttggataaatttggtgaaaaaaaattttaacagaaacatatattttaatgcgtaattagctaattgtttaattaaagacggtttgaaaatttacattcactaaaagtttcaaaaaagaagcaaaaacactaaaaaacatttaaaaaaatataaaaatttgtatgaattttgcaaaatgttcatcattagggatgcgatttttaggcaaatgcctaaaatttctacgtacttaatacgcacagataagcacgaaaatatttcgccatttccggcgcctttttcaggattttggggaaaaatccttaaaaaatgaaaaatacacccctacgaatcgacagacatgaaaaaatttcaggaaatagacccctaagaattgaaaaaattttcacaaaaattatcccctaaatttaattattttttcttgctaaaatttttggtttaaaaattgtccttattcgaaaaagccttaaaacaattgaaatatacgaaaaattaagttttttgattattttgtgttttgctacctaaaagcgttataaaaatttttttgcctatttaatacctattttgcgcttttttgtgcctaaaatggaagccctaataataatacataagaaggaatgcaaatttaacaaattccaatcaacaagtgaacatctcttttcctcttcatcattcttcatttgaattcaaaggattattaaaaattccaaaatttaactaatttaaaatagtaaaaatttgttaaattttgcgattttgggtcattctttaagaaaaataagaagttttttaagtcttatttattagtcaaaataaagcagaatttatatcaaaaactatttttgcacaaaaaaattctaaagaaatatatttttttggacggaattatgaccccaaaaatctcagaaagcggaattgcgtgccgtccctgtacctactttttgctttccaaatcttgtcgatgaatgccgcgaattgaatgtggtcctcgtcctccaatgaaaggttatactcatttctagacgtgtcgtcaaacacaattggcttcaaattcattcgcaaaaggcaaacatttaccagtagagcccggatttttatgttttaacatatttttttgcggcttagttatgagtagggccgctatttttagtgaaaaactatttttttttttttgctcaattgatttgaagaaaggagctcaaaaaacgcatttttgcattaaaattttttgattctgatgtcactatgggtcactagaaatcactattttggcctttcgtcactaaaatagttgaaattcactattttggcattttatcgctatttttttcactattcgacatttttcagagattttattagcaaaaatgcaataaaatcaaaaaatacacccctaagaatcgatttaaaaaaatttcaaaaaaataaacccctaagaaacgatctaaaaaatttcaaaaaaaatacaccactaagaattggaaaattttttcaaaaatttttcccccaaattttttttcttgacaaaatttttgatttaaaaaatgtcaatatttgctaaagagaactttataaaggaaatgtagctcatttgcaactgcaaccagtgaataaatttatttttgcttaatttttggcttaaaattaggtca

SEQ ID NO: 23070 - DNA, 1119 bp, Heterodera glycines
ttccttcgggggaccgtgccgggtgccgcggggtaagcagtgctggttcgtttcatcacggcaccgaaccttttggctagtcagcaatcgttgcttaacttgccagatcggacgggtgcgcatgactttctgaaaaaaatatttatgaaacaaaaaaatcgattttttcaagaaaatttttcaatgtccgtttggggtactcaaacaattatggggagcaaaaatccaacgcagaattaaagtacaggctatagggaagctattcccgaaggattcggtctccccataaatctgggcgcatcggttcggggggactgccccgaaaacaaaaaaatcgattttttcaagtgtccgtttggggtactcaaacaattatggggagcaaaaatccaacgcagaattaaagtacaggctatagggaagctattccggaaggattcggtctccccataaatctgggcgcatcggttcggggggactgccccgaaaacaaaaaaatcgattttttcaagtgtccgtttggggtactcaaacaattatggggagcaaaaatccaacgcagaattaaagtacaggctatagggaagctattcccgaaggattcggtctccccataaatctgggcgcatcggttcggggggactgccccgaaaacaaaaaaatcgattttttcaagtgtccgtttggggtactcaaacaattatggggagcaaaaatccaacgcagaattaaagtacaggctatagggaagctattcccgaaggattcggtctccccataaatctgggcgcatcggttcggggggactgccccgaaaacaaaaaaatcgattttttcaagtgtccgtttggggtactcaaacaattatggggagcaaaaatccaacgcagaattaaagtacaggctatagggaagctattcccgaaagattcggtctccccataaatctgggcgcatcggttcggggggactgccccgaaaacaaaaataaatcgattttttcaagtgtccgtttggggtactcaaaacattatggggagcaaaaatccaacccagaatttaaagtacgggctattagggaagtttttcccgaaaggattcggtcttccccctaaatct

SEQ ID NO: 23071 - DNA, 1540 bp, Heterodera glycines
tgccgagtaccaacaacaacagcggcacggtggcagcaattctagtgccgaaaacaatggcacgggtggtggtgccaaaatgcagccaagacaaagtaaatggatcaaaaatgcttttcttaggtctgtaaaatgccatggccatgccaccgaattttggttaatttaatttttggtaaaaggtgtccaaaatttatgaggaaaaataattttggatttttttggggaggggggggggcgggggaaatacggccaaattttcggggattttctaattggaattgtataccctaatattgacaggacggaaagtgcccgagggtgagctgtgtgccgtgtgttccgacagggccaccggttatcattatggtcagttttctgttgcaaaaccccccagggggatttccatggcatatttctgggacaattccctgacaaaactccaccaatttttttttctccgataaaaattagagcacagaacttcgaagccacaattttcaataaacaaattctcgattttaaaaagacaccgaaaaacgccgccgggaaaattgcaaattgtgaaaatttacaaaaaaaaaaaaatttcatataaaatctctcatccattttcctaaaaattttctgtcaaataaacgagattgggagcatgagccaagtttctttcttgaagctaatcatttttttagcattttttttacgaaatttttttttaaaaatatatttaacgcccatttttaggggtggcaagctgcaacggatgcaaaacattcttcaggcgaaccattgtctctgaacacagttttggtatttgttcacattctccatttttaaattttgttctattttggagaggaattccaaaatttttagtcaggaaatttcatttttacaattttaaccgtccgtttttttgaaccctatgcgaaaaattctaaaaaaaaatttaatcaggtataagccagccattttttgtataatttttttgcacaaaaaatctcaatccgttgtccaatttttatttagtgtgccagtacagtggcaattgcgacgtgacaaagagtgggttttccgcgtgtttaattttggcatttttcaaaaaaaaaaaattcccattttttcaagacgttcgctgcgcgtgccgacactgtcgctttgcaaagtgagtatagtgccatcccatttttcgacaaaattttgccattttttgcagatgtgttgcggtcggcatggacgcaaaagccattcaaaatgatcgggacaggtacaattttcgacatttatcgaacaaaaaatggcacacaccgacaaattgcttgttattatgttgtggttttaaatcgaatgatttttttttgatgtgaaaaaacatcgacatttcgaaaggtacccacccagaaattgcagttaaataatttcattgtaaaatggtttttttttaaattttttaaatgggtgtttaaaattaaagtttgactcaaattttctaaattttttccccagtgtaaaatttcattggttttcccgaggcatcgaa

SEQ ID NO: 23072 - DNA, 1642 bp, Heterodera glycines
  unsure (1)..(1642): unsure at all n locations
cattttggtggaagctgcaaaaaaagagacagaaagagcatggcgggatgtggctgcgctaacggatgaagtaagcgattttgccaaatcttctcgcgaaacacttaatcgggcaataagatctagggaaaaagctcctcatgctaacggtgttcgggaattgtatcttaaaatgtcagattcaatttagggaaatcttcacaatcctggacaaaatcaatttggagtcagaaaaagccgaatctacgtggcgtgacttcgagagatgcaaaacttttgaccaggccacaaagctcgaggaacaatcgcaaaattcattaatggaagcccgaagattacatttcgagtcccggagggtgcagagccaaatgttaaattatgaaaataggctccaaacaattgtttgggagcatatgggtatataagaacgaaaaataatgatatagcaaaatggaaaattgtgtcataattgagacatattgtcataaggacttaaaatttggctttaaaaaacacaaaaccaaattttattttgtcaatccattttttgttaatgctgagcaaaaatttaaactaatactcacatcgctaatcgatgaaatttataaaaaggaacagggaaaatttaaaagcattttgaagctttcttttggttttgaatcattttattaccctcttaaatgtcctagcgaaaacacagccgaggctttgttccaacatgtcctattaaaagaagaattatagcctttggcggccctgaagtgctgaagtggcacacaatgggggctgaagatgtcattggcgctggttttctcgaagggcgcccattttttactctgaaccgggaacttttccgtaaaattttcacccgttttttaaattgaattttttcttaggcattgacgaggtctgcgtggaacccggccgctttgccgcatttccaactgtttcaatgattggcgaagggtcttccgcgggcgtgaatatgggacccatattcatgtttaatttgaaaaaattgttcatgccgtagccaaacaaaccaaaattttttaaaggcgcaaaaatggatgagcatttggccctgttcggtaggctaattgttttttcattgggaaaatgacaatgggtgagctaaaaagaaggcaaaagatcactgaacaaaaacaaaaaaggttgcaaaattcttcatatttatttttagtgtgctgaaagtgaaaaaacccggtaaaatccaaaaaatatatacactatgcaagaaagcggcaataatagtttttcctaaaaattgcaagaattatgtaaaaaacgaaaaatgaaaacaacggctaaatactaaaaattgatcgttataaaatatttacgtttttcttgtaaaaatttaccaaaaccgtttcaaaaaacgaaatgtctaccaataaagagagtgcagagaaaaaacagctctcactttggcgaactatcntctgtttttcgacaaaaaaccgaatttacttcactctatagaacttttttcccactanattttgcacaccgacacagaanaatattctgcatcgaatattctataaacatgcaaatctttttgggactgagaggcaannactgaacgnnngtgtaaatatatgctcaaaaacccaaa

SEQ ID NO: 23073 - DNA, 1504 bp, Heterodera glycines
ataaaatttctcaaaataagagatagtcatttttcttggatataagataaatgtaaaaattctctgtgaaattaaatggcgattgcgcaccgcacttcctatcatgctcgagagcatttgtaacgtataaaatttctcaaaataagagatagtcatttttcttggatataagataaatttaaaaattctctgagaaattaaatggtgattgcgcaccgcactccctctcacgctcgagcgcttttgtaacgtataaaatttctcaaaataagagatagtcatttttcttggatataagataaatttaaaaattctctgtgaaattaaatggcgattgcgcaccgcccttcgtatcatgctcgagagcatttgtaacgtataaagtttctcaaaagaagagatagtcatttttcttggatataagataaatttaaaaattctctgtgaaattaaatggcgatcgcgccccgcaattcctatcatgctagagagcattggtaatgtatggaatttatcaatataagcgatagtccaaagtcaagtaggtagcaaatattgagatttattaaatggacttacacaaagtttccagaaaacttttcccatccccctagagatcttttttgaaatataccccttgttcccatccaaaatgggctgatcagatcgccatgaaggagtgatctgatcaacttggtgttgctaccttttttgatcagcatccaaagttatgcttacctgaatttttttagatttttttaatgctgatccagagaagcaatattttaaaaatgaaatgggacaacacttttgaccacctatattttgatcaaattgtgaatatggtaaaataaatcaaataaatgtttatgtcacaaatgcaaatatggtatcattggaaagggaaccgcccaactcgccgcggccatctcgccgcgagaaactcgccgccgggccaactcgccgcgcgctttttcgccgcggggccaactcgccgcggccaactcgccgcgccttgttttttggctatctcgccgccagatttttcgttgaaaaaatgcattaaaagcaaaaattctttaacagttaattgtattcaatgtgttatatttcagcaaagtttctctccaatttaatatgcttcaaattgaaagttaacgcaggaaggaaaaattgcagaacgatatattcctctatattttccacaaatttaaagagcaatcatgtcgatcattggtcccgaaattttttttttaattttttctgggaattctttaacaagtttctttgggtattttgtggtgctgagcattagagaccggcgcgggacggggtccccttgggattttgcgggatcctagtcccaatcacacattttttgcaaaatgcgggattaatcccgcgggatcccgtcccgcaaagaatttttagttccaatcccgcagcgggatccgcaaatttgaaattccggtctctactgagcactccatttgaacctatttat

SEQ ID NO: 23074 - DNA, 2462 bp, Heterodera glycines
tttctctctctcacctttctctctctatttctttatctttctgtctctctttctccctctttctctctccatttgctctctctctctttttctctctatccatctttctctctttatttctttctttctttctccctctttctctctctctctttactctctctctctctttactctctctctcactgctcgctttttttctctctctctctctctctctctctctctcgatctcttcctctccctcttttcttcttcttcttctctctctttctctatcctttggctctctctctgctctctctctgcactctctctctctccacttttctctctctccctctctctttcttgctttctccctctttctctctctctctctttgctctctctctcactgctcgattttctttctctttctctcactatttctctctccccttagctctctctctctctctcttctctctatatttcattttctctctctcccttagcccgctttctttctctctctctatcccgtcgctctctctttctctctctctctatttctttctctcccttctctctttctctgctctctcttccaccctctcactttttctctctctctctcttcgctctacctctcactgcttctctcttctctttctttctttctctttttttctttatcttttccttctctctttttctctctcttctctcccatcctctcacctctctcttagctctttctcttctctatctctctctttgctttctcattctctctcccttctctctttttctctctccctgctctctctctgtctctctcccatcctctcatctctctctctttctctctctctctctgtcatctctcagtcttcccactctttttctatcgttaccatttccccattctcaatcgctatttatcttccgctttctctttaattgtcctcttgctttttctcctttatcttctctttatccctatctcttcttctctttctctctcagtcctctctttctccccttcctttagaatctcttcattctgtacactctctcgcttcctttttcatctctctctattgttttcctcttcttctctacctccttattcccaagcactcctacacactcatcacacacataaacaaactcgcacgcattcaatcctgcgtgacaaccgcacgcgttacccactctacccctcccatccgcgccgacagagaaacatacactgcactctctcttctacccatcctttctctattaatctccaattatattttttaattttctgtttctttttcctattacaacaaaacagcatttaaccgccaattcaaaaataggggcggggcttcggctgacttagtatatagttaagggattccaacattaattaaatttccgtaaaaatttggaattttcttcaaaattaaaaaaaataaagttccataccacatctaatgaccagggattctttttttatgtaaatacatatttttttcctggattctccatatcgatcgatgcgtcaaactttgggaatcaaaaactttttcctcttgttgttcggttttttacaaaagataatggtattgaaacccgtgtgattgacttggagtcacttccgggtgaaacgtcatttgaagtgagatcaattttttgcatttttaattgcaataaaaggtgcaccaatggatcaacaaaataatggaaaaatacgatttgaatgtatcaaatttgacggcactttcggcggacaacacaaaagccaatttcggtggagaagagcgcgcaggagagaacaatgtatttttccgtctaagacaacaaaatgaacgattgattggtgtgggatgtgtgtgccatgttttgcataacgcggcaaaaaaggcaacggataatttgagaattgaagggagagcaatggacattgaggcagtgatttgtttgacaatgttagcgaagcaaaccaaatactgaattcttttccaaatgatgaatttcaaaaattaacccccgaacagaagtggaagaagctatttgaagcaaattttccgcatctgctcaagctggtcagcattgttctttccattccggtctcgaatgcatttgtcgagagagtgttttctctttgcggctcacaatggactgatgttcgaaattcgttgcaagtcgaaacagtcaaggcgttggtccaaacgaaagccaattttgatctttcttgcccacaaatgtaccaaatgcaaatttccaatcacaaattgttggagaaaatcggcggatgggaaaaatacttttgataatcactttcaattgtttttgcgctaataaaatgttgttttaagtcgttttttcatgctttttattgcgtatccttcgcgctactatcagttttagaaaaaatcttagggggagtccgaatcttagttttagcctccatctgtctcttattt

SEQ ID NO: 23075 - DNA, 1835 bp, Heterodera glycines
ccctcaaatgatttgtctatcatttctttggaaatctcctaccatgatcggtgtatccagtcaagtaccacgtgaagagctggtgccttcggggttgcccgccaatgtaaactccttttccgactcattttacatccaaatgctgtagaagtgtcgaattcgctcctataacggctttttccacgagacatcgggagccttgtgcaagaaaaattaatttcattgagaaggatgatttggtacctggatgaatttggtgcaaccgccagggataaaaaccgtttccactcgcaatcccttcaccaccttcgtcgttctttcgctcttgtggctgccaaacgcatcccaaaccaagaggcgttcgccaacgaacagctttgcctcaatgattttgtgcaggtagtcctccgttgtgtcatcattcatccatatcgacccagcgaaattgatcaccaattttccagcaaattggttgacaatttgcggcaccggtcgctttctgttgaccagcacgtacggcttgagtttttgtccgttattccatgctgtaagacaacgtcacccgcattttgtcatatcctgtgatcgcaactgtcacctaattcgttagaataagttcattttatccaaaaaaaacttacatcctttgcgcctttattgtcgatgcatcggttgtccggacaatcgaaccaaacggccgtctcgtccattgcgaagatgccgccgggaaagttgttcatcaccttgcgcctttgttcaacaaaactgatgaacttgggtaccgcttcagcatagttggacgggggtttctgacaaaccgatgtctttttgcgcagcatgaaattgtgcctactcagaaatttttgcagccatccaattgatgcctgaacaaaattttttatttttgtagcttaatacttttttcactttgatatcagtgtccatgaacagcgcagccgccctctgtcgaatgatgttccttgactcaggctgtttattttttctttttttggcgatccattctgccagttcagtgtcgatgtccggacggtgaactgggagacctgctccgtcgagtctcattcgttcagttgttgcacacgacttttccgccgaagccttcgttttcaactccgctaaaatcgccacagaatgtgtggcacggcaatttgcagacataacagctgtgaattcctccataaattgctttacaaacagcaaaacgattccatattttctgaacttttcattaaaaattcccatttttatgcataccggaagcaaaaaataacatttttgccatttttggtgtcaattttcagaagttctttaacaaaaatgcaataaatatgattttttttgacgcgatgacattttttggcgacatgttcaaaaaaatttcaaaaattttccactaaataaatcagccgaaaaataatctcttagtctccattagtctaccagtctccaattatctacccctttctgaggatattgaaaaataatataccatggcatataaatagagtaaatacggtaggtacactgtgttaatttaaaataaagacaccctgttttttgggagtttgaccacttcccatgaaccgatcgagctgaatttttaactgtacgtagcaattctgaaaatattaagattctgaaagtgagaaaccgaaatgatgacggaaaaaagttttacgatttttttttcaaaaatggggtgttaatttaaaatagagacaattgataaaaacgaacaaaatctcaacaactaccaaaaataaacagataaaacaaactaaataagaaagaataaatcttttttcacatttctg

SEQ ID NO: 23076 - DNA, 2279 bp, Heterodera glycines
  unsure (1)..(2279): unsure at all n locations
ccttgaaaatttctctttttttcnttcgcatttttttatattgtgttacgactgtttttgggtgnatatacggaagcaaggtaattaaaaaataaaaatgacgtttctaaaatactgaaaaataatttattaagatntaaaaagcctaacggagcctaaatcatattttatcaatcacttcggatacaactttcaaaaaggtatgaataattaataaatgtagtttataaattaaatcttattgaaagcaaaatgaatttaaggtaaaatttacgaaaaatttcgaaaaaatgaaattgaaaaactaaagcaaaagaaaatgcgaaaagaaatggacagtgaggaagtgaagaagcataatgaggaaaaggagaaggtgaagaaactgttggcagaatataagcaaaaggtgaacaaacaaatggaaaagaatgtcgaggaaatggagaaggacgaaaagctaaaggaagtgctgagggaaattgaagaagcgcaagcgaaacacccgggggagaagagaaaagcggcgaaatccatcacagagataaatgagaagcattgggacgaattgtaccagggggacattgagttgagcgtggaacaggcacagtatttgctggatactgtaacaaaaaccgaaaacagagcgttgatgagagcgaagcgaggggcagccaggaatgctagaaaatttcccaatcacaaatggcctattcttgtcccattctcttttgacggctcaatttgtaagtttcaattaagagctgaatcaacatttaaatacctccgtgtttcctcgattattggcccctccattagaacccctactcccacttccattaaagccctcagaggggttgaaaagagaaccttcgggactcgaataaaagaaaatggtactatgattatagaaataaataaacgatcaattttttaagccagcgaaatgaaagcgcatatatatgaagctgtaaaattatggaacgataacacatgcttgaatattgttgaggatgacgaagtttctcctagaatccaattcacaaatattaagggcatgggatgcctttcaaacgttggaatgcaatcctcggatacataccaagaaattaaacttgaatacccaagttgttaccgagtaattaggaaatcatttacaacaataatctttaatattttcaaaagcttggagcaattgcgcatgaaattggacacgctttgggattttttcatgagcatgagagatatgatagggattcctttgttacgttttacgctgataatgttgaccccaaaaattattacgctttcgaaaaagaaacgattgagacgacagacaattatcaagttccttatgaccttggctcagtgatgcactataacgcaagtaagcacaaattaaaaaaaacatgttttatgccgagacctattttgcagaaacattctcaatcaatggtgagtatacattggtgcctcgagtgggtgcttcgtatataaacacaattggacaagaatatggtcccagcctcagtgattatattgttataaacaaacattactgtggattagagtttctcccggatggatcaaccataaacacaggcatttacaaatttgtttattgtacattgtttttgtaattaagaagcgtgtcatgttacaatgaactgtgacaatgatgggttccagaacccggacacttgtacaacatgcatttgcccacagggttatatcggagcgaaatgccaagatgttgacattggtggttatgcccctgccagcattgcaaatacttgtgaagggaatattttatttgcaacatcaaattggcaaaatgtaagcatattttatggtgcaccatttttgacttttcactgatttctatgtcccggtcgctaaaagctttaatttggcgaacccaaagaatcaatgacataaacatttaataaaattattaaattatttcaagctaaacagattttatgaaatgttaagaaaatgaaaacaaagaaagaaaacatgcattcactagcaacaagtcctatgtgcaaatcctatatttttaaacttctcacattttattatttcaatttgtcatcacttaggggcttcctatttgtcctatttgtaatgtagtagtagaactctcgatccatttcgttttatttcacatttctcttagataaatggacaaattggatccagtaacttgaactccaaaatcgattatgcctactgtcatttggcaatatttcctgacattggcaagactatcctca

SEQ ID NO: 23077 - DNA, 2294 bp, Heterodera glycines
  unsure (1)..(2294): unsure at all n locations
atcttcgaagcagcgggcatgaaactccgagaattctatggaagcaacatcgaagagctaaaaaagctgcaaccagacgacttggcaaaggacctcgaagacaacaaagtgctcggcattcgatggaaaccaaaacacaatcgactcatattcaaattgccaatcttcgaaggaaaaatcacaaaacggacaattctgtcgcaaattgccaaagtctattacccgctcggactcatgtcacccgtgctactgccagccaagctcattcttcaagaagtgcaaaacttgaacccaaaatgggacgacgaaatgccagcaaacatcaacaagtactggctcaaattgatggcacagtggctcgacagaggcgaagcaatcacgatcgaatttccaggcacatccaagccatcgactcagtggaattccactgcttctgcgacgccagcatatacggcatgggaattgccgtgtaccaaaaggccaaaacaataatcagaaaggatgaatgcaacctaatctacgcaaaaagccttgtcaaaccaatcaaagtggcagtgcacgacggcacaattccaaagttggaacttcaagcactgactctcggagtaaaagcagtcaaattcatccaagctcaaatcaaattcgccgatcatcaagtcatcatgtggacagacagtcaatgctcagtcgaacgacttcgagaaaacaagcgccaagatcgatttgtggcaaatcgattacaaaaaatccgagaagcgaattttcaagtcagacacgtcagaaccgactcaaacccggcggatatggcatccagaggcgcagatccccaatgccttcgaacatcactgctttggcgctttggcccgatttggctttcaaaagcagacaaatggccagaatccaacgtcatctaccgacccggagatgaattcaaagaagtggaaaagccaccaatcgttgatattccagcgcaaccaattcaagaagtgcacagcttcatcgcatcggtcatggacgactcagtttctcttgccggcagcgacgacgaaagtcaacaaccacgcccaaagaaaaagttcaaaattccgaaacgacgctcagcactgttacgacccatcggtcagcagcaaagtccattgcaaggacaacacaaacgccgcaagcaactacaagactcaggcttacgcaagttatttcaagccatctcggaccaacaaggaagcagcaaggccaccacaaaggtcatcgaagaaagccgagaaatgcagaaggcaccacgtcatgaacagatcgagcacgaacaacgaatggtgaggaaaagtcaacaagaagcaaatcgacatcttcaaccgaaaaagcggcagcaaaaagaaattcaagaagtgccacattcaacaacagaagagcaacaacgagaaaccaaacgccaacaaatcgaaagataacaaaatgacgaacagcgtgccatcaatcaacaaacacgcagtaaggcttggcaagaattggcacgacaatttgactacgatctgatggatcagccggatccaacagagaaacaaccggaagaaacggatcagccaacgaaatcaaagcaacaatcaacaaagaacaaagaggacaaagagctggaacgacatcgcatcggcagaaaaaagacaatcgacatgcaagaaaaacggcaacggtcaagagacgaatggccagaggaaaacgaaacgctgctcagctacgttcaacgcatttacggaccggagaattggacgtcagcatggcaaagaggacgtgttctccgagaactccatgaactggaagatcaagggcgatggatgattcatcacaaatccgatcgcctacaactcagcgtctcgcgaatgtatggaggaaaacgaccatttgccgagttccgcttcgtggaaggcagatactactcacacatggtgccagaagatgtgatcttcctccaagcagtaccaaccgaagaacagccggagatcataacaatcacgacacaacggcaccggcaacaaatacggaacaaaagaagcacccaacaaaaccgcaacgaccacaatcgccaaaactcgaagaataccgcatggccgactccaaaacgaacacgcacagccaattcaacctgttcgagccatgcgacaacacgcacacaacttgcgccaaaacagcgacttacggttccaccgcgggcaaccgattttcaatggaagaattccaaacttccgtgcnncacatttcttcgaggcattgctctttcactggctaacacgncacatgaactt

SEQ ID NO: 23078 - DNA, 1251 bp, Heterodera glycines
  unsure (1)..(1251): unsure at all n locations
aatttttacagaaaataaatagacgctgactaattagctaacatttataaagaaagtagaaatttgattaaatgcataggctagtgatttaaaatattatctttgacttaaatttgtataaagctttaaggttttgtctttgactttgcttttttttccatttatttcaatcggctagtgctttaaggttttgtctttgactttgcttcggctagtgctttaaggttttgtctttgactttgctttttttccatttatttcaatcggctagtgctttaaggttttgtctttgactttgcttttttgtccatttatttcaatcggctagtgctttaaggttttgtctttgactttgcttttttttccatttatttcaatcggctagtgctttaaggttttgtgttttgactttgcttttttttccatttattccaatcgaccacgttaattcattctctatacatttagtgtcttatttcatgaaattatattaatttaattttaaataaagaggcaaatttttacagaaaataaatagacgctgactaattagctaacatttataaagaaagtagaaatttgattaaatgcatatacaatatacaaaatattacttttttaaatttgtataaagttcctagtttgtctttgactttgcttttttttccgtttatttcaatcggctagtgctttaaggttattgtctttgactttgcttttttgtccatttatttcaatcggctagtgctttaaggtcttgtgttttgctttgcttttttttgaacggttatttcaatctgctagtgctttaaggttttgtctttgactcagcttcgctagcgctttaaggtgttgaaatgactttgcatgcagctcgtctgtgtgttaaagaaatttggcgagttaattgaatcggctaaagtgctttaaggttcaatgctgtgggactcagcactgggtatgctgatattaaagctggaaaaaagaagcgatttcgctgtgcgagtgagtggcgtattgccatggtttaagtgcttgcttgcgcttgtgctcggcattgaacggtgatggctgctgctgnggtgccacctttgtcgtggcctcagtttctccagcgattggcagctgtcgaaatgaataaacatgcagctcgtctgtgtngtaaagaatttggcgagtaattgacttgtgtaaatgttgcctagggcacaatgctgtggggactcagcactggggatgctgaacctaaag

SEQ ID NO: 23079 - DNA, 1639 bp, Heterodera glycines
gcctgtactttaattctgcgttggatttttgctccccataaatgtttgagtaccccaaacggacacttgaaaaaatcgatttttttgtttcataaatatttttttcagaaagtgctctaaagcgcaccaaattttatttacaacttaattttagcactctgatgctttagtatcaaaaaggaagatggagaaaaaattttttaaaaaatttttccttatattttggttatatcgttttgcttttggtggggtgcttggaacagtggaatcatgcgcacccgtccgatctggcaagttaagcaacgattgctgactagccaaaaggttcggtgccgtgatgaaacgaaccagcactgcttaccccgcggcacccggcacggtcccccgaaggaatggatttaattaaattctctccttcggggatttttttccattaggtcgtccgttagcgttcgattgctctagtcaatttttcaaaatttttgttgaaatatttgtcgtgctctgaagggcgtgggaggggggggggcgaaggcccaccacgaggccgcgaagaggccgagtgagtaccttcggtgcaggaaaattattaaattttaaaaattttttaattgctttttaaatatgccaaaaaatgtaggcttaacttttttagtgaaaattcgatcactcatatttttgctaattgagcagaagcgtaccaaactttgcagggatactccccggtaaaggactaacttacactgaaatgagcgccgagctagctggctcaaaaaaatttttcgaaaatctgagtctttcgtttttatttatttgcaaaattaattcataaatattttttcagaaagggttctgaaacgcaccaaattttatttacatgttagtttaggcactctgatgctttttctatcaataatggaggtgaataaaattttaattgctttttaactttgggaaaaagtttaggcttaactttttagtgaaagtttgatcactcatatttttttagtctaatctactcaaaacggttcagaattcaataaaaataacattcacggtgcgaaaaatggggtttgacaagtttattggggaaaaaaagactttacaaaataatacccctgggagaagggagtgggaaacatgatttcaaaattttcaattttttctagtctaatctactcaaaccggttcagaattcaataaaaataacattcacggtgcgaaaaatggggtttgaaaagtttattttgaaaaaaagactttacaaaataatacccctgggagaagggagtgggaaacatgatttcaaaattttcaattttttctagtctaatctactcaaaacggttcagaattcaataaaaataacattcacggtgcgaaaaatggggtatgaaaagtttattggggaaaaaaagactttacaaaataatacccctgggagaagggagtgggaaacatgatttcaaaattttcaattttttctagtctaatctactcaaaacggttcagaattcaataaaaataacattcacggtgcgaaaaatggggtatgaaaagtttattggggaaaaaaagactttacaaaataatacccctgggagaagggagtgggaaacatgatttcaaaattttcaat

SEQ ID NO: 23080 - DNA, 2376 bp, Heterodera glycines
  unsure (1)..(2376): unsure at all n locations
tcttccttcgctggtcctttcccttctcatttacaacattttatgctctcactcacccaaattctgctgatgatcacaacattcaaatctgcgatacatttttctgacttttctcttttcgtatctcaaaaagtctgtcctccgcgaatatttttcggtcgatgctcattttttaaacatttttcaatataactctatcaaaaataaataatttgatccaattaaaaaaattttttggttcttttgcaaatctaaattaaaaaacaaacaaatggatcgaattaaaccgcataattttaaataattaatgttatccttccgtcaatccgtccgaaaatgttttgtaatttcccgatcaatgtgccttagttgatctctccactttcaatgctctcaaaaatggcggaactttctctgtactgcttcacatcgcctgtcaaatgcgtccgtctcttttgttttgctaggctcgagaaattacaaaataaataaatgatttattcaaacaaagggcaattggattttgattttcactatttgaatttgtctcgagtaaaaacgttgtcggtggaatggcctaaggccaaaacaatggatgttcttcggactttaagagagggttgcacgggttcgcttatttgggaaagaccgggcttgggtattgccgggtccgagttttacaacatggaaaagggtccaaccgaatcctgaaattattcgtaattaaatttttccaaattaaagtttttttgttgatttttgtgaggaatttaaaatttatcagaatttgaagtccagcgtaaactaaacatattatacacagcggcccaattttgggctctcagtgcaaataggtttattatttatttagtaatcagaacgccaaaactttgcaaaacttaaaatttttttgggattttcccttgtaaaattagaagagccgatctcgagttaaaagcttaagtttttacaagggcaaacatttcaatactttaattcttttttagccaagtccacaatttaaggccaaaccaaataaaatttacaatattctccagaattttcccttcaaaatgagcataaaatggttttatttgctctagtattcaccaagttataagctaaaaaaatttcataaaattgtcgatgttgtacgtaaccaacgcttttcgaatatgattttttattgccacgaaaacttttattaatgaaaaaataattctgccttctttaagaagaaattgaaatcaacacacaacataaggaggacttgaacctgggaccccccttttggtgactaactcacagaccactaagacggaaaatccaacttaattgtacaaggagcccaaaattgaatggccgtgtaaatttacattttatccggcggtgccaatatgcggcgtttttctccagcgactaattcttaaaattttttcacaggtcgaattctattaatattgtggaatttagaaatcatttaattaaataaagagtgaaacagaaaatttttattgaacgaagcaaatacttggttacgattaaaaggaaattagcagccatgtgacaaaaattaaaaccatacataactgtgaatttgagaaaataaatgcttacaatgaaaatgattgctaagagtgctaaacagaaataaatattgctgaagaacattctggcacatttgtttaaagaaaaactgaaaaatcaaaggccacaaaagaaaatcggtaaagagaaaagaaatgaaacaatcggacggacgctaacaaaaaggactaaaaatccttcatttcaatttaaactgtcccacgggctgtttgacttgttccacgtaatttgccggtagcattccccagctgaaagttgaatgggacgaccaaccaattgaaaaataataaatatttatctattcattgttcatacagtaaagtcctctgcactgtccctgtcatccatccgtcgtccactttttggcagttcacaatgacgtcgccctccttgaagctgacctattcaaattggaaaatgtatcgccaaggaacaaatgctttccgaaatgtgttcttttccctcctttcactcacttcgtctttgtccgcggccgtgtaatcgtacaatgccttcacagtgaaaccgcccccattcgctttaggcgccgcagcgccagcggctggggccttctgttgctgcttttcggcagccaaagggtcgtagtcggcgattgagcccacgggtttttcaacatttgtggcatcaacttaaaaggaaaatttaaaaaacaaaagaaaaaacgggaaaatggggagaagcgaacagaatgcacacaaancgcaaattgaaggngtcaatattttaattgtgttcaaacagcaacaa

SEQ ID NO: 23081 - DNA, 2700 bp, Heterodera glycines
  unsure (1)..(2700): unsure at all n locations
aatgctttacaattaatgtattaaaattttttttatttcaacccgtaattatgccatttaaaattttcatttaattatttttatatatcaaaaattaataattctttctgttaaagttttaattaagaatcattttataaaaatgattagtttttaaaatctcttgtctcgtgtgcggttgttttgctaatctcctgtattttttatgcttttttaattttcattattttgatttaaattcaatataaagtttatttgattgttcgaagggctaagatattaacttatttgaatttttgcctctactcacttttggtaaattattaatagtttattatttattacttttacttttatgcaaattatttcttacttttaaattattttaaatttaggtttctaataattttcatcggtttattgtcttccttgaatttatggttttaaagtcggagtaagacaaaacgtcgtcggacgaatttttcgaccataactttttttcttggtattattcgaaagcattcgaaaaatgctattagcctgcaaattttcaaattttttattcaagcacaaaaaaatcagagcaaaaaaaaagtttaaaatactaggttttcgagttccttctggccataactttttttaaacttaacgaaaatttttgaaattttgcaaattaataataaacacatagagctatcgaacaacaccaacaatacttaatttgatttacaatgaacaaagttatggtccaaaaagtcttccggcgacgtttcggccggcgacgttttggggtgccccataataggcaccaaacaattgaaaaaaggcatgaaaaggcactaaaatcccgaaaaaggcattaaaaaggcatttaaaatttttttattaaggatttttagtgactgaaaatattaagattctaaaagtgagaagacgaaatgacgacggaaaaaagatttacgaatttttttcccaaattggggtgttgcattagaatagggacacctgggaaaatcggattaaatctcaacaactatcaaaaataaattgataaaataagctaaataacaaaaagcaaataattgttcatatttttgtttgttttgcagacaaaaatatgccttttaggcagagttgtattgaattttccaagtttttcagagaaatcaaggcctatgagacttaaatcgcctctatcatttgacccactgaattaaactggaagcaactaacactaaaataacttatatacatcccttaagcattttctattcactttatgtaagaaaaaattcattaaacacaaaatttttgtgggcgaaaaaatgtgaaaatttgggtaaattcgtaaaaaaatttctagggggttggtgaaaattttccgtgtaagatgaatatgatcaacagaaagagcacaaaattcaaaatcggtcgtttcgcctactaacccaaattctgacctttcgcatacttgacatctataacagacgctatttttgcaacaaaaccattgtttcattagacgtttcagatgacaacgatttaaaagtcgaagtaagtaatgatgaagaaaatttttggcttgtatatttccaaaataactactaaatactgatcaatttggaatatatatatatatatatttggtgaaattcgttttcgaaatatccattttaagatagtagaacaaaaatattctagacaaaacgtccgattttggcttagtaggcgaaatgtccgcacacctttttttatattaaaagggataaagaaatgggacgccaaaataagagatatatttttctctgcactctctatttattggttcatctctcgttttgggactgtgaaaaagcacttgaatttgtcgaattttggactgaatacttaaatattttttaaaaaaattttttcattaaaatccccaaatgtcgtgatccccaaaagtgggctagcctaattatgatggtaggtagaccaatatattaattgaatggaaacatattttatttttgaccctttattgtaaaattttaaatttcacatagaaattattattattcacccgtagcttgcttcaacagcacgcatggacggactgaaacatttgagcgactctgtgcaagcctaaattgcagaaaaaatggcatgtttccaagactaattatcaagtagttgaaataaatcaattataattagtctgccatttttaggcaaatgcctataatttctgagcacttgatacgcacagataagcacaagaactttgttttcagcttagtttggggtttttacgataacttttctaatgcctattttggaatttttatgcttaatgcctaagcgcctattttttatgcccatttcgtcatttttggtgcctatttgatccccaaattttgattgttttattcttgataaaaatttttggtttaaaaattgccttatccgaaccttttttttaattttcataatttcatttaggtgctaataactcgaaaagtagcttaacaacccccaaaaaaatatgtttttcatgcatttcgaccatagggagctcaggaaaaaagtaggtaaaacctaanaattgcatcactattcctaaaaaaggagtgaattatacgncgaattcattnaatttncctgactgtgattttgataaaatgcaccaaatctaaaaataatatataaatttaaaaa

SEQ ID NO: 23082 - DNA, 1233 bp, Heterodera glycines
gccgccgggaaaaatttgtaatttttaatgcgatttgtttacaggtttttgtccaaaaatgaccaaaatttgcgattttgggctaattttttaagaaaaaagtaactttatgcaataaaatttcaaaaaattctcaatcatgagaaaaaaattacattttattcacgaaagattcctaataccatattaataatcttatataataaagttgagtgtttgtgctatgtctgtatgtaacattgtttgaatgtggcgttttgtatttgctgtgaggagagattgaaaagaaaaagagatgaaaagaaatagttttgaaaaagaagaaggtaaaagaaatagtataggaaaagaaaaaagcaaaagaaatagttaaagcaaaaagatttctcttggaatgccggagatttgagtcccagagattgaaaaactggtgggttgagttccagagattggaatgtcattgaaagttggtgggttgagtcccagtgtttggaatgccggagaattgagtcccagagattgaattgctggtgggttgagtcccagagattggagaaaagccaagaaaatgatgcgagggcgcgaagcggccgagccagtcgattttatcattcataattctataacacaatcgtactgcctagcgggggatgcgccgaaggcgctgaccccgctagtaataaaaaataataattctcaactatgagcaaaaaattgacataatgccataatttaatatccaaatatgttataaattcaaaaatttaccaaatttcctttgattattttttccacttttccaaatgctcattttcaaggacgtccttgcatccaaggacattttttattttcaagaaagagggcccaatttcaaggacgtccttgccattcaaggacggatcccatccctgatttgatatcattcgacaaccctaggtgttttttatctggacctgccaaagttcgaataatttcgttattttacaaaaagttagaaccaaaaaattaggacaactatgaaatgagttatacccaaaaaaccgggggggggggggttatcaccaagttgtcccatacccaaaaaccgagttggctacctatttatgggtagcccaataaatttcaattgcccaaaacgatgaattaaattttactattatgtcttctttgaatgtgaaaaagatttttatgtcagttaaaattgaaaaaatttgaactaaacccatttaatca

SEQ ID NO: 23083 - DNA, 1797 bp, Heterodera glycines
  unsure (1)..(1797): unsure at all n locations
ttttttttgattttacacataattggctattttcaataatattatcttatgaaagtactaattggtttaaattttttacaaattatttttggttgatagtaccactggtggtacccctttttcgaaaaaaatttcgagattaataagctgaaaaattaaggttttcgaggttgtttgtcacgaattgactgtgtcctaaatgatattgctctaagatatcgatggggttttctgctgctgctttctgctcaaataagcaaaaatctgacgcaaaatgctgtcttgatcaacattgagggatttgcgcctaacaagtaagactttagagatttacctaattccatttgcagcgcatttaagcaacgaaatttggtaattttatgaaaataaaacggaaactaagtccgcaatttgtgagaaagccaatggcaagtatataaaaagatataaaataaaattttcgatatttagccaatattaaaaaatatatatttctcagtcgaaatgaactgtgaagaattgaacagtgacgaaatgatcggccaccgttattatcttcacgattaattcaatgagaagaatttatgatagagttctctttttatacataaaagcacctatgttgggatttgtttaaccaagcaaaattttttgttttttatattcttgtgtcttattttgtgtgaaaaactcccaagtgtttaaattgtacatgacgaaaaatggcaaaaattgtcaaaattggctattttataaaaaagattttgtggtttatcagaacaaaaatattttatgcatgaatagaaatgatatcacttttacaaaggttagctcaggaaaataaggaaaatatagaaatgattgtgtagatttagtgatccagttcaaaacctaaaaccccgataatcttttcatttgatagcatttaatcagctattttcttgccttttcaatgtaaaattgatttctgctgtgttccgtccatctttaccgaaacttaattaaattattaaatttctctaagataaggttcttttactgttattaatttccttgtctttatgcgtgtcgctttttggttgattggtgtattttatatgattcccaacaaactctactccatttaattatgacaatttggtgagctcaggcaactgatcccgaaattcatcgtcaaggtcaactatttttgacttatcactgttattgttatcataaagattgtcattttcggggtgatcattgttcccatttgcatgtaattaaacgagttggtgatttgcataaagctgatcaagctgattatcatccgaatcaccatcaactccattagcatgatgatgttggtcatgttgattagcatcacaattggtattagttccattattatgattatgatcgaatttgttactatctcgattagcattacgatgttgttgattaatttgagcatcctcaggttgaagattagatttatcagaatatagatcagatttatgcgctttactattaccaatgctcgtatggtctttatccttttctttgtcattactaatcacataacatattaaaacaataattatcatggctttaagcaacatcaagactaccattttgttcactcttctgtaatgaaataatagatgaaattcactcactttcaaaaaatagattttttatattttangagtattagctgaaattaagtcgaactaatattttcagaggcgtaaacccaaaaatataaaaagtataaaataaaaagagatatatatatataaagattttatataaaaa

SEQ ID NO: 23084 - DNA, 1954 bp, Heterodera glycines
taattctgtagtttgcccccccccccacctttttggcaaaaaaaattttcaaacatttttttgccctaaaaacaagatttccaggggtttttggggtcgctgaacacgaatccggcatccatttcggccaatttcgattcccggacccgaattcgaacaaaagtcgaaaactcaaattctcgaatttcacatttttggtctaaacatgacttaaatgatcttttattatggcgagagaagctcaaaatagcattttctccaaacaatttttggtttagagcgacttacaaaaacataggtatcataaaatgtacttacgtatttcagaatttgcgcgagatgctttagtataatagggcgtgtgtttttccttttgctgccatttctcctttccattgtcttcctttccctctattattacgctgcacactcgtcgtccaattgtgctgccatcagtttcattgccccccatggtgcatttttttgttcatttttgtacattgcctttctaattcgctttcccctgtttaattaaggctgatgatgttgctcctcccgctccttccgttgccgtcgatgactttgcgcagcgcaccggccaattcttcgacttcatccgccagggaaacatcgaccgattgcgtgcgctgatcgattcgctgagcgtcgatgagctgaacaccttgctgcagatgagatacaacgaacaacaatttgcgctgctggtcgcagttatggaaggacaccccgaaattgctgcacttttggtggacacaattttcaggggcaacaaataaacgacaataaattttgcccatttttcagttggacaaaggcgcggacgtgcatcagaccaccgttggccgagtgaacaatgtgaccatgggtgagcaattcggtttgcggaccgaccgattgtgctgtttgctaattcattttttcgccccattttcagccgttatgcccctgtggattgctgtcaatatgcgccacttggagatgtgccgtgtgctgatcgctcatggtgccgacgtggacttgggaagcgattcctcctttacaccgctactgctcgcatgtgccaaaggcagcacagcaatcggtgaagcaatcatcctgaataatttctcaaatttccctattttcagtcacccttctcgtggagagtggcgccaacgtcaatctcggggacagcgaaggagtaacgccgataatgatcacttctcgtttcggaagggtgaaaaaagcaaaacttggaaaaacttggcattttttgtttgttcaggtcgaacctgtgcacttcttactttctcacggtgcaaacgttgaacagatggattacagcggtggctttttgccaatttctaaataattatcgcgctaattaatgtcttttcaatttcagggatgcgatttgctcttttggacgccgccgctgatggccatttggaggtgtgccgtttactggtggacgattgggcagctgacgtcaaccagcaagcgatcgacggtaccacgcctttgatgggcgcgtgcagcttcgggcactttgaaattagtaagaagcaactggtgcataattcgactcaactttctgccccaattttcagcggtttttctcatcgaacacggcgccgacattgaccacgctgacatggacgggtacaacgcgttgatgtgggcagtgaagtacgagaaggctggtgtggcgcaacatttgctggcgatcggcgcgaacgcagaccaagtgggaattgacggtgggtgggcccaaaaagggcttaattgtaatgctccaactgattgactgctctccccctcccccatttaaggcaaaagggcgatagatttggcccaagaaggcagacgtgccgaaatgatcgacctttttcgaaccacagctaacaatgagcagcgggaggatggcaatgcgaaagaaaaaaaaagaatttcc

SEQ ID NO: 23085 - DNA, 1260 bp, Heterodera glycines
ttcgtcaaatgtccgatcatcggacagtcgcggctaaattccagtcgcgacattcccacgcttgaccaacgtgtgcacgtaatcgcacttggcctctgacttctgctgggccccagcgcccatggcctttgacttcacaatgggccccagcgcccttggcctttgacttcatgatgggccccagcgcccttggcctttgacttcatgatgggccccagcgcccttggccattgacttcacgatgggccccagcgcccttggcctttgacttcgtgatgggccccagcgcccttggcctttgatttcatgatgggccccagcgcccttggccattgacttcgtgatgggccccagcgcccatggcctttgacttcacaatgggccccagcgcccttggcctttgacttcgtgatgggccccagcgcccttggcctttgacttcacaatgggccccagcgcccttggcctttgacttcacaatgggccccagcgcccttggcctttgacttcacaactgtccgatcatcggacagtcgcggctgaattcgagccgcgacagtctattttttctttccatatcttcttgtaaagctcgagctgttctttccaatggtcttatcccggtctcgatccctgccgaactcaaaaagttatgaagtgaaatgtgaaatattgttttcgccacaattgggagaagcatggggctgtggctggggacccaaaatggggccccattggggaattaaatatgatttctgaaaaagtccctgaaatgtcgattttttctttccatagcttcttgtagagctcgagctgctctttccaatggtcttatcccggtctcgatccgtgcagaactcaaaaagttatgaagtgaaatgtgaaataggttttcaccacacgggattttttctgaaacccatcggaaccaaaaatctagggtttggtataagcgttttagaaattgcggagaaaaaagcttcgatattgagaaaccaagtcaagtccagaaaagaatattttaaaacgaattcgttttggtttggcattatgataccgaataacattcggaaattatggaaacaaaattggagaaattcgaataattttttgacttcaaatttttcccagttttgattgggttttcaaatagtagtttggttcagaattttcccctctacaaaaaaaatttataatagaattttttattattaattcagaaagcgttaatttatttgacaaatccaagacttaaaattg

SEQ ID NO: 23086 - DNA, 1720 bp, Heterodera glycines
  unsure (1)..(1720): unsure at all n locations
gaggaaggtgaatttgcataagaaatgccatccggaaaaaaacatttttataaattacacatttttatatttcctttgtttgcttttatgaattatttttgagaatttttttaacaaaatcccttttgacgaagtgaagcattggatgatgagaggatggtattgaattttgtgaaatggactttttcaaaacactgtaaaaccgggaaaagtaaatcccgtctcaacatgcaaccgcgtcgtcaaaccgaaacagcggacagtggaaattgtatgaaacagcagcaaaaataggcagccaaccagaatgaacttagttcttgacttaatggtgacggatttcgactctcatttcctgcagcggtaactccggctgtggaaatttaaatcatttaaaaaaataaaaagaaaaaaataacataaaaaaggaataaaaaaatagaattaatcttttcaatttgaacaccaaaaatagtcacaaaaattccgctttggtcaatgcgcgcttctccggctggtggaagtggcggcgatcctttatttttttatttttttatttattcgtgaataaaaagtcatcagaagggcaaaaaaccacttactctgacgactgttcagatagtatgtcgtagagtaagtgatataatatatatggatgatcaaaaaataaaatcaaaatatatgaataaaatgaggtcaaagtcaattgagatcgataacacaaatgtcaaatcacttaaaaaattaattctgtttttgcttttccggttattaccctaatgaatttttaagttttgttttaaattgatttaaagaatttgtttttattagttctttatcaagttgattccataattttgttaccctcccggcaaagggaatgaattttttgcctattttatattttgtgttaaatctgtaaaaggggatgttaaagcgtgtcgatggattaaaaattgaaaatagtttcagatctgttcggccataaacaattttatgcgccatgaacagatcaaatagctttcgcctattctcaagtgtcggcagttgcaggtattctaatcgattttggtatggaattggtggaaggctgcatttaaaaaatacccgtttggtgaaatatttttgacacttttctatttttttaatatttttttgaagagacggattccaaacctccggagcgtattccaataaaggcctaatataagttttatataacgtaatccaaatcttagatgatttggatttaattattcgaaacaaggaacgcatacgtaaatacgcattccttgttattttgtttacatgatcggaaaattgtaatttattatcaatgtttactcctaaatccctaaaattttgctcattggcaaatgtccactttatgctttccatctccttttaatttaaacgtaatttaagcggtttcgattcaaagccaaactcataaaatctgaattaaatatttttgaattttcggcacttttttcctaagaccaaataaaagctgcacaaaaaattgatttattttacatatttttgtgataattcctccatttttcgtgcaattcccaccgaaatanacaaaagtgtgaagggaatgaccaaatggacgcaaaaaagaagcgggagattcagttattaaattaaatatgacaattttattattgtataatttaaatgaaaaatatttttacgcctttttcaaattattttt

SEQ ID NO: 23087 - DNA, 1896 bp, Heterodera glycines
aagccaacacggcttctggcggaagtgaggcgttcaaccgcggacgagacatatgtggcgatgggctcagacaacgcgctcagctgcatgatgagacgtcagaagaagaaaatcctgggaaacgtcgattgcgtcaacccaatggccttcgtgatccccgacaaattgcgcatgaaaaatggcgaggacattgtgctctacgacagtcgcaatgtccgaattggtgaaaaagacgtggtgcttgtttttgggagtgaacgggtaatcgatcaggatgaaattgtgattaaaatgctcattttagactttgggcattttgagccaaaacaatgagtgtgaatgaatcataattaatttgctaaatgccttctgttatgtcccatcatttcaatgatttccccaaccgattgattcattttataaaaataagtgaataatttattctaatttaggctaaagagctgctctttttctgtatagtgaaagcaaaaacaataaaaatgttatttttatttattgcatttttaatttttcctattttatattattttccaaatttcaatcattttgaaatcaaatgtcggcttcatcgtccctttttttggccgtttctttgtcatgtttggcgatgtctgcaaacagtgagttgatggcaacttaggattagactcgtaaaatgaaggaaaaatgcgcgcttttgtataaatattaaaaaataaataaaatttattgtgtttataaaaatattcaaaattatagttattttatttttggaatttagcattttaatagtcaaaaaaattgaatttaattttggttttcttaagaaaaccatggttttttgaaaacaaaatattgaaatgattaaggcagtacttaatttagcactgaaatgttgggtgggcactgatcgcattgaacagatgccaaagaatgaagtacagtgcgaatctgggggacaccctcgtttcggagccgctcgtttcggcgccagcccagtttttggactataacttttttctttttccaccaaatctaacattattggtatcattcgaaagctctaagtgttctctattagcctgctaagtttcaaaaaatttcgttaatgctcaaaaaattatgactagaagaattcaaaaaaccaggccacatgtgtacttttggccataactttgttcaaaattgatcaaattttttggaattatgcaaaataatagagcatcagaagggctctcgaatgataccaacaatgttagatttgttggaaaaagaaaaagttatagtccaaaaactaggctggcgtcgaaacgaacggcgccgaaacgatgtggacccctctccacccccctctccctctatttccttccattttacctccatgtacctttccttttccttaccccaccctatcctcgaattatcatgtaaactactatgattttccatctaccaattcctttcttttttgaaaaaaaagagattattacctattttattattataatttccatattcttcaatctttattgccattttttctgtaaaaatatctatgtcaagcaatttgctgggccactatatgctgatgacgatcacagtcacatgggatgcacgataactctttgtcttgacagaacaaggaattgattcgaacccataatagctgattaatcacagggaccgttctaatagtgtcaactccacggaagaaaatcatggatatgcattgcatttatgacaaaaaaaaaaaccaaattttttgccatttttctggtcaaattttagtaaaatgaggccccaaacggcgcttccccgccaggggaatgtttataatttaattgaatcctttatcctcatttttttaaattttgaaaaagttcccatttctaatcc

SEQ ID NO: 23088 - DNA, 1381 bp, Heterodera glycines
  unsure (1)..(1381): unsure at all n locations
ttttcgatcacttggctcagtgccggatcgttcgcttttatgctcataaaacgttcatatttttctccaagtcccatccgatcatcgtttttcttctcctttacgctctttcgttttgaaaaaactcgcgcaagcattcctttgaattcctaatttagaataaattttaaatgccatcatttatttaattataataataattttggcattaccccttcagcagtttttggtttgctgaacacagcaaaacttatctgttcagtttccttcaaatccaacaataattggtcaaattcgtcgtccttgatttcttccatcttcaacagttctcccaattttcctttagttttctccgggttttccttctctttccgtcgttccttggccaacaaatcggccaatgtctcatgcttttcctcgcttattaaatctcccaaatttttctttttttgcttttcctctgcttgtaaattctccgctttatctttgccttccttggtcatcagttggcccaatgtttctccccgtttcttcgcttctacggatttccccgtttttgtcccatcgacgaaaaattggtgcttcaaaaacagcagaaagagaataaaagcaaaaaagtaagtcaaaatagaatttttcatctatatacatattaaaattcaaattatataatttatgtgataaaaaaagtgagaagtgcttcgtttaaatcctggccatgcttttgtcattgccagccaataggcattaatttacagtatgtaattcaatttaagattttttacatcagagtaattaaatgaaaaactgtatttttaccataattttttctttacttccttttagttgtcggaataaataaataaataatgaatattgagtttttacgtggtgagctgaagcgaaaaaagtatgcgtgtggcgaagcgaaaaaagtatgagtgcggggtgatcggaagaggcgggtcatttcagtacggaataaatgattttaattaattaataatataatattttaatcaattaattagatttgctgaccataattataatttcgatttattattttaatatttcacaaacaaattacatttttatgaattgaaatataatcccccagaaaagttttgactcagacctgaaaaactatcttatagttcatttaaaaacttgaaataattcatgtttgcataacttttggtgctgatcnaaaaagtctcttacaccaacttgatcagatcactccttccttgtgaccgtgacacccaaaataaactgaaaattggggaaattttcatccctaanngggctggaaattttttctagagaaaatgggcaagcccactggaaacgagcaaaaatttgctaccgaattgctttt

SEQ ID NO: 23089 - DNA, 118 bp, Heterodera glycines
ataccatgaatgcttaatttggatgcttctagaaaaagatatggtgcataaatttgtcaaattattctatggtcgtgtctttttttatggtcgtgtaaactgaaatagagcccaaata

SEQ ID NO: 23090 - DNA, 1192 bp, Heterodera glycines
atgccttgtggtgaaaacaatatttcacatttcactccataactttgtgagttcggcacggatcgagaccgggataagaccattggaaagagcagctcgagctctacaagaaggtatggaaagaaaaaatagttatttctgggactttttcagaaatcagaattaattctccaatgtggcccaaattttaggcccccagccacagccccttgcttctcccagttttaagtcttggatttgtcaaataaattcaagacttcaaattaataatcaaaaattctcttaaaatttttttaaacccaattcaaaaaaggaaaaaaatttgcagtcaaaaaattattcgaatttctccaattttgtttccataatttccgaaagttattcggtatcataatgccaaaacaaaacgaaatcgttttaaaatattcctttctggacttgacttggtttcttgatatcgaagctgttttctacgctatttctaaaacggttataccaaaccccagatttttgaatccggttttcagaaaaaatgccttgtggtgaaaacaatatttcacatttcactccataactttgtgagttcggcacggatcgagaccgggataagaccattggaaagagcagctcgagctctacaagaaggtatggaaagaaaaaatagttatttctgggactttttcagaaatcagaattaattctccaatgtggcccaaattttaggcccccagccacagccccttgcttctcccagttttaagtcttggatttgtcaaataaattcaagacttcaaattaataatcaaaaattctcttaaaatttttttgaacccaattcaaaaaaggaaaaaaatttgcagtcaaaaaattattcgaatttctccaattttgtttccataatttccgaaagttattcggtatcataatgccaaaacaaaacgaaatcgttataaaatattcctttctggacttaacttggtttcttgatatcgaagctgttttctacgctatttctaaaacggttataccaaaccccagatttttgaatccggttttcagaaaaaatgccttgtggtgaaaacaatatttcacatttcactccataactttgtgagttcggcacggatcgagaccgggataagaccattggaaagagcagctcgagctctacaagaaggtatggaaagaaaaa

SEQ ID NO: 23091 - DNA, 1298 bp, Heterodera glycines
attaaaaatttttagattttttattcatctccctttttgatattgaaagcatctgagtgcctaaaataacttgtaaataaaatttgatgcgtttcagagcagtttctgaaaaaatatttatgaattaattttgctaaaaaaataaaatagtgaagctttaaaaattaataaaaaattttaaattcagaattactggagttagcatcatagcagtgcttttccttgtctttttgatgctctcgcaaaatctggttcgcttctgatcagtttataaaaaaaaagttaagcctaaaatttttcgcaaatttaaaaagcaattaaaaatttttagattttttattcatctccctttttgatagtgaaagcatcagagagccttatttaacttttaattaacatttggtgcgtttcagagcacgttctaaaaaatatttatgaattaattttgcaaaataataaataattaatgaaaaagtcagaatttcgaaaaattttaaaaacaacaagcgttggcattttttcaggttaagttagtcctttacaatggagaaggcctgcaaaatttggagagattatatcgattttagtgcgctaggttcgatgaaactttttaaaatataagcctaaactttttggcctgtttaaaaaggaattaaaaatttttaaaatatttattcatctccctttttgatagtgaaagcatcagagagccttatttaacttttaattaacatttggtgcgtttcagagcacgttctaaaaaatatttatgaattaattttgcaaaataataaataattaatgaaaaagtcagaatttcgaaaaattttaaaaacaacaagcgttggcattttttcaggttaagttagtcctttacaatggagaaggcctgcaaaatttggagagattatatcgattttagtgcgctaggttcgatgaaactttttaaaatataagcctaaactttttggcctgtttaaaaaggaattaaaaatttttaaaatatttattcatctcccttttgatagaaaaagcatcagagagccttatttaacttttaattaacatttggtgcgtttcagagcagtttctgaaaaaatatttatgaattgattttgctaaaaaaataaaatagtgaagctttaaaaattaataaaaaattttaaattcagaattactggagttagcatcatagcagtgcttttccttgtctttttgatgctctcgcaaaatctggttcgcttctgaccagtttataaaaaaaaagttaagcctaaaatttttcgcatattaaaaag

SEQ ID NO: 23092 - DNA, 1168 bp, Heterodera glycines
  unsure (1)..(1168): unsure at all n locations
atttacataaaaatgctgcaaagtgattataatgtttattatttaatatattttaataaataaaatgattttacaatttgcttgcttctttctttgcttctttcttatgcaatttgtggaaanaatggtaatatttaaatttaaaaattgtttattattctntaaaaacaaataaatntagacaaaaagaagacgaaaaattctgtcccaacaatgacaaaagcttttcgaatgttaacaaaaattttagctgcggtaatttattttatttaagattaatttacattttttttttgcattttagcaaagtgtcattggcttggctaatggttcttctcccccttggcaacctcctacaaatgatgcagaacaaaaagcgtattacaatcctgtagaccaaataatgagtaaacgtaaattttctttgaaaaaattctcaaaaatgagtttttatatttataagacaaaatatatttgctgaaatcataattgatggaaaagtacaaaatttttttattaatatgaaaaaaagggcgaagaaatttttgcgggtttttaacaaaattaccaattttgagaaaattcttttaaattgtttttttaattttccaatcacaataatattctgttcaccatgaaaaaatagtaaaagaaatattatttttttatttgtattttttcataataactttgacaaagaaagaaataattttttggtaaatttaaagctccatctcaatcagccgatattgtttctgattatgcaccggtggtttcaaacccaccaatacacaataacaaaaacaattgaaagaaaaattggaattggatgctgctcttcaattttctgttattttagtatttctgatggcggaataattgttaaaatttttgcacgttgtcaaaatatacatttatcaattagcttaaagcaaaaataaataacgtggaatttaattagttttatttacggaaaatcacttaagaatggacgaatttgaagcaagaaaattcccaaaatcagatccaggtattcaaatttgggcgcttaacataaaagtgcaaaaatcaaaaattggatttttactgtgatttttttattaattntttattcatnaatatgtcaagattaattnaanntatttttatactcattcttctcctaatt

SEQ ID NO: 23093 - DNA, 1022 bp, Heterodera glycines
  unsure (1)..(1022): unsure at all n locations
aaaaaaaaaaataaaaatacccaaaaganaaggcatgtgccagccacttacacttntgcnggaaatgagtgaaatggaaagtagtgataaaagataattgaaattttgaatggaaaagcagaaattagaaaagtcagacctccaaaaaagggaaaattgttgtttttttaggggttttagaagaggaaaaaaatttttttattttttttgagtaaaatttttagagaaagtttgagggatattttatttgaagaaattgttggaggtctggtagaactatttgttgaaaagatgagggtattgttttttgagcgattgaatttggtgaacaattttgtcggtgggtggaaatgagtttagtgcttcataacagacgaggattgtttggtcaaaaacctccggcggtttggaaatgtcgtcgctggcctccttctggttaggtccatcttcgacaacgggggtcggggcatttgtctgtgagcttgccggtgccattggagttggtgtctgttgacgttttcggaggcgctcttcgtattccttcttgagttgttctttggtcagcgcagggcggacgaacagacgggccatgttctgttgagaacggagtcgagcacgctcgcgcttccatcccccgagtgccacgcgttgatgtgtagctgttggcatgaccaccttgagcggacgaggtgttgttcgctgggggtcgaaccggccaagtcgaaagacggcggttggttcggcctcaacttcaagatggtccaagattttggtagtggcttccctgtcttcctgaacgcgctccgatgggcgaacggcattgctttccgggaggccaatgaagaccaatgtgcgttggcgttcttgctctgcgagtgcgacagtgtttgggtccaggtccagtgggggtgccattgaacgttttgcgcgaggcggagtgatgtttgatgcgttggttcgcttcatgtcgaataattagcaagaaataattgttttttgcgatcttaaggactacagaagag

SEQ ID NO: 23094 - DNA, 773 bp, Heterodera glycines
ctccatcactgttctctctctacctctgatcactttcctctccctagctgtcctctctctacctctgatcactttcccctctatcactgtccttctctctctacctctgatcactcactgtcgtcttctctctccctttccctctaatcactcccctccatcactgtccttctctctctacctctgatcactttcccctccatcactgtccttctctctctacctctgatcactttcccctccatcactgtccttctctctctacctctgatcactttcccctccatcactgtccttctctctctacctctgatcactcactgtcactcttctctctccctctacctctaatcactcccctccatcactgtcctctctctacctctgatcactcactgtcgtcttctctctccctttacctctaatcactcccctccatcactgtcctctctctacctctgatcactcactgtcatcacttctctctccctttccctctaatcactcccctccatcactgtccttctctctctacctctgatcactttcccctccatcactgtccttctctctctacctctgatcactttcccctccatcactgtccttctctctctacctctgatcactttcccctccatcactgttcttctctctctacctctgatcactttcccctccgtcactgttcttctctctctacctctgatcactttccccttcatcactgttcttctctcactacctctgatcactttctcctccatcactgt

SEQ ID NO: 23095 - DNA, 1567 bp, Heterodera glycines
  unsure (1)..(1567): unsure at all n locations
gatccctttcccctccatcactgtccttctctctctacctctgctgttcctttccccttcatcactccttttctctccccctcccctttcagttgtctctctccccaaatgagtctctctccctccgatggcgtcgtgtcgcctttctctccttcgcttttgtcattttcgtcgtcggtgttcccatttggtggctgaccacaacgccttaccgggcttcgcttgctgtgctcgacccaactgagtacgaaacggcgctggaaaaggtgaccaatccgacgaagaaagcaatcgatagaaatccaccagcagaggaaaaaaaacaaattggaaagggtaggcgaaaaaaccgaaccaaagtctgaaatggtcgaattaattggattgattgtgcaaggggggggggcgaccatccgcccgagggaatgcatttaattggataaaaccccgaggaaaaaaggagggcaaattaagtgggggcaaaaggcgtttaagtaaaaaggaccatggtaatgcctttggataattttagacttttgatttgcttttagcattttcccgccccctctttggctgagaatggcggcgacgtttggcactctcttcggcctcagtccgaatattcagtccatttcgtttttgtccatcagaaagcgactcgaaattccattgaattttcacgctcaatcgaacggaaattgggcaattttgcgcaggaacatttaaagggaattggcatcgaaggtgccgacagtccgtccccttctcttttgaccccccccccttaagttctgctcagtgccgaacatttgttcgacttttccctctctcccttcgtttcctcctcccccctccgtccgttgcccatcgattcgtccgatcaacaattgcccgcctctctttgctccgaattggaccgtctgatgggttcggctccgctcggtaaagagtcgctgctcaaattggccgtctttttgccccaatttgacggacggacgcaaacggaaattcgactaacacaaaacggcgtaattcttcgaagattattgtgtgtgacagtttctgatcagtgacgtctttccctccctaatcacttgcatagtatccatttctgatcagtgccatctttcattcactgctgatccgtgccatttctcctcagttgcccaccgttggtttggctgtcgcctcatggggtggccttttcattccgccacaatctgtcaacggaaatgccgactacgccgctcttctcaatgccattttgtccgttttgcacctccaatttgccattgtccgtcctcctcctaaggaaggagaagaaacggcacagcaaatgctcaacaaaacatttattggacacaaaaagcgattagtcgtcgagaatttggtgcaaactctgcgcactttgaacgctcttcacaaatgcgagttttagcgggggcggagggattaataattagggatttactaatgactcaaaagtcttatccgccctccaattcagtggccgaaaaccaggtaaggtttggtaattcccgacgnnaagtagcgcgtctttcaatgg

SEQ ID NO: 23096 - DNA, 1778 bp, Heterodera glycines
tctaagaacttgagcaagagaaatttggtgtaaaaaaaattgaaaattggttcaaataagaattgatgaaaaaaataattattaaatattacttcaaaaatgcattgaaatatgaagataaaagaactatttgaaaaaataaggttgaaatttatacagaaggtttcaatttatcaaattaaattaaataatcaaagtttgacaaaatacaggaatttgacattccttcactaaaacttgaagttgtttcttgagttattataacaattaaagttattttttatattattttttcttgctttgcatatattaacaaaatataatcgatttcttttttaaaaaatttttaataaatatttttgaatctttaaatacaattaaaaataataaataaccagataaatgatccgaaacataaatcggtatcgcgacgaagaaaatcttggatatgaatagataaattaaatttaatcatcttaaaataaaaacacaaattttttacgtttgaaaattagaacatgaacaatgaaattaatttaaaaaattttttttttatatgcagattttatttaattgaatttatctagcatcaataaatttaatacacatttactgaatgaaaaaatataaaaacaaaatcttcttttcacatatcacttaaatttaaaatagtttatggatttattaaaatacgataataattgaaaaattaaatcaaaaatcaaattgcttaaatcaagtattaaaccatccaaatggcgcggcgcaagatgcaatgcaaactattaattaaaattttattttttcctaacaattataattattgtcatctaattaatttttcaaaattttatgaatgaaattattattagaaataattaaaataagcgtatgaaagcaaaaaaatataataatctattcaattaatatgaaatttctattagtctaatatgaaaagttaattacaaatggaaaagctatgaaacttattagattaatttgctaatttactaatttcaataaaatttgaaggtaaagatcaaaaattgatttttgcttgatttattcaaacatcatttgtaatttttgctgtttaatgtaattcggctattttaaacaataatggactatatttacatttaaaaagaaaacacatctgatcctctgctattaaaaatcattttcaaaaaaaaaattatataaaaaattaactttgaaaaaaattaaaaatgatcttttaatgtttttctttctaattaaatattatcaatgtaattctatacaaaaagccatttggggttgaagatacaaatttttcagtatcttttaaactacaaatgcatctattaataatttattttatacaattaatatttattttttttaatatttcattaatttttagtttatttttttaatagtaatcccaaaaatcagcatttttattgaaaatctgttaacaaattgcacttaaatttgtcgactagggcggtggtattcccacgaagaaaaaaattctgggaccgtcatctcgcggtcttggtcagtagaatatattcatacataaattatcgattttttgccaatcaagtcaatcgatctgattggcaaaccagaagatgtgggttttgtccaaaagcctattgctacatgcgggtgccgtgcctcacacgctgactccgccccctttatcatgatgcaatcaactgactccgcccccttagcataacccaatcaactgtctccacctcatgacgtcattagctgacccccccccc
